United States Patent Application Publication US 2018/0126003 A1 - sequence listing, part 32

SEQ ID NO: 52622 - protein, 706 aa, Artificial Sequence
  derived and/or modified sequence
MRPMRIFVNDDRHVMAKHSSVYPTQEELEAVQNMVSHTERALKAVSDWIDEQEKGSSEQAESDNMDVPPEDDSKEGAGEQKTEHMTRTLRGVMRVGLVAKGLLLKGDLDLELVLLCKEKPTTALLDKVADNLAIQLAAVTEDKYEILQSVDDAAIVIKNTKEPPLSLTIHLTSPVVREEMEKVLAGETLSVNDPPDVLDRQKCLAALASLRHAKWFQARANGLKSCVIVIRVLRDLCTRVPTWGPLRGWPLELLCEKSIGTANRPMGAGEALRRVLECLASGIVMPDGSGIYDPCEKEATDAIGHLDRQQREDITQSAQHALRLAAFGQLHKVLGMDPLPSKMPKKPKNENPVDYTVQIPPSTTYAITPMKRPMEEDGEEKSPSKKKKKIQKKEEKAEPPQAMNALMRLNQLKPGLQYKLVSQTGPVHAPIFTMSVEVDGNSFEASGPSKKTAKLHVAVKVLQDMGLPTGAEGRDSSKGEDSAEETEAKPAVVAPAPVVEAVSTPSAAFPSDATAENVKQQGPILTKHGKNPVMELNEKRRGLKYELISETGGSHDKRFVMEVEVDGQKFQGAGSNKKVAKAYAALAALEKLFPDTPLALDANKKKRAPVPVRGGPKFAAKPHNPGFGMGGPMHNEVPPPPNLRGRGRGGSIRGRGRGRGFGGANHGGYMNAGAGYGSYGYGGNSATAGYSDFFTDCYGYHDFGSS

SEQ ID NO: 52623 - DNA, 2121 bp, Artificial Sequence
  derived and/or modified sequence
atgagacccatgagaatcttcgtgaacgacgacagacacgtgatggccaagcacagcagcgtgtaccccacccaggaggagctggaggccgtgcagaacatggtgagccacaccgagagagccctgaaggccgtgagcgactggatcgacgagcaggagaagggcagcagcgagcaggccgagagcgacaacatggacgtgccccccgaggacgacagcaaggagggcgccggcgagcagaagaccgagcacatgaccagaaccctgagaggcgtgatgagagtgggcctggtggccaagggcctgctgctgaagggcgacctggacctggagctggtgctgctgtgcaaggagaagcccaccaccgccctgctggacaaggtggccgacaacctggccatccagctggccgccgtgaccgaggacaagtacgagatcctgcagagcgtggacgacgccgccatcgtgatcaagaacaccaaggagccccccctgagcctgaccatccacctgaccagccccgtggtgagagaggagatggagaaggtgctggccggcgagaccctgagcgtgaacgacccccccgacgtgctggacagacagaagtgcctggccgccctggccagcctgagacacgccaagtggttccaggccagagccaacggcctgaagagctgcgtgatcgtgatcagagtgctgagagacctgtgcaccagagtgcccacctggggccccctgagaggctggcccctggagctgctgtgcgagaagagcatcggcaccgccaacagacccatgggcgccggcgaggccctgagaagagtgctggagtgcctggccagcggcatcgtgatgcccgacggcagcggcatctacgacccctgcgagaaggaggccaccgacgccatcggccacctggacagacagcagagagaggacatcacccagagcgcccagcacgccctgagactggccgccttcggccagctgcacaaggtgctgggcatggaccccctgcccagcaagatgcccaagaagcccaagaacgagaaccccgtggactacaccgtgcagatcccccccagcaccacctacgccatcacccccatgaagagacccatggaggaggacggcgaggagaagagccccagcaagaagaagaagaagatccagaagaaggaggagaaggccgagcccccccaggccatgaacgccctgatgagactgaaccagctgaagcccggcctgcagtacaagctggtgagccagaccggccccgtgcacgcccccatcttcaccatgagcgtggaggtggacggcaacagcttcgaggccagcggccccagcaagaagaccgccaagctgcacgtggccgtgaaggtgctgcaggacatgggcctgcccaccggcgccgagggcagagacagcagcaagggcgaggacagcgccgaggagaccgaggccaagcccgccgtggtggcccccgcccccgtggtggaggccgtgagcacccccagcgccgccttccccagcgacgccaccgccgagaacgtgaagcagcagggccccatcctgaccaagcacggcaagaaccccgtgatggagctgaacgagaagagaagaggcctgaagtacgagctgatcagcgagaccggcggcagccacgacaagagattcgtgatggaggtggaggtggacggccagaagttccagggcgccggcagcaacaagaaggtggccaaggcctacgccgccctggccgccctggagaagctgttccccgacacccccctggccctggacgccaacaagaagaagagagcccccgtgcccgtgagaggcggccccaagttcgccgccaagccccacaaccccggcttcggcatgggcggccccatgcacaacgaggtgccccccccccccaacctgagaggcagaggcagaggcggcagcatcagaggcagaggcagaggcagaggcttcggcggcgccaaccacggcggctacatgaacgccggcgccggctacggcagctacggctacggcggcaacagcgccaccgccggctacagcgacttcttcaccgactgctacggctaccacgacttcggcagcagctag

SEQ ID NO: 52624 - DNA, 2121 bp, Artificial Sequence
  derived and/or modified sequence
atgcggccgatgcgtatcttcgtgaacgatgacaggcacgtgatggcgaaacattcaagcgtataccccacccaggaagaactcgaagcagttcagaacatggtcagccatacggaaagggcattgaaagcggtgtcagactggatcgacgaacaggaaaaaggtagctccgaacaggctgagtctgacaatatggacgtgccgccagaggacgacagcaaggaaggagccggcgaacagaaaactgaacatatgacccgcactttacggggtgtgatgcgggtgggactggtggcgaagggcctccttctaaagggggacttagacctggaactggtcctcttatgtaaggagaaacccaccaccgcgctcttagacaaagttgcagacaatctggccattcaactagccgccgtcacagaagataaatatgagattctgcagagcgttgacgacgccgctatagtgataaaaaacaccaaggagccacctctgtccctgaccatccacctgacttctcccgtcgtgcgcgaagagatggaaaaggtcctcgccggagagactttgtccgttaacgacccccccgacgtgctggatcgacagaaatgtctggcggccctggccagcttaaggcatgccaaatggtttcaagcccgggccaacggactcaaatcctgtgtcattgtgatcagagtactgcgtgacctgtgcacacgcgttccaacctgggggccactgaggggatggccccttgaactgctttgcgagaaatctatcggtaccgctaatagacctatgggggccggggaagctctgaggcgggtgctcgagtgcctagcaagcgggatcgtgatgcccgatggatcaggcatctatgatccttgcgagaaggaggccacagatgccattggtcacctggatcggcagcagagagaagatataacccagagcgctcagcacgctttgaggctggctgcatttggacaactgcataaagtactcgggatggatcccctgccaagcaagatgccaaagaagccaaagaatgagaaccccgtggattatactgtgcagattcccccttcaactacttacgcgataaccccaatgaagcgtcctatggaggaggatggggaggaaaagtcaccttctaagaagaagaagaagatacagaagaaggaagaaaaagccgaaccaccccaggcaatgaacgcactgatgcgactgaatcagctgaagccaggactccagtacaagcttgtctctcagaccggaccagtccacgccccaatcttcacaatgtcggtcgaagtggacggaaacagctttgaagcttcaggacccagtaagaagacagccaaactacatgttgccgtaaaggtcctccaggatatgggcctgcctacgggcgcagaaggccgcgactcctcaaagggggaagacagtgctgaggaaacagaagccaagccagccgtggtcgcaccagctcctgttgttgaggctgtcagcaccccctccgccgcgtttccatctgatgccaccgctgagaatgtgaagcagcagggtcccatcctgactaaacatggaaagaatccagtgatggagctgaatgaaaagaggagaggcctgaaatatgaactcatatcagagactggagggtcccatgacaagagattcgtcatggaggtggaggtagacggccagaagtttcagggggctggcagcaacaagaaagtggccaaggcctatgccgctcttgcggccctagagaagctgttccccgacactccgctggcacttgatgccaataagaaaaaaagagcaccagtccccgtcaggggcggccctaaatttgccgccaaaccgcataaccctggcttcggcatgggtggacctatgcacaatgaggtgcctccccctcctaatttgagaggacgcggcaggggtggatctatccgcggaaggggaaggggcaggggcttcgggggcgcgaaccacggcggatatatgaatgccggcgccggctacggctcttacggttacggaggcaattctgctactgcaggctactctgacttcttcactgattgttacgggtatcatgactttggttccagttag

SEQ ID NO: 52625 - DNA, 2121 bp, Artificial Sequence
  derived and/or modified sequence
atgaggcccatgaggatctttgtgaatgatgacagacatgtgatggccaagcacagctctgtgtaccccacccaggaggagctggaggccgtgcagaacatggtgagccacacagagcgggccctgaaggctgtgtctgactggattgatgagcaggagaagggcagcagcgagcaggccgagagtgacaacatggatgtgcccccagaagatgacagcaaggagggcgctggggagcagaagacagagcacatgaccaggaccctgcggggcgtgatgagggtgggcctggtggccaagggcctgctgctgaagggggacctggacctggagctggtgctgctgtgcaaggagaagcccaccacagccctgctggacaaggtggccgacaacctggccatccagctggccgctgtgacagaggacaagtatgagatcctgcagagcgtggatgatgctgccatcgtcatcaagaacaccaaggagccccccctgagcctgaccatccacctgaccagccctgtggtgcgggaggagatggagaaggtgctggccggggagaccctgtctgtgaatgaccccccagatgtgctggaccggcagaagtgcctggccgccctggccagcctgcggcatgccaagtggttccaggcccgggccaacggcctgaagagctgtgtgattgtcatccgggtgctgcgggacctgtgcaccagggtgcccacctggggccccctgcggggctggcccctggagctgctgtgtgagaagagcattggaacagccaaccggcccatgggcgctggggaggccctgcggcgggtgctggagtgcctggccagcggcatcgtgatgccagatggcagcggcatctatgacccctgtgagaaggaggccacagatgccatcggccacctggaccggcagcagcgggaggacatcacccagagcgcccagcacgccctgcggctggccgccttcggccagctgcacaaggtgctgggcatggaccccctgcccagcaagatgcccaagaagcccaagaatgaaaatcctgtggactacacagtgcagatcccccccagcaccacctacgccatcacccccatgaagaggcccatggaggaggatggagaggagaagagccccagcaagaagaagaagaagatccagaagaaggaggagaaggccgagcccccccaggccatgaatgccctgatgaggctgaaccagctgaagccaggcctgcagtacaagctggtgtcccagacaggccctgtgcacgcccccatcttcaccatgtctgtggaggtggatggcaacagctttgaggccagcggccccagcaagaagacagccaagctgcacgtggccgtgaaggtgctgcaggacatgggcctgcccactggagctgagggccgggacagcagcaagggggaggacagcgctgaggagacagaggccaagccagctgtggtggccccagcccctgtggtggaggccgtgtccacccccagcgctgccttccccagtgatgccacagcagaaaatgtgaagcagcagggccccatcctgaccaagcacggcaagaaccctgtgatggagctgaatgagaagaggcggggcctgaagtatgagctgatcagcgagactggaggcagccatgacaagagatttgtgatggaggtggaggtggatggccagaagttccagggcgccggcagcaacaagaaggtggccaaggcctatgctgccctggccgccctggagaagctgttcccagacacccccctggccctggatgccaacaagaagaagagggcccctgtgcctgtgcggggcggccccaagtttgctgccaagccccacaaccctggcttcggcatgggcggccccatgcacaatgaggtgcccccaccacccaacctgcggggccggggccggggcggcagcatccggggccggggccggggccggggctttggaggagccaaccacggcggctacatgaatgctggggccggctacggcagctatggctatggaggcaacagcgccacagctggctacagcgacttcttcacagactgctacggctaccatgactttggcagcagctag

SEQ ID NO: 52626 - DNA, 2121 bp, Artificial Sequence
  derived and/or modified sequence
atgcggcccatgcggatcttcgtgaacgacgaccggcacgtgatggcaaaacacagcagcgtgtaccctacccaagaggaactcgaggcggtgcagaacatggtaagccataccgagcgtgctctcaaagccgtttccgactggatagacgagcaagagaaaggctccagcgaacaggctgagtccgataatatggacgtccctcccgaggatgacagcaaggagggagcgggggagcaaaagactgaacacatgactcgcaccctgagaggcgtcatgcgtgttggccttgtggcaaaagggctgctgctgaagggtgacttggatcttgaacttgtgctgctgtgtaaggaaaagcctaccaccgctcttcttgataaagtcgccgacaacctcgcaatacagctggcagccgttaccgaggataaatacgagatactgcagagcgtagatgatgcagccatcgtcatcaagaataccaaggaacccccactgagccttaccatccacctcacgtcacctgttgttcgggaagagatggagaaggtgctggccggagaaaccctgagtgtcaacgatcctcctgacgtgctggatcggcagaagtgcctcgccgctctggccagtctccggcatgctaaatggttccaggctcgcgccaatggactcaaaagctgcgtgatcgtcatccgggtgctcagggacctgtgcactagggtgcctacctggggaccgcttaggggttggccactcgagcttttgtgtgaaaagagcataggaacagccaaccgtccgatgggggcaggggaagccctgagaagagtgctcgaatgtctggcttctgggatcgtgatgcccgacggctcggggatatatgatccctgtgagaaggaagctactgatgcaattgggcacctcgacagacagcaacgggaagacatcacacagtcagcccaacatgccctccgactagcggccttcggacagctccacaaggtgctaggcatggaccctctaccatcaaaaatgcccaagaagccaaagaatgaaaacccggtcgattacacagtacaaattcctccgtctacgacgtatgccatcacccctatgaaaagacccatggaagaagatggagaggaaaaatccccaagcaaaaagaagaagaagatacaaaaaaaggaagagaaagccgagcccccacaagcgatgaatgcactgatgcggctcaatcagctcaagcctgggctgcagtacaagttagtcagtcaaacaggcccggtgcacgcacctatctttactatgagtgtcgaggttgacggcaactcattcgaagcttcgggcccttccaagaaaacagctaagctgcatgtcgctgtgaaggtgctccaggatatgggcctccccacaggggccgagggtcgtgattcttccaagggggaggacagcgctgaagagacagaggccaagcctgcagtggtggccccagcccctgtcgtggaagccgtgtcaacaccaagcgctgccttcccaagtgatgccacggccgagaacgtgaagcagcaaggacctattctgacgaaacacggcaaaaaccccgtcatggaactgaatgaaaaacgaagaggtctcaagtatgagctcatttcagaaacgggcggatctcatgataagagattcgtgatggaagtcgaggtggacggccagaagtttcaaggcgcaggcagcaacaaaaaagttgcaaaagcctacgcagctctcgccgcactcgagaagctgtttcctgataccccacttgcactagatgctaataaaaaaaagagggcaccagttccagttcgcggaggcccaaaatttgccgcgaaaccccacaacccggggtttggtatgggcggcccgatgcataacgaggtaccacctccccccaaccttagaggaagagggcggggaggcagcatccgcgggcgagggcgcggcagaggatttgggggcgccaaccatggcggctacatgaatgctggcgcaggttacgggagttatggttacgggggtaattcagctacggccggctactccgacttctttactgactgttacgggtaccatgatttcggctctagttag

SEQ ID NO: 52627 - DNA, 2121 bp, Artificial Sequence
  derived and/or modified sequence
atgaggcccatgagaatcttcgtgaatgacgatcggcatgtcatggccaagcattcttcagtttatcccacacaggaggagttggaggcagtgcaaaatatggtctcacacactgagagagccctgaaagctgtgagcgactggattgatgagcaggagaaggggagtagcgaacaggccgaaagcgacaacatggatgtgcccccagaggatgattctaaagagggggctggcgaacagaaaactgagcacatgacaagaaccctaagaggcgtgatgcgagtcggacttgtagccaagggtctgctgttgaaaggagacctggatctagagttggtgcttttatgcaaggaaaagcctactaccgctctcctggataaagtggccgacaatctcgctattcaactggctgcggtgactgaggacaaatacgagattctgcagtctgtggacgacgccgcaatagtaattaaaaatactaaggagcctccactgtccctaactatccacctcacgtccccagtggtgagggaggaaatggagaaagtgctcgccggtgagaccttgagcgtcaacgatcctccagatgttttggaccggcagaagtgcctagcagccctggcgtccttacgacatgccaaatggttccaagcaagagctaacggtctgaagtcttgtgttattgtcatccgcgtactgagagacttatgcactcgagtgcccacatggggacctctgaggggatggcccttggaactgttgtgtgagaagagtataggcaccgccaatagaccaatgggcgctggagaagctctcaggcgcgtgctcgagtgcctggcatctggaatagtgatgcccgacggttctggcatctacgacccttgtgagaaggaggctacagatgctattggacacctggatagacaacagcgggaggatattactcagagtgcccaacatgcactgaggctggcagcctttggccaactgcacaaagttctgggtatggacccactgccttctaaaatgccaaaaaagcccaagaatgaaaatcctgtcgactataccgtgcaaatccctccttctaccacctatgcaataacacctatgaagcgcccaatggaggaggatggggaagagaagagccctagtaagaagaaaaagaaaatccaaaagaaggaagagaaagcagagccaccacaagctatgaacgctcttatgcgcctgaaccagctgaagcctggtttgcagtacaagcttgtatcccagactgggccagtccatgcaccgatttttacaatgtcagtggaagtggacgggaactcattcgaagcctcaggcccttctaagaaaactgctaaattacacgtggcagtgaaagtgttgcaggatatgggtcttcctacaggcgctgaggggagggatagctccaaaggtgaagattcggccgaggagacagaggcaaagccggcagtcgttgcacccgcacctgtggtcgaagccgtgtccacgccaagcgccgcttttccctcggacgccacagccgaaaatgtgaagcagcagggtcccatactgacaaagcacgggaaaaaccctgtgatggagttgaatgagaaaagacgcggtttgaagtatgagctgatcagcgagacggggggatctcacgacaaaaggtttgtgatggaggtggaagtggatggccagaagtttcaaggagccggatccaacaaaaaggtggccaaggcttacgccgcactagctgccttggaaaaactgtttcccgacaccccactggcactggacgcaaataagaagaaacgcgctccagtgcctgtgcggggagggccaaagttcgctgcaaagccccacaaccccggattcgggatgggaggtccaatgcacaacgaggtgcctccaccccctaatcttaggggtagaggaagaggcggttctatacgcggaagaggaaggggccgtggatttgggggagccaaccacggcggatatatgaatgccggagctggttatggctcctacggttatgggggaaacagtgcaacggccggatatagcgatttctttacagattgctatggctaccacgatttcggatcatcttag

SEQ ID NO: 52628 - DNA, 3740 bp, Artificial Sequence
  derived and/or modified sequence
aaagggggcggggcttcagccggtcacgtgttcccgcacctccccggcgcgcgcctgcccgcccgcccgctcgcccccggtccggactcctcctcctcctcttctcgccattgcagttggacccagcagcccggcgcgcaccgcgtggcttttgggggcagaccccggcgggctgtggcaggagggcggcggcggcggctgcggtcgaagaaggggacgccgacaagagttgaagtattgataacaccaaggaactctatcacaatttgaaaagataagcaaaagtttgatttccagacactacagaagaagtaaaaatgcgtccaatgcgaatttttgtgaatgatgaccgccatgtgatggcaaagcattcttccgtttatccaacacaagaggagctggaggcagtccagaacatggtgtcccacacggagcgggcgctcaaagctgtgtccgactggatagacgagcaggaaaagggtagcagcgagcaggcagagtccgataacatggatgtgcccccagaggacgacagtaaagaaggggctggggaacagaagacggagcacatgaccagaaccctgcggggagtgatgcgggtgggcctggtggcaaagggcctcctactcaagggggacttggatctggagctggtgctgctgtgtaaggagaagcccacaaccgccctcctggacaaggtggccgacaacctggccatccagcttgctgctgtaacagaagacaagtacgaaatactgcaatctgtcgacgatgctgcgattgtgataaaaaacacaaaagagcctccattgtccctgaccatccacctgacatcccctgttgtcagagaagaaatggagaaagtattagctggagaaacgctatcagtcaacgaccccccggacgttctggacaggcagaaatgccttgctgccttggcgtccctccgacacgccaagtggttccaggccagagccaacgggctgaagtcttgtgtcattgtgatccgggtcttgagggacctgtgcactcgcgtgcccacctggggtcccctccgaggctggcctctcgagctcctgtgtgagaaatccattggcacggccaacagaccgatgggtgctggcgaggccctgcggagagtgctggagtgcctggcgtcgggcatcgtgatgccagatggttctggcatttatgacccttgtgaaaaagaagccactgatgctattgggcatctagacagacagcaacgggaagatatcacacagagtgcgcagcacgcactgcggctcgctgccttcggccagctccataaagtcctaggcatggaccctctgccttccaagatgcccaagaaaccaaagaatgaaaacccagtggactacaccgttcagatcccaccaagcaccacctatgccattacgcccatgaaacgcccaatggaggaggacggggaggagaagtcgcccagcaaaaagaagaagaagattcagaagaaagaggagaaggcagagcccccccaggctatgaatgccctgatgcggttgaaccagctgaagccagggctgcagtacaagctggtgtcccagactgggcccgtccatgcccccatctttaccatgtctgtggaggttgatggcaattcattcgaggcctctgggccctccaaaaagacggccaagctgcacgtggccgttaaggtgttacaggacatgggcttgccgacgggtgctgaaggcagggactcgagcaagggggaggactcggctgaggagaccgaggcgaagccagcagtggtggcccctgccccagtggtagaagctgtctccacccctagtgcggcctttccctcagatgccactgccgagaacgtaaaacagcaggggccgatcctgacaaagcacggcaagaacccagtcatggagctgaacgagaagaggcgtgggctcaagtacgagctcatctccgagaccgggggcagccacgacaagcgcttcgtcatggaggtcgaagtggatggacagaagttccaaggtgctggttccaacaaaaaggtggcgaaggcctacgctgctcttgctgccctagaaaagcttttccctgacacccctctcgcccttgatgccaacaaaaagaagagagccccagtacccgtcagagggggaccgaaatttgctgctaagccacataaccctggcttcggcatgggaggccccatgcacaacgaagtgcccccaccccccaaccttcgagggcggggaagaggcgggagcatccggggacgagggcgcgggcgaggatttggtggcgccaaccatggaggctacatgaatgccggtgctgggtatggaagctatgggtacggaggcaactcggcgacagcaggctacagtgactttttcacagactgctacggctatcatgattttgggtcttcctagagcgtctaaaagtattgcacacaaaatcaactttttactccaatttcctccaactccaaaacccaaagtgtccgtgctgtgtccctgtgcttcactgggtttctcaaccgtggcttttcaccgcagcttgtctgaaactcttagcctgcagaatttaagacaatggcagtttttatcgtgatttgcctttgaacttggtcctattgaagttcacaataagtggaaaacaattttttcagagaatgtatttttgtgcagaattgcacagaattctagagacagcgttgttcggcatcaaggcaaaagcccacctttgctttttatggaaagcattactttatttaaagagacagacaatgacgcattttaatctacctttgtcttaatttacagcaggttttgtatgaatttttaaccttttaacaaactcccaaatctggttgatgcctttgacagtgatgaaaacgatttcaccacatctgaatccagagaaaccggctttttttcttattgcgagcatgttaaaacgttgggaacatgtggggaattgtatattgcgctgaattaacttctcccgcctcttgtaatgctctggtgggttcttgtttgggaatgcgatattttgtggctggtttagctagagagtgaactctcaaaggtatcaaaactgtgcttccattattagtgcaagaaacagacaggctttaaggggtagatgacgtgaaattttgcaagtcttaattacagctgcagatgcatgggattctggatttttttgttgctttttagtttaatgggactttaaaagtaattgaggagaaagaaccgtgatgttccctgtttctccagtaaaggactggcttttgcttgggcagaggtggtgctgctgggtgtgcagctgccacagactccaaaggcgtagaagtttgtgccaacacacggagtcattctggctctctgctgaggcccctgttttctggcaggtgccctccttggaaactggttttggctctgatcagcggttctttttgcagcaaagcctgcatctgtgttgacttgcaagattttgcgtttattcaggcaaaaactggtcaaaatggttactacatgatttgttcccagaggtttgaaacattcagtgaaactttttaaaactttgattgcatgatgtattttttttttagaaagttattgtttgagaataatgtctttttataccaggaaaatagttatcctgaatgacgttgaaaactccccctcccctttatttttttttaatcaatacatgtgaaagtaacaagc

SEQ ID NO: 52629 - protein, 689 aa, Artificial Sequence
  derived and/or modified sequence
MKPVHERSQECLPPKKRDLPVTSEDMGRTTSCSTNHTPSSDASEWSRGVVVAGQSQAGARVSLGGDGAEAITGLTVDQYGMLYKVAVPPATFSPTGLPSVVNMSPLPPTFNVASSLIQHPGIHYPPLHYAQLPSTSLQFIGSPYSLPYAVPPNFLPSPLLSPSANLATSHLPHFVPYASLLAEGATPPPQAPSPAHSFNKAPSATSPSGQLPHHSSTQPLDLAPGRMPIYYQMSRLPAGYTLHETPPAGASPVLTPQESQSALEAAAANGGQRPRERNLVRRESEALDSPNSKGEGQGLVPVVECVVDGQLFSGSQTPRVEVAAPAHRGTPDTDLEVQRVVGALASQDYRVVAAQRKEEPSPLNLSHHTPDHQGEGRGSARNPAELAEKSQARGFYPQSHQEPVKHRPLPKAMVVANGNLVPTGTDSGLLPVGSEILVASSLDVQARATFPDKEPTPPPITSSHLPSHFMKGAIIQLATGELKRVEDLQTQDFVRSAEVSGGLKIDSSTVVDIQESQWPGFVMLHFVVGEQQSKVSIEVPPEHPFFVYGQGWSSCSPGRTTQLFSLPCHRLQVGDVCISISLQSLNSNSVSQASCAPPSQLGPPRERPERTVLGSRELCDSEGKSQPAGEGSRVVEPSQPESGAQACWPAPSFQRYSMQGEEARAALLRPSFIPQEVKLSIEGRSNAGK

SEQ ID NO: 52630 - DNA, 2070 bp, Artificial Sequence
  derived and/or modified sequence
atgaaacctgttcacgaaaggagtcaagagtgtctcccccctaaaaagagagacttacctgtgacgagcgaggatatggggagaacgacatcctgtagtacaaatcatactccaagtagtgacgctagcgagtggagccgtggcgtagttgtagcaggacaaagtcaggcaggagctcgcgtgagccttgggggtgacggcgcagaagctattacaggtcttactgtggatcagtatgggatgctgtataaagtagccgtaccccctgccaccttcagtcctactggccttccatccgtagttaatatgagtccgctgccaccgactttcaacgtggcctccagcttgatccagcatcccggcatccactaccctccccttcactacgcacagcttccctccacaagccttcagttcatcggcagcccgtattctttaccctacgccgttccacctaactttcttccttcccccctcctgtcaccaagtgctaacttggctacctcacacctgccgcattttgtgccatacgcctcactactcgccgaaggcgccactccacccccccaggccccgtcccccgcccactcgttcaataaggctccaagtgccacttctccatcaggtcagctcccacatcacagttccacccagccgctggacctggccccaggccgaatgcccatttactatcagatgtcccgattgcctgcaggttatacgctgcacgagacgccgccggctggagcttcaccagtgctgactccgcaagagtctcagtcagctctagaggctgctgcagccaacggaggccagcggcccagagagcgcaacttagtccggagggaaagtgaggccctagactcccccaactctaagggcgaaggacagggcctggttcccgtcgtcgagtgcgtggtggacggacagctgttctcaggttctcaaacgcctcgggtggaagtggccgcacctgcacatagaggaacaccggataccgatttggaagtccagcgggtagttggcgctttggcctcacaggactacagggttgttgctgctcagcgtaaggaggaaccatcacctcttaacttaagtcaccacactccagaccaccaaggagaaggaagaggtagtgctaggaatcctgccgagttggctgagaaatcccaggcccggggcttctacccgcagagccaccaagaacccgtgaaacataggccactgcccaaagcaatggtggtggccaatggaaatctggtccccactggcaccgatagtgggctgctcccagtggggagtgaaattcttgtcgcatctagtctggacgtgcaggctagagccacttttcccgataaggaaccgactcccccccctatcacatcttctcacctgccctcccatttcatgaagggtgctatcatccaactggcaacaggcgaattaaaaagggtagaggatctgcaaacacaggacttcgttcgatcggctgaggtcagtggggggttgaaaatagattcttcgacagtggtggacatccaggaatctcagtggccaggcttcgtgatgctgcactttgtcgtcggtgaacagcaatctaaggtgtccatcgaggtaccacctgaacatccctttttcgtatatggacaggggtggtctagttgctccccgggccgaaccacgcagctattctctcttccctgccataggctgcaggtcggtgatgtgtgtatatcaatttcactgcagagtcttaattcgaactccgtaagccaggcctcttgtgcaccaccctcgcagctgggtcccccgagggaacgccccgagcggaccgtcctggggagtagggaactttgcgactccgaaggcaaatcacagcctgctggggagggctcgcgagtggtagaacccagccagcctgaaagcggggcgcaggcatgctggcccgcaccgtctttccagcgctactcaatgcagggcgaggaggctcgcgccgcactactgcgaccttctttcataccccaggaagtgaagctgagcatcgaaggcagaagcaacgccggcaaatag

SEQ ID NO: 52631 - DNA, 141 bp, Artificial Sequence
  derived and/or modified sequence
atgctgagtcgcaatgatgatatttgtatttatgggggattgggcctggggggcttgttgctgctggccgttgtgttgctgagtgcttgtctttgttggttgcaccgcagggagcactgtttggccctcgagcccctgtag

SEQ ID NO: 52632 - DNA, 2070 bp, Artificial Sequence
  derived and/or modified sequence
atgaagcctgtgcatgagaggagccaggagtgcctgccccccaagaagagggacctgcctgtgaccagcgaggacatgggccgcaccaccagctgcagcaccaaccacacccccagcagtgatgccagcgagtggagccggggcgtggtggtggccggccagagccaggccggggcccgggtgtccctgggcggagatggagctgaggccatcaccggcctgactgtggaccagtatggcatgctgtacaaggtggccgtgcccccagccaccttcagccccaccggcctgcccagcgtggtgaacatgagccccctgccccccaccttcaacgtggccagcagcctcatccagcaccctggcatccactacccacccctgcactacgcccagctgcccagcaccagcctgcagttcatcggcagcccctacagcctgccctatgctgtgccccccaacttcctgcccagccccctgctgagccccagcgccaacctggccaccagccacctgccccactttgtgccctatgccagcctgctggccgagggcgccaccccaccaccccaggcccccagccctgcccacagcttcaacaaggcccccagcgccaccagccccagcggccagctgccccaccacagcagcacccagcccctggacctggcccctggccgcatgcccatctactaccagatgagccggctgcctgctggctacaccctgcacgagaccccacctgctggggccagccctgtgctgaccccccaggagagccagagcgccctggaggccgctgctgccaatggaggccagaggccccgggagaggaacctggtgagaagagagagcgaggccctggacagccccaacagcaaaggagagggccagggcctggtgcctgtggtggagtgtgtggtggatggccagctgttcagcggcagccagaccccccgggtggaggtggccgccccagcccaccggggcaccccagacacagacctggaggtgcagagggtggtgggcgccctggccagccaggactacagagtggtggccgcccagaggaaggaggagcccagccccctgaacctgagccaccacaccccagaccaccagggcgagggccggggcagcgccagaaatcctgctgagctggccgagaagagccaggcccggggcttctacccccagagccaccaggagcctgtgaagcaccggcccctgcccaaggccatggtggtggccaatggaaacctggtgcccactggaacagattctggcctgctgcctgtgggcagcgagatcctggtggccagcagcctggatgtgcaggcccgggccaccttcccagacaaggagcccaccccaccacccatcaccagcagccacctgcccagccacttcatgaagggggccatcatccagctggccactggagagctgaagagggtggaggacctgcagacccaggactttgtgcgctctgctgaggtgtctgggggcctgaagattgacagcagcacagtggtggacatccaggagagccagtggccaggctttgtgatgctgcactttgtggtgggggagcagcagagcaaggtgtccattgaggtgcccccagagcaccccttctttgtgtatggccagggctggagcagctgcagccctggccgcaccacccagctgttcagcctgccctgccaccggctgcaggtgggagatgtgtgcatcagcatcagcctgcagagcctgaacagcaacagcgtgtcccaggccagctgtgccccacccagccagctgggccccccccgggagaggcctgagaggacagtgctgggcagccgggagctgtgtgacagcgagggcaagagccagcctgctggggagggcagccgggtggtggagcccagccagcctgagagcggggcccaggcctgctggccagcccccagcttccagcgctacagcatgcagggcgaggaggcccgggccgccctgctgcggcccagcttcatcccccaggaggtgaagctgagcattgagggccgcagcaatgccggcaagtag

SEQ ID NO: 52633 - DNA, 2070 bp, Artificial Sequence
  derived and/or modified sequence
atgaagcccgtgcacgagcggagccaggagtgcctgccccccaagaaacgagatctgcccgtgacatctgaagacatgggtcgaaccacaagttgttcgactaaccataccccaagcagtgatgcatctgagtggtcccgcggagtcgtcgtggcgggacaaagccaggcaggagcgcgagtctctctcggaggagatggcgccgaggccattactgggcttaccgtggaccagtacggtatgttgtacaaagtggccgtgcccccagccacattctcaccaaccgggctgccaagcgtggtgaacatgtcacccctgccgccaactttcaatgtggcttcatcattaatccagcatcccgggattcattatcctccgctccattacgctcagctgcctagtaccagtctccagtttatcggctctccctattcccttccttatgctgtgccacctaatttcctccccagccctttactttcacccagcgccaatctggctacctcccatctgcctcatttcgtgccatatgccagccttctcgccgagggtgccacacccccgccacaggccccctctcctgctcattcttttaataaggcacccagcgcaacaagtccttccgggcaattgccccaccactcttcgacccaacctctcgacctcgctcccggccgcatgcctatatattaccagatgtcaaggctgccagccggttacactctacacgaaactccgccagccggtgcatcccccgtccttacgcctcaggaaagccaatccgcactcgaggcggctgctgcaaacggcggtcaacgcccacgggaacgaaatctcgtgagacgcgagagcgaggctctggattccccaaattccaagggcgagggacagggcttggtcccagtcgtcgagtgtgttgtcgatggccaattgttttctgggtcacagacccctcgagtggaagtcgccgccccagctcatcgcggcaccccggataccgatctcgaggtgcagcgggtcgtgggcgccctggcgtctcaggattatcgcgtggtggcagcacagcgcaaggaggaacccagcccactcaatttgtctcaccacacacctgaccaccaaggagagggccgcggatctgccagaaatccagcagagctggcagaaaagagtcaggccagaggcttctatccacagtcccaccaggagcctgtgaagcaccggcccctccccaaagctatggtggtggccaacggtaacctagttcccaccgggactgattcaggtctactgcccgtgggcagtgaaattcttgtcgctagctcactggacgtgcaggctcgggccacattccctgacaaagaacccactcctccacctatcacctcaagtcatttaccatctcactttatgaagggagctattattcagcttgcaacaggcgagctgaaacgggtggaggaccttcagactcaagattttgtgaggagtgctgaagtgagcggcggtctgaagattgactcatccaccgtggttgatattcaggaaagtcagtggcccggatttgtcatgctccactttgtggtgggggaacagcagtcaaaagtgagtatagaggtcccgccagaacaccctttttttgtgtatggtcagggctggagctcctgttcaccaggcagaacgacacagctattttccctcccttgtcaccgattgcaagttggcgacgtgtgtatttcaattagcctccaatcgctcaattccaattcagtgtcccaggcatcttgcgccccccctagccagttggggccaccacgcgagcggccggaacgcaccgtgttgggctctagagagctttgcgactctgagggaaaaagccagccggccggagaaggaagcagagttgtggagccctcccagcccgaatcaggtgcccaggcatgctggcccgctccaagctttcagcggtacagcatgcaaggagaagaggcacgtgcggcgctgctgagaccaagtttcatcccacaggaggtcaagttatcaatcgaagggcgctcaaacgctggaaaatag

SEQ ID NO: 52634 - DNA, 2070 bp, Artificial Sequence
  derived and/or modified sequence
atgaaaccggtacacgagcggagccaggaatgccttccgcctaagaagagggatttgcctgtaacctccgaggacatgggacgcacaactagctgtagcaccaaccatacaccgagctctgatgcgtctgagtggtctagaggggtggtggtcgcaggacaaagccaggctggagccagagttagtctcggaggagatggcgcagaagccataactggtctgaccgtcgaccagtatgggatgctatataaggtcgccgtacccccagcaacatttagtcctaccggcctgccatccgtggtaaatatgagcccccttccgccaacattcaatgtggcatcatcattgatccaacaccctggaatccactaccctcccttacactacgcccaactcccctcgaccagcttgcagttcataggctcgccctacagccttccctacgcagttcctccaaactttctgcccagccccctgctcagcccctccgccaatctggctacttctcacctgccccactttgtgccgtatgccagtctgttagcagaaggagccacaccacccccacaggcccctagtcccgctcactctttcaacaaagccccaagtgctaccagccctagtggacagctgccccaccatagcagtactcaacccctcgatctggctcccggtcgtatgcccatatactatcagatgtctcgactcccagccggatacacattgcacgagacaccccctgccggagccagtccggtgctgacaccacaggagtcccagtccgcgctggaggctgccgcagccaatgggggacagcggcctagggaacgcaatctggtgcggcgagagagcgaggctctcgattcacccaactccaagggagaggggcaggggctggtgcctgtggtcgagtgcgtggtggacggtcaactatttagtggaagccagacccccagggtggaggtggctgctcccgctcatcggggaacgccagacactgatctcgaggtccagagagttgtgggagccttagcatcacaagactaccgggtggtagcagcccagcggaaagaagagcctagcccccttaatctttctcatcatacacccgatcatcaaggcgagggacggggatctgcaagaaaccccgctgagctggcagaaaagtctcaggcccgaggattctaccctcagtcccatcaggaacccgtaaaacacagacccctgccaaaagccatggtagtggcgaacggtaacttagtgcccaccggtacagacagcgggctccttcctgtgggctccgaaatcttggtagcctcatcgttagatgtccaggcacgggcaacattcccagacaaggaaccgacacctccacccattactagttcacacctcccttctcacttcatgaagggcgcaattatccagctcgccacaggcgaactgaaacgagtagaagatctccagacccaggacttcgtgcgttccgctgaggtctcaggcggactcaagattgacagttccaccgtggtcgacattcaagagtcgcaatggcctggatttgtcatgctgcacttcgtggtaggggagcaacagagcaaagtctctattgaggtgccccctgagcacccgtttttcgtgtatggccagggttggagctcctgtagtcccggtcgcacaactcaactattcagcctcccctgccatagactccaggtcggcgacgtctgcatctcaatctccttgcagtccctgaactccaactctgttagtcaggcgtcttgcgcacctccaagccagctgggcccaccccgtgaacggccagagagaactgtcctgggatccagggaactatgcgactctgaaggcaaaagccaacccgcaggagaaggatcccgcgtcgtcgagccatcacagcccgagtccggtgctcaggcctgttggccagcccctagttttcagaggtactctatgcagggcgaggaggccagagccgctctgctgcggccatctttcatccctcaggaagtcaagctgtccattgaagggaggtctaacgccggtaagtag

SEQ ID NO: 52635 - DNA, 7876 bp, Artificial Sequence
  derived and/or modified sequence
ggggggcgctgggtgtggggcggctccggggccggggatggcggcggccgcggttgcggcggctccgggacgagtgagtggatcctgggaagcgctgtgaaatgggctggctcccgagccagccgggaggacacttactacagctgctcagaagcaccactggaaactcagatgtgggcgccccagccagaagcagagaggggtacagggaagctacagagaagccccttctgatgccccagggagcaagtcgactccttccaggctccaggaacaccacaaagcaatatgaaacctgttcatgaaaggagtcaggaatgccttccaccaaagaaacgagacctccccgtgaccagcgaggatatggggagaactaccagctgctccactaaccacacaccctccagtgatgcttctgaatggtcccgaggggttgtggtggctgggcagagccaggcaggagccagagtcagcctggggggtgatggagctgaggccatcaccggtctgacagtggaccagtatggcatgctgtataaggtggctgtgccgcctgccaccttttcaccaactggactcccatctgtggtgaatatgagtcccttgcccccaacgtttaatgtagcgtcttcactaattcaacatccaggcatccactatcctccactccactatgctcagctcccatccacctcgctgcagttcattgggtctccttatagccttccctatgctgtgccacctaatttcctaccgagtcccctcctatctccttctgccaaccttgccacctctcaccttccacactttgtgccatatgcctcacttctggctgaaggagccactcctcccccacaggctccctccccggcccactcatttaacaaagctccctctgccacctccccatctgggcaattgccacatcattcaagtactcagccgctggaccttgctccaggtcggatgcccatttattatcagatgtccaggctacctgctgggtatactttgcatgaaacccctccagcaggtgccagcccagttcttacccctcaggagagccagtctgctctggaagcagctgctgcaaatggaggacagagaccacgagagcgaaatttagtaagacgggaaagtgaagcccttgactcccccaacagcaagggtgaaggccagggactggtgccagtggtagaatgtgtggtggatggacagttgttttcaggttctcagactccacgggtagaggtagcagcaccagcacaccgggggaccccggacactgaccttgaggtccagcgggtggttggcgctttagcttctcaggactatcgtgtggtggcagctcagaggaaggaggaacccagccccctcaacctatcccatcatacccccgaccatcagggtgaggggcgagggtcagccaggaaccctgcagagctggcagagaaaagtcaggcccgtgggttctaccctcagtcccatcaggaaccagtaaaacatagacctttacccaaagcaatggttgtagccaatggcaacctggtgcccactggaactgactcaggcctgctgcctgtgggctcggagatcctggtagcatcaagtctggacgtgcaggccagagccaccttcccagacaaggagccaacgccgccccccattacctcctctcacttgccttcccatttcatgaaaggcgccatcatccagctggctacgggagagctgaagcgggtggaggacctccagacccaggattttgtgcgcagtgccgaagtgagcggggggctgaagattgactctagcacggtcgtggacattcaggagagccaatggcctggatttgtcatgctgcattttgtggttggtgagcagcagagcaaagtgagcatcgaagtgccccccgagcaccccttctttgtatatggccagggttggtcctcttgcagccctgggcggacgacacaactcttctctctgccctgccatcggctacaggtgggagatgtctgcatctctatcagtttacagagcttgaacagtaactcagtttctcaggccagctgtgctcccccaagccagctgggtcccccccgagaaaggcctgagaggacggtcttgggatccagagagctatgtgacagtgaggggaagagccagccggcaggagagggctcccgtgtggtagagccttcccagcctgagtccggtgctcaggcctgctggccagccccgagcttccaaagatacagcatgcaaggggaggaggcacgggctgcgctgctccgtccctctttcattccacaggaggtaaagctgtccattgaagggcgttccaatgcgggaaaatgaacctcttccccagaccaggactggggctttaccccagagcctcgcctcgccgccgtgagcaggcagaggatttgcacacgccgagcagggaatggctttcttggcagtgagatttgggggaaaggggaggcatgaagtcagcctcccaaggcaggatctgttgttcattaccccatggcatcctttcaggacaaccccagagggtgttgtgatggggagcagcaggcctggggcaaggaaggaagggggtgcacacaggagaagaaacattccaaaatcagggcctccctgttctttcctccccatccctagctcctgcaagagaaagtccaggctttgggagcagatggcagagggagggagtaaagaaagagccaaaaatgatgatccacagcttatagtagcagttaaactgtcagaagttttttttcttttttgtggtagaagggcaggaggccccaaggttggaaataagagggttcccacccagaacccttcttgtgagagatgcgcactttaaagggtgattttgttccagatgtctatggctgggtgtgtgggggaggagcactctcatctgcaggactctgcttgatcctctgcttcatagcccttccccatctctcctcaccattctgcctacaaggcttctagcagcacgggggcccggagggagagccccttcagggttcagagtgaagtactaccttgccagggactcagtcaggggactttgggagaaagacttgatagccaggctgactgggttctaggcaggccctctggaaaggtagctcacctaacaaagctcctccatctcagcatgccagacccactttgaaatctcacagaatcttgctggtaatggtgactttagaactagtagaccctttttcccaggcactgaccccccacctttgtctgtgttgtgcccaagtgcctgcgccacccccaccctcctgctgcgctgaccgctgcatggtgtcgtgacctgggcctcatttgtagctgcactgcctttccttgtctgcaaagttggttttgtccactctgaccaagacctctagtttttggtgggtagggggtctctctggtttccccttcagctataatctctatttttaaaatctcaaaatcatgtcccctccacttccactgccaaacagcttggtgaagaaacaagaagggaactatgccctgggccagggcgaatgcgtggctgggcagtgcccatcatggcattttcacatgtcccatatgcccctcctgtcttattccactgcttctcccagcattctggtgcctccaagccatcccctcccaccaccagctctaagattctaggatagtcttgataacatttcagtacctgaatagatgtcattttgtgttggtatattcctctgcaaaaagtattttcaatcttggttgcattggcaccccccctaccccccaccaatgtcttaatcccacattttcttcacaacttttagcatcagctcagaccgtggggttccactgggtattgggaattaggctcccccactagctttcaggtgggtaagtttttttgtttgttttttgggggtctttagactcttgaaggcaactcagggtattgtccacgcagctctctggttagacttctcccaggctatgatcctggcatgtcctttataaggtatacttggattggccgagacctggcctggcatcaggagtccaaacctctgaggtctgatctctgctctgtcaaggactttcggcaagtctcgtgacctctggctctttcacttcctccccacctgccaaatggggataaataatcttacctacctcctggggggaggggaagttctgagaatggagtcattcttagtgttcaggtgctaaaggttgttctcctgggggaacagagtgactgaaactggcttgtttgctacaagccctaccctccactctttcattccttgaaagcagtttgcctggtcagtcagcttttgggggtccatcaaaggaggttgctgacctgaccgtgagtgcttcagtatctggtttgtgtcagaaccagacgccaactttgtactgcatttgggatcatatctttccccttctctgtcccccattctctgaatgctgctttctctggcttgtttcctacagtgggggcctgtggggttgagtcttgaggaatcccctcaaatgagaaggccttgggagaaggcctcatctctggctgtttcatgagcaactcattcctagagttcattgtttgcatgggtttctcacaagcgtccttcctcataggaaggctcatcaactgaatttagtgacatgtacacagtagatgctcaagcagtgtctgcaaggacacaagctgagctttctccttatggggcaaacctatgtctaaccagatacagaccaattagtttagatcaaatcaccttccacttgggctacttgtgactttccaacctggtaacttccactgaattctggaaagagaaattcttgaggaccctggcaagttgggccctgacctttctgttgctgtctcttgctggtgaagcaataccagcagttcctgtaataccacaatatcgttccatgcatatataacatattaatacttgattttgctgagctgcaaaggtatctgtcataaaatatggtccccaggaaaagaatctctgtgctctaaatctcggtcagagctgtggcctcccccttgcctttaacctctagtttagtcttttcctccaggcatgaaaaatatgactaacctgtggtgtgtccattcttccttataggaatttcctgagtttgcaggagacatgagagcagtttttagcgagtattttagtgggaagttgccaactttttaagaatgagcagttgacaagggccagagcctgtcccttgtcagcagtaggacatttccagctcttaggaatagaaaggaggactgctgactgtctggcgctgtataaaaatgtgtataccaatttgggaataggggaacccagtcatggatggataataagccaagtcttgaatcattcctatcaagattagtatacatgaggaagaggtggcatggggggaaggggctctgggagttcagagctgagtacttgtacctgagggagggcccccagccaatctgggctggtccttctatattcttggtcccagttggtcataacaccaagggctttgccctgcgctgctttgccactgctgctgtccgctcactgtcctgcctgctgtcctctacagctccctatccttccatgtctttggccatgtagattaagtgtaggcgtccggttcattcttacctgtgttaggccatgttattttatagcgaagtcatgttcgatagggatggtatgaaatgctgctggtgggctggtaaatccaaagggataaggcttcagtgctgttgggagccctctggctccaaatgtctgactatcttgagggagaaacaagcaggtttctactagtggtgtcttctgttgtattaacttctttcctttgtggtatcttgtatcctgttttaaaaactaaatgaagggaaccacattagggcccatgccagcatcccagtgaagttcgtccagctccagttaggtggattctggagttcggagagggtttaaagtttggctgaaatagcacctcaagtggggtttagttttatttttacctgcgggcatcatgggcgatttagggggaagcacaggatggtggtgtggtttaaacctgcagcaagcaggcatgttgaagagttgagtgatcacgctggagatgaagggttggacatggattgactgggaaaaggcctgggtccattggagtaaagataacctagtcgattgaattggccatgggaagttaggtcacagtcttataaacaaagtaaataggacagagactaagttttagggagacatcttggcctcctaggctaagtttactaaaccacactgaagctatagtaccttccagatgggcaaaagtgtacactacagttgaggagctgaaccttattaggttggatgtcgatcaggaacctgtttgccctttgctgggaagccttcactctccagctttcctggggtagggaaggtctcccacattatgcaataataaaataagcatctgggtctttgcagctgtcagttgctctttcaactctaggatccatctttggaccagaagcctggtctgtgcctaggatgacactggccccagagatgctagagtcgactgcactctctccttagctgcagaccatgcacagtgcctggggcggaaggaggagaggtgttgcggtttgccctgctgcctccccagcaggaacaatagtcataaatgcacttttcacactaaaggtttctttattagttctccagttaaacctagatccctccctggtagattgcgaactcaaagttttgtgatcccaaagccattccactgcaaatgcccagcagtgaagatggcctcaaattgggttcttgcctgcagtgtgtgtggcagcagcccatgtgcctttacctgttgtcaaacttgcaagcatttatttgtctttatgactgtcatggggactgaggttcttcagagaaagagtgtgagctgatgacacagtggttttacacccaccccctgggcagggagtttgcacgtagttgtgagctgtgagtggttagtgcattgctggtattgctgaaggcagggttgatccctcacttgactgatacttgcattcaagagaatctagattgtgttgggggagggactgactgtactcatggctaacttaaagtattaaaataaggctgtcccctacaaccttcttagtcacacaggatccctgtagccaaaacagtatatgatccagctgcagagagcagactgctctcagcttgcacagcaccttaggcgagggaagaatatacggatagggaatggggtggagaaaggatgggaatgttgtcatccaggtggctttagggtcctaaggagtggagaaggatggcactggggaggtctggatggatctgtgtaggagttccctgtagataaattactgatcccccatctactatccccagtatgtaatggctgaattaatatgtaatcaactgcattgtatctaaagccttagaactagtcaggtgctccctccacccaataccatttcttaccctctaatcctacctgatctttaacaaagcattaataattctaaggataatctctattttgttgtgcttttttgtaactgttttaaataaatcaatttgtactgtatatttgtacttttgtgagatcctttttgctgttttaccattttaagtctctgtacttggctacacacagattgtatttttattgttaatgctcttcttatggatacctgcatttaacttgtggactatgtaaacacaatatctatcaatatctatatatctatatatctatctatataaactactagcttttc

SEQ ID NO: 52636 - DNA, 2070 bp, Artificial Sequence
  derived and/or modified sequence
atgaagcccgtgcacgagagaagccaggagtgcctgccccccaagaagagagacctgcccgtgaccagcgaggacatgggcagaaccaccagctgcagcaccaaccacacccccagcagcgacgccagcgagtggagcagaggcgtggtggtggccggccagagccaggccggcgccagagtgagcctgggcggcgacggcgccgaggccatcaccggcctgaccgtggaccagtacggcatgctgtacaaggtggccgtgccccccgccaccttcagccccaccggcctgcccagcgtggtgaacatgagccccctgccccccaccttcaacgtggccagcagcctgatccagcaccccggcatccactacccccccctgcactacgcccagctgcccagcaccagcctgcagttcatcggcagcccctacagcctgccctacgccgtgccccccaacttcctgcccagccccctgctgagccccagcgccaacctggccaccagccacctgccccacttcgtgccctacgccagcctgctggccgagggcgccaccccccccccccaggcccccagccccgcccacagcttcaacaaggcccccagcgccaccagccccagcggccagctgccccaccacagcagcacccagcccctggacctggcccccggcagaatgcccatctactaccagatgagcagactgcccgccggctacaccctgcacgagaccccccccgccggcgccagccccgtgctgaccccccaggagagccagagcgccctggaggccgccgccgccaacggcggccagagacccagagagagaaacctggtgagaagagagagcgaggccctggacagccccaacagcaagggcgagggccagggcctggtgcccgtggtggagtgcgtggtggacggccagctgttcagcggcagccagacccccagagtggaggtggccgcccccgcccacagaggcacccccgacaccgacctggaggtgcagagagtggtgggcgccctggccagccaggactacagagtggtggccgcccagagaaaggaggagcccagccccctgaacctgagccaccacacccccgaccaccagggcgagggcagaggcagcgccagaaaccccgccgagctggccgagaagagccaggccagaggcttctacccccagagccaccaggagcccgtgaagcacagacccctgcccaaggccatggtggtggccaacggcaacctggtgcccaccggcaccgacagcggcctgctgcccgtgggcagcgagatcctggtggccagcagcctggacgtgcaggccagagccaccttccccgacaaggagcccacccccccccccatcaccagcagccacctgcccagccacttcatgaagggcgccatcatccagctggccaccggcgagctgaagagagtggaggacctgcagacccaggacttcgtgagaagcgccgaggtgagcggcggcctgaagatcgacagcagcaccgtggtggacatccaggagagccagtggcccggcttcgtgatgctgcacttcgtggtgggcgagcagcagagcaaggtgagcatcgaggtgccccccgagcaccccttcttcgtgtacggccagggctggagcagctgcagccccggcagaaccacccagctgttcagcctgccctgccacagactgcaggtgggcgacgtgtgcatcagcatcagcctgcagagcctgaacagcaacagcgtgagccaggccagctgcgccccccccagccagctgggcccccccagagagagacccgagagaaccgtgctgggcagcagagagctgtgcgacagcgagggcaagagccagcccgccggcgagggcagcagagtggtggagcccagccagcccgagagcggcgcccaggcctgctggcccgcccccagcttccagagatacagcatgcagggcgaggaggccagagccgccctgctgagacccagcttcatcccccaggaggtgaagctgagcatcgagggcagaagcaacgccggcaagtag

SEQ ID NO: 52637 - protein, 662 aa, Artificial Sequence
  derived and/or modified sequence
MGLYRIRVSTGASLYAGSNNQVQLWLVGQHGEAALGKRLWPARGKETELKVEVPEYLGPLLFVKLRKRHLLKDDAWFCNWISVQGPGAGDEVRFPCYRWVEGNGVLSLPEGTGRTVGEDPQGLFQKHREEELEERRKLYRWGNWKDGLILNMAGAKLYDLPVDERFLEDKRVDFEVSLAKGLADLAIKDSLNVLTCWKDLDDFNRIFWCGQSKLAERVRDSWKEDALFGYQFLNGANPVVLRRSAHLPARLVFPPGMEELQAQLEKELEGGTLFEADFSLLDGIKANVILCSQQHLAAPLVMLKLQPDGKLLPMVIQLQLPRTGSPPPPLFLPTDPPMAWLLAKCWVRSSDFQLHELQSHLLRGHLMAEVIVVATMRCLPSIHPIFKLIIPHLRYTLEINVRARTGLVSDMGIFDQIMSTGGGGHVQLLKQAGAFLTYSSFCPPDDLADRGLLGVKSSFYAQDALRLWEIIYRYVEGIVSLHYKTDVAVKDDPELQTWCREITEIGLQGAQDRGFPVSLQARDQVCHFVTMCIFTCTGQHASVHLGQLDWYSWVPNAPCTMRLPPPTTKDATLETVMATLPNFHQASLQMSITWQLGRRQPVMVAVGQHEEEYFSGPEPKAVLKKFREELAALDKEIEIRNAKLDMPYEYLRPSVVENSVAI

SEQ ID NO: 52638 - protein, 684 aa, Artificial Sequence [sequence omitted]

SEQ ID NO: 52639 - protein, 800 aa, Artificial Sequence
  derived and/or modified sequence
MAAAASVTGRVTWAASPMRSLGLGRRLSLPGPRLDAVTAAVNPSLSDHGNGLGRGTRGSGCSGGSLVADWGGGAAAAAAVALALAPALSTMRRGSSESELAARWEAEAVAAAKAAAKAEAEATAETVAEQVRVDAGAAGEPECKAGEEQPKVLAPAPAQPSAAEEGNTQVLQRPPPTLPPSKPKPVQGLCPHGKPRDKGRSCKRSSGHGSGENGSQRPVTVDSSKARTSLDALKISIRQLKWKEFPFGRRLPCDIYWHGVSFHDNDIFSGQVNKFPGMTEMVRKITLSRAVRTMQNLFPEEYNFYPRSWILPDEFQLFVAQVQMVKDDDPSWKPTFIVKPDGGCQGDGIYLIKDPSDIRLAGTLQSRPAVVQEYICKPLLIDKLKFDIRLYVLLKSLDPLEIYIAKDGLSRFCTEPYQEPTPKNLHRIFMHLTNYSLNIHSGNFIHSDSASTGSKRTFSSILCRLSSKGVDIKKVWSDIISVVIKTVIALTPELKVFYQSDIPTGRPGPTCFQILGFDILLMKNLKPILLEVNANPSMRIEHEHELSPGVFENVPSLVDEEVKVAVIRDTLRLMDPLKKKRENQSQQLEKPFAGKEDALDGELTSAPDCNANPEAHLPSICLKQVFPKYAKQFNYLRLVDRMANLFIRFLGIKGTMKLGPTGFRTFIRSCKLSSSSLSMAAVDILYIDITRRWNSMTLDQRDSGMCLQAFVEAFFFLAQRKFKMLPLHEQVASLIDLCEYHLSLLDEKRLVCGRGVPSGGRPPHRGPPQEPSPSAQPAGDNPPPRTSCANKLSHPRHTLS

SEQ ID NO: 52640 - DNA, 2403 bp, Artificial Sequence
  derived and/or modified sequence
atggcagcagcggcctccgtgactgggagagtgacttgggcagcgagcccgatgagatccctaggcctgggccgccgactgtctcttcctggtcccagactggatgcagtaaccgctgcggtcaaccccagcctttccgatcatgggaatggcctcgggagggggacccgggggtctggttgctcaggaggttctttagtggccgactggggcggcggcgccgcagctgctgccgctgttgccctggcgttggcccctgctcttagcaccatgaggagaggttcttcagagtctgaactcgctgctcgctgggaggcagaggcggtagctgcggccaaagcagccgccaaggccgaggctgaagcgacagccgaaaccgtggcggaacaggtacgagttgatgctggggcggccggcgagccagaatgtaaggccggcgaggagcagccaaaggtactggccccagcgcctgcgcaaccctctgccgccgaggagggcaatacacaagtgctgcagcggccccccccaacgttaccaccaagcaagcctaaacccgtgcaaggcctctgtccacatggaaaacctcgcgacaagggcaggtcatgcaaaagatcctcaggccatgggtcaggggagaacggttcacaacgtcctgtcaccgtcgatagtagtaaagcccgaaccagtttggacgccctgaagatctcaatccgccagctaaagtggaaggagttcccgttcggtcgtcggctcccctgcgacatctattggcacggggtaagttttcacgacaacgacattttttctggacaggttaacaagttcccaggtatgacggagatggtacgtaaaataacacttagcagagcagtgaggacgatgcaaaacctgtttcccgaagagtataatttctacccgaggtcatggatcctcccagatgaattccagctgttcgtggcccaggtgcaaatggtgaaagacgatgatccctcgtggaagcctacatttatcgtcaaaccggacggaggttgtcagggagatggcatctacctcattaaagatcctagtgacattcgcttagccggcactctgcagtcaaggccagccgtggtgcaggaatacatctgcaagccccttctcattgataagcttaaatttgacattcggctgtatgttctccttaaatccctggatcctttggagatttacattgccaaggacggattgtcccggttttgcacagagccctatcaggaacccacccctaaaaacctccacaggatatttatgcaccttacgaattatagtctgaatatccacagtggcaattttatccacagcgactccgcgtctactggctccaagcgaacctttagctctattctctgcagactaagcagtaagggcgttgatatcaagaaggtctggtccgacatcatttccgtggtaattaaaacagtaatcgccctgacaccggaactcaaggttttctaccagtctgacattccaactggccgtccaggacccacctgcttccagattttaggattcgatattctgttgatgaaaaacctcaagcctattcttctcgaggttaatgctaatccctccatgcggattgagcatgagcacgaattgtcgccaggcgtgtttgagaacgtgcctagtttggtcgatgaggaggtgaaggtagcagtgatcagggacacactgcggctaatggacccactgaaaaaaaagcgcgagaaccagagccagcagctcgaaaagcctttcgcaggaaaggaggatgctctggatggagagctgacaagcgcacctgattgcaacgctaaccccgaagcacatttgccaagcatctgcctcaagcaggtcttcccgaagtacgctaagcagttcaactatctgcgtttggtggatcgaatggccaatctctttatacggttcttgggcattaaaggaaccatgaaactaggccccactggcttcaggacattcatacggagttgtaaactgagttcttctagcctgtctatggctgcagttgatatcctgtacattgatatcaccaggagatggaactccatgacactggatcagagagactccggcatgtgcctccaggccttcgtggaggcatttttcttcttggcccagcgcaagtttaagatgttgccattacacgagcaggtggcatccctgatcgacttatgcgaatatcacctgtcacttctagatgaaaaacgcttggtgtgtggccggggcgtcccctctggaggccggccaccccaccgcggtcctcctcaggaaccatctccttctgcgcaacctgccggcgacaacccaccaccaagaacctcctgtgcaaataaactgagccaccccagacatactctgtcatag

SEQ ID NO: 52641 - DNA, 2403 bp, Artificial Sequence
  derived and/or modified sequence
atggctgctgctgcctctgtgacaggccgggtgacctgggccgccagccccatgaggagcctgggcctgggccgccgcctgagcctgcccggcccccggctggatgctgtgacagctgctgtgaaccccagcctgagtgaccacggcaatggcctgggccggggcacccggggcagcggctgcagcggcggcagcctggtggccgactggggcggcggcgctgctgctgctgctgctgtggccctggccctggccccagccctgagcaccatgaggcggggcagcagcgagagcgagctggccgcccgctgggaggccgaggccgtggccgccgccaaggctgctgccaaggccgaggccgaggccacagctgagaccgtggccgagcaggtgcgggtggatgctggagctgctggggagcctgagtgcaaggccggggaggagcagcccaaggtgctggccccagccccagcccagcccagcgctgctgaggagggcaacacccaggtgctgcagaggcccccacccaccctgccccccagcaagcccaagcctgtgcagggcctgtgcccccacggcaagccccgggacaagggccgcagctgcaagaggagcagcggccacggcagcggggagaatggcagccagaggcctgtgacagtggacagcagcaaggcccggaccagcctggatgccctgaagatcagcatccggcagctgaagtggaaggagttcccctttggaagaaggctgccctgtgacatctactggcacggcgtgtccttccatgacaatgacatcttcagcggccaggtgaacaagtttcctggcatgacagagatggtgaggaagatcaccctgagcagagctgtgaggaccatgcagaacctcttccctgaggagtacaacttctaccccaggtcctggatcctgcctgatgagttccagctgtttgtggcccaggtgcagatggtgaaggatgatgaccccagctggaagcccaccttcatcgtgaagccagatggcggctgccagggagatggcatctacctgatcaaggaccccagcgacatccggctggccggcaccctgcagagcaggcctgctgtggtgcaggagtacatctgcaagcccctgctgattgacaagctgaagtttgacatccggctgtatgtgctgctgaagagcctggaccccctggagatctacatcgccaaggatggcctgagccgcttctgcacagagccctaccaggagcccacccccaagaacctgcaccgcatcttcatgcacctgaccaactacagcctgaacatccacagcggcaacttcatccacagcgacagcgccagcacaggcagcaagaggaccttcagcagcatcctgtgccgcctgagcagcaagggcgtggacatcaagaaggtgtggagcgacatcatctctgtggtgatcaagacagtcatcgccctgaccccagagctgaaggtgttctaccagagcgacatccccaccggccggcccggccccacctgcttccagatcctgggctttgacatcctgctgatgaagaacctgaagcccatcctgctggaggtgaatgccaaccccagcatgagaattgagcacgagcacgagctgagccctggggtgtttgaaaatgtgcccagcctggtggatgaggaggtgaaggtggccgtcatccgggacaccctgcggctgatggaccccctgaagaagaagcgggagaaccagagccagcagctggagaagccctttgctgggaaggaggatgccctggatggagagctgaccagcgccccagactgcaatgccaaccctgaggcccacctgcccagcatctgcctgaagcaggtgttccccaagtatgccaagcagttcaactacctgcggctggtggacaggatggccaacctcttcatccgcttcctgggcatcaagggcaccatgaagctgggccccaccggcttccgcaccttcatccgcagctgcaagctgagcagcagcagcctgtccatggctgctgtggacatcctgtacatcgacatcacccggcgctggaacagcatgaccctggaccagagggacagcggcatgtgcctgcaggcctttgtggaggccttcttcttcctggcccagaggaagttcaagatgctgcccctgcacgagcaggtggccagcctgattgacctgtgtgagtaccacctgagcctgctggatgagaagaggctggtgtgtggccggggcgtgcccagcggcggccggcccccccaccggggccccccccaggagcccagccccagcgcccagcctgctggggacaaccccccacccaggaccagctgtgccaacaagctgagccaccccaggcacaccctgtcctag

SEQ ID NO: 52642 - DNA, 2403 bp, Artificial Sequence
  derived and/or modified sequence
atggccgccgccgccagcgtgaccggccgggtgacctgggccgcctcaccaatgaggtctctgggccttgggcggagactttcactgcctgggcctagactggacgcagtgacagccgcggtgaatccctctttgagtgaccatgggaacggtctggggcgcgggacccggggatcaggatgcagtgggggctcactggtggccgattgggggggcggtgccgcagccgcagccgccgttgccctcgctctggccccagccctcagtaccatgaggaggggatccagcgaatcagaattagctgcgagatgggaggccgaagccgtggcagctgcaaaagccgctgctaaagcggaagccgaagccaccgcagagactgtcgcggaacaggtgcgagtcgatgccggagccgccggagaacccgaatgtaaggccggggaagaacaaccaaaggttctcgccccagcacccgcacagccatcagcagccgaggaaggcaatacccaggtcctgcagcgacccccccccacgctcccccctagcaagccaaaaccggtgcagggcttatgtccgcacgggaaacccagggacaaaggacgaagttgtaaaaggagctcaggccacggtagtggggagaatggatctcagcggcccgttaccgtggactcgtccaaggctcgcacgagtctagatgccttgaagattagtattaggcaattgaagtggaaagaattcccttttggacgtcgtcttccctgtgacatctactggcatggcgtatccttccatgacaatgacatcttttccgggcaggtaaacaagtttccaggaatgaccgaaatggtgaggaagataactttgtcccgggctgttcgcactatgcagaacctatttcctgaggagtacaacttttatcccaggagttggattttgcccgatgagtttcaactgttcgtcgcacaggtacagatggtgaaggatgatgaccctagttggaaacccacattcattgtcaaacctgatggcggttgccaaggagacggaatctacctgatcaaggacccgagcgatatacgactggctggcacgctgcaatccaggcctgccgtggtccaggagtatatatgtaagcctctgttaatcgataagctaaaattcgacatccgactgtacgtgctgctgaagtccctcgatcccctggagatatatatcgccaaagacggcctgtctcgcttctgtaccgagccttatcaggaaccaacaccaaaaaacctccaccgtatcttcatgcatcttaccaattacagcctgaatattcattctgggaactttatccatagcgattccgcatctacagggtccaaaagaacattttcttcaatcctatgtcgcctttctagcaagggtgttgacatcaagaaggtctggtcggatatcatctctgtggtgatcaagacggtcatcgcgctgacccctgagctgaaagtgttctaccaaagcgatattcctacgggacgacccggtccaacctgctttcagattttagggttcgatattctgcttatgaagaatctgaaaccaatcctactggaggttaatgccaaccccagtatgcgaatcgagcacgaacacgagctctcacccggtgtgtttgagaacgtccctagtctggtggacgaggaagtgaaagttgccgttattagggatacactccgtcttatggacccactgaaaaagaaaagagagaaccaatcgcagcagcttgagaagccatttgccggtaaagaagatgctctggacggagaactgacttctgcaccagattgtaatgcaaacccagaggcgcacctgccctccatctgccttaaacaggtgtttcctaagtacgctaaacagttcaattacctgcgcttagtcgaccggatggcgaacttgtttatcagatttctcggtataaagggcacaatgaagctgggacccactggctttcgcacctttattaggagctgtaaattatctagttcaagcctctcaatggctgccgtggatattctgtatattgacattactcgaagatggaacagtatgaccttagatcagagggatagcggcatgtgcttgcaggctttcgtggaggctttcttctttctcgcacagaggaaatttaagatgctgccactgcacgagcaggttgcttctctcattgatctatgcgagtatcacttatcactgctggatgaaaagcgcctggtgtgcggcagaggcgtgcccagcggaggtcggccaccccacaggggaccccctcaggagccaagccccagtgcccagccagcgggagacaacccacctccacgcacctcctgcgcgaataagctttcccatccacggcatacactgagttag

SEQ ID NO: 52643 - DNA, 2403 bp, Artificial Sequence
  derived and/or modified sequence
atggctgccgcagcgagcgttacaggaagggttacctgggccgcatcccctatgcgctcactcggcttgggacggaggctctccctgcccggacctcgcctcgatgctgtgacagccgctgtgaatcctagcctgtctgaccatgggaacggtctgggaaggggtacccggggatccgggtgttctggcggaagtctggtggctgattggggaggaggcgctgcagccgctgccgctgtggctctggctttggccccagctctgagtacgatgcgcaggggtagctctgagagcgaattggccgcacgctgggaggccgaggccgtcgcagcagctaaggccgctgcaaaagcagaagcagaagccacagccgaaaccgtggccgagcaggtacgggtggacgcaggcgctgcaggagagcccgaatgcaaggccggagaagagcagccaaaggttctggctccggctcccgcacagccgtcagcagctgaagaaggcaatactcaggtgttgcagcggcctccacctactctgcctccttctaagccaaagccagttcagggtttatgcccgcacgggaagccacgggacaagggaaggtcctgcaaacgttcaagtggacacgggtccggtgagaatggatcacagaggcccgtgactgtcgattcgagtaaagccagaacatcgcttgatgccctgaagatttcaattagacagctaaagtggaaagagttccccttcggacggcgactgccttgtgatatctactggcacggcgtctcttttcatgacaatgacatcttctccgggcaggtcaataaatttcctgggatgaccgaaatggtgagaaagattaccctctcgcgggcagtgagaaccatgcagaatctcttccctgaggagtacaatttctatccccgtagctggatcctgccggacgaattccagctgtttgtggcgcaggtacaaatggtcaaggacgacgaccctagctggaagcctaccttcatcgtcaaaccagatgggggatgtcagggtgacggcatttatcttattaaagatccaagcgacattagactggcgggaacactacagtcaagacccgctgtagttcaggaatatatatgcaaaccccttcttatagacaagctgaaatttgatattagattgtacgtgctgcttaagtcattggaccctctggagatttacatcgccaaagacgggttatcacgattttgcaccgagccctaccaggagccgacaccgaaaaaccttcaccgcatctttatgcacctgacgaattattcactgaacatccacagcgggaatttcatccattctgattcggcctctacgggatccaaacgaaccttcagctcaatactatgccgcctgtcttcaaagggcgtggacattaaaaaggtctggtccgacataattagtgttgtcattaaaaccgtgattgcattaacaccagaacttaaagtcttttatcaatccgacatccctactggcagaccaggacccacgtgtttccagatccttggcttcgatattttgctgatgaaaaacttgaaaccaattttactagaagttaatgccaaccccagcatgcgaatcgagcacgagcatgagttatcccccggtgtgttcgagaacgtaccttctctggtggatgaagaggtaaaggtggcagtcatcagagacacactgcgcctgatggacccactaaagaaaaagcgggagaatcagagccaacaactcgagaaacccttcgccggaaaagaagatgcactggatggggagctgacttccgcaccagattgcaacgccaatccagaggcccacttgccctctatctgtctaaaacaggtgttccctaagtacgcaaagcagtttaactacttgcggctcgtggaccgtatggcgaacctttttattcgatttctgggcatcaagggcaccatgaaactggggcctactgggtttcgcacctttatccgtagctgtaagctgtcatctagcagcctgagcatggccgctgtcgatatcctgtacattgacatcacacggagatggaactctatgactctggaccagcgagactccgggatgtgtctgcaggctttcgtggaggcgttcttcttcctcgcccaaaggaaattcaaaatgctgcccctgcacgagcaggtagcttctctgatcgacctgtgcgagtatcacctgtccctgttggatgaaaagagactcgtttgcggcaggggcgtccccagtggagggcgaccccctcaccgcggtcctccgcaggagccaagtccttccgcccaacccgctggcgacaacccccctcccagaacgtcttgtgctaacaaactgtcccacccaaggcacactctgagctag

SEQ ID NO: 52644 - DNA, 3250 bp, Artificial Sequence
  derived and/or modified sequence
cgagtgttggcggggactgagcctcctgcttgaggtagttgtttttactcccagtccccaggctcacgagccccacgcgcgctcaatctgccctcccgcttctcctcgccactccgagttctgcgccctcgagatccagcgcatccgcggggtgggcgggtcctggcggctctttgccctcttccaacatggccgccgctgcctctgtgacaggcagggtcacgtgggcagcctcgcctatgaggtcgctggggctcggccggcgattgtcccttcccggaccccgtctcgatgcggtgactgccgctgtcaacccgagcctgagcgatcatggcaacgggctcgggcggggaacgcgtggcagcggctgcagcggcggcagtttggtggcggactggggcggcggagcggcggcggcggcggcggtggcactggcactggccccggccctgagcaccatgcggcggggcagctccgagagcgagctggcggcccggtgggaggcggaggcggtggctgcggccaaagcggcggccaaagctgaggccgaggccacagcggagacggtggcggaacaggtccgcgtggacgcgggcgcggccggggaaccggagtgcaaggcaggggaggagcagcccaaggtcctggccccggccccggcgcagcccagtgcggctgaggaggggaacacccaggtccttcagcggccgccgcccacgctgcccccgtccaagccgaagccggtgcagggcctctgcccgcacgggaagccccgggacaagggccgaagctgcaagcggagctcgggccacggttccggcgagaacggctcccagcggccggtcaccgtggacagctccaaggccaggacctccctggatgccctgaagatcagcatccgccagctcaagtggaaggagttcccatttggccggcgcttgccttgtgacatctactggcatggagtttcatttcacgacaatgacatattctccggtcaagtgaacaagtttccaggcatgacggagatggtgcgtaaaattactctgagcagagcagtgagaaccatgcagaatctctttcctgaggagtacaacttctaccctcgctcatggattctgcctgacgagttccagctctttgttgctcaggttcaaatggtgaaagacgatgacccctcctggaagcccacttttatcgtgaaacctgatggtggttgtcagggtgatggaatctacctcattaaagaccccagtgacatccgcctggcagggaccctccagagcaggccagcggtggtccaggagtacatctgcaaacctctccttatcgacaagctcaagtttgatattcgtctgtatgtcttactcaagtccttagaccccttagagatttatatagccaaagacggactctctaggttttgtaccgagccatatcaggagcccacccccaaaaacctgcaccgcatctttatgcacttaaccaactattcactgaacatccacagcggcaacttcatccactcggacagtgctagcactggcagcaaaaggactttttccagcatcctttgtagactgtcttccaaaggcgttgacatcaagaaggtctggtctgacatcatctccgtggtgattaagacggtcatcgcgctgactccagagctcaaagtcttctaccagtcagacatccccacggggaggccgggccccacgtgcttccagattttaggctttgacattcttctaatgaaaaatctgaagcctatactacttgaagtaaatgcaaatcccagtatgagaatcgaacatgagcacgaactttctccaggggtgtttgaaaatgtccccagcctcgttgatgaagaagtgaaagtggctgtgatcagagacactctgcgcctcatggacccacttaagaagaaaagagagaatcagtctcagcagcttgaaaaaccattcgctggaaaggaagatgctttggacggcgagctgaccagtgctccagactgcaacgccaaccccgaagcccacctgccttccatttgcctcaagcaggtgttccccaagtacgcaaaacagttcaactacctgcgcctggtggacaggatggcaaatttgtttatccggttcctgggcatcaaggggacaatgaagttggggccaacaggctttcgtaccttcataaggagctgcaaactcagcagcagcagcctgtccatggctgccgtggacatcctctacattgacatcacacggaggtggaactccatgaccctggaccagcgggactcagggatgtgtctgcaggccttcgtagaagctttctttttcctggctcagaggaagttcaagatgctgccacttcatgagcaggtggcctcactgattgacctttgcgagtaccacctgtccctgctggatgaaaaacgcctggtgtgtggccggggcgtcccgtcggggggccggcccccacaccgtggccctccccaggagccctccccctcggcccagccagcaggggacaaccccccaccccgcaccagctgtgccaataagctctcccatcccagacataccctgtcctgagggccactctgtcctcctggaaaacggaagacgagagcagctttcagggctggagcgccccaggcattctgcctgcagaggaatggcaggcaggctgccgaggggcccagctgaggtccccacgaactgtctctgtgtgcggctgagctgtgcttcaccaggctggctggttctcacctgccttcctcctcacacctcctggtgatacaccctgtttctgagtcatcagtcatcggacatatgacatctaaaacgtgacagatggcaccttctattctgggctcacaggaagcaccaactggggcaaatctgttgtatttggggcacaggacacaatcgatcccaaggcccggagctgtggagaggaagccgagtgttaggatctgctgccggggcctccacgcgcccaccgggaaaagcctgagaacatcgtgtttatttcctgccgcccgttccgagagaaggaagtggaaatatcaagtaggcatctgcgaatctcccatcccagtcatgtgctacatgggtgtagtgaacagattaacctcatttagttcattagcttgcctgttgctgcaatatttggtttgttattaattaagaaaaaattaattaagaagtaactaagactcctggagcctcagagctggcaggagcctcag

SEQ ID NO: 52645 - DNA, 2403 bp, Artificial Sequence
  derived and/or modified sequence
atggccgccgccgccagcgtgaccggcagagtgacctgggccgccagccccatgagaagcctgggcctgggcagaagactgagcctgcccggccccagactggacgccgtgaccgccgccgtgaaccccagcctgagcgaccacggcaacggcctgggcagaggcaccagaggcagcggctgcagcggcggcagcctggtggccgactggggcggcggcgccgccgccgccgccgccgtggccctggccctggcccccgccctgagcaccatgagaagaggcagcagcgagagcgagctggccgccagatgggaggccgaggccgtggccgccgccaaggccgccgccaaggccgaggccgaggccaccgccgagaccgtggccgagcaggtgagagtggacgccggcgccgccggcgagcccgagtgcaaggccggcgaggagcagcccaaggtgctggcccccgcccccgcccagcccagcgccgccgaggagggcaacacccaggtgctgcagagacccccccccaccctgccccccagcaagcccaagcccgtgcagggcctgtgcccccacggcaagcccagagacaagggcagaagctgcaagagaagcagcggccacggcagcggcgagaacggcagccagagacccgtgaccgtggacagcagcaaggccagaaccagcctggacgccctgaagatcagcatcagacagctgaagtggaaggagttccccttcggcagaagactgccctgcgacatctactggcacggcgtgagcttccacgacaacgacatcttcagcggccaggtgaacaagttccccggcatgaccgagatggtgagaaagatcaccctgagcagagccgtgagaaccatgcagaacctgttccccgaggagtacaacttctaccccagaagctggatcctgcccgacgagttccagctgttcgtggcccaggtgcagatggtgaaggacgacgaccccagctggaagcccaccttcatcgtgaagcccgacggcggctgccagggcgacggcatctacctgatcaaggaccccagcgacatcagactggccggcaccctgcagagcagacccgccgtggtgcaggagtacatctgcaagcccctgctgatcgacaagctgaagttcgacatcagactgtacgtgctgctgaagagcctggaccccctggagatctacatcgccaaggacggcctgagcagattctgcaccgagccctaccaggagcccacccccaagaacctgcacagaatcttcatgcacctgaccaactacagcctgaacatccacagcggcaacttcatccacagcgacagcgccagcaccggcagcaagagaaccttcagcagcatcctgtgcagactgagcagcaagggcgtggacatcaagaaggtgtggagcgacatcatcagcgtggtgatcaagaccgtgatcgccctgacccccgagctgaaggtgttctaccagagcgacatccccaccggcagacccggccccacctgcttccagatcctgggcttcgacatcctgctgatgaagaacctgaagcccatcctgctggaggtgaacgccaaccccagcatgagaatcgagcacgagcacgagctgagccccggcgtgttcgagaacgtgcccagcctggtggacgaggaggtgaaggtggccgtgatcagagacaccctgagactgatggaccccctgaagaagaagagagagaaccagagccagcagctggagaagcccttcgccggcaaggaggacgccctggacggcgagctgaccagcgcccccgactgcaacgccaaccccgaggcccacctgcccagcatctgcctgaagcaggtgttccccaagtacgccaagcagttcaactacctgagactggtggacagaatggccaacctgttcatcagattcctgggcatcaagggcaccatgaagctgggccccaccggcttcagaaccttcatcagaagctgcaagctgagcagcagcagcctgagcatggccgccgtggacatcctgtacatcgacatcaccagaagatggaacagcatgaccctggaccagagagacagcggcatgtgcctgcaggccttcgtggaggccttcttcttcctggcccagagaaagttcaagatgctgcccctgcacgagcaggtggccagcctgatcgacctgtgcgagtaccacctgagcctgctggacgagaagagactggtgtgcggcagaggcgtgcccagcggcggcagacccccccacagaggccccccccaggagcccagccccagcgcccagcccgccggcgacaaccccccccccagaaccagctgcgccaacaagctgagccaccccagacacaccctgagctag

SEQ ID NO: 52646 - DNA, 1815 bp, Artificial Sequence
  derived and/or modified sequence
atgtttgagaagttaaccttgtactgtgattcgtacatccaactcattccaatatcttttgtgcttggcttctacgtgactttggtcgtaacccgttggtggaaccagtatgagaatctgccttggccagataggctgatgtctctcgtcagcggctttgtggaagggaaagacgaacaaggccggttactgagacggaccctaattaggtatgctaacctcggtaacgtattgattctgcgcagtgtgagcacagcagtatataagcgcttccccagcgctcaacacctggtgcaagcaggtttcatgacacccgcggaacataaacagctggagaaactcagcctaccccacaatatgttttgggtcccgtgggtgtggtttgccaatctctctatgaaagcttggcttggcggtagaatcagggatcccatactgctgcagtccctcctgaatgagatgaatacccttcgaacccagtgcggccacttatacgcttatgattggatttctatccccttggtctacacacaagtcgttacagtggccgtgtacagcttttttctaacgtgtcttgtggggaggcagtttctgaatcccgccaaagcgtatccaggccacgaactggatctcgtggtccctgtgttcacgttcctgcagtttttcttctatgttgggtggctgaaagtcgctgagcaactgattaatccatttggcgaagatgacgacgattttgagacgaattggattgtggaccgcaatctccaagtctcgctgctggcggtcgacgagatgcaccaggatctgcccaggatggagccagacatgtactggaacaaaccagaaccacagcccccctacacagcagcatccgcacagttcaggcgggcttcctttatgggctccactttcaacatttcactgaacaaagaagaaatggagttccagccaaaccaggaggacgaagaggatgctcatgccggaatcatcggaaggttcttagggctccaatcacatgaccatcatcccccgagggctaatagtcgcactaagctgttatggccgaagcgagagagcctgctccacgagggcttgccaaaaaaccacaaggctgcaaagcagaacgtgagaggtcaagaggataacaaggcttggaaactcaaggccgtcgacgcatttaaaagcgccccattatatcagcggcctgggtattattcagcccctcagacgccattgagtcccacacctatgttttttcctctcgagccttccgccccaagcaaacttcactctgttactggaattgacactaaagacaaaagcctgaagacagtttcctccggagctaagaagtcctttgagctcttgagcgagtccgatggcgctttaatggagcaccctgaagtgagccaggtccggcgcaagactgtcgagtttaaccttacagatatgcctgagattcccgaaaatcacctgaaggagcccctggagcagagcccgacaaatattcataccaccttgaaggatcatatggacccctattgggccctcgagaaccgatccgtgctgcacctaaaccaggggcactgtatcgccctgtgtccaaccccagccagcctagctctgtctcttcccttcttgcataatttcttggggttccatcattgtcaatcaactctggatctccgccctgccctggcctggggaatctatctggcgacctttactggaattctaggaaaatgttcagggccttttttgacctccccttggtaccatcccgaagatttcctcgggccaggcgagggaagatag

SEQ ID NO: 52647 - DNA, 1815 bp, Artificial Sequence
  derived and/or modified sequence
atgtttgagaagctgaccctgtactgtgacagctacatccagctgatccccatcagctttgtgctgggcttctacgtgaccctggtggtgacccgctggtggaaccagtatgagaacctgccctggccagaccggctgatgagcctggtgtctggctttgtggagggcaaggatgagcagggccgcctgctgcggaggaccctcatccgctatgccaacctgggcaatgtgctgatcctgcggtctgtgtccacagctgtgtacaagcgcttccccagcgcccagcacctggtgcaggccggcttcatgaccccagctgagcacaagcagctggagaagctgagcctgccccacaacatgttctgggtgccctgggtgtggtttgccaacctgtccatgaaggcctggctgggcggccgcatccgggaccccatcctgctgcagagcctgctgaatgagatgaacaccctgcggacccagtgtggccacctgtatgcctatgactggatcagcatccccctggtgtacacccaggtggtgacagtggccgtgtacagcttcttcctgacctgcctggtgggccggcagttcctgaacccagccaaggcctacccaggccacgagctggacctggtggtgcctgtgttcaccttcctgcagttcttcttctacgtgggctggctgaaggtggccgagcagctgatcaacccctttggagaagatgatgatgactttgagaccaactggatcgtggacaggaacctgcaggtgtccctgctggccgtggatgagatgcaccaggacctgcccaggatggagccagacatgtactggaacaagccagagccccagcccccctacacagctgccagcgcccagttcagaagagccagcttcatgggcagcaccttcaacatcagcctgaacaaggaggagatggagttccagcccaaccaggaggatgaagaagatgcccatgctggcatcatcggccgcttcctgggcctgcagagccatgaccaccaccccccccgggccaacagcaggaccaagctgctgtggcccaagcgggagagcctgctgcacgagggcctgcccaagaaccacaaggccgccaagcagaatgtgcggggccaggaggacaacaaggcctggaagctgaaggctgtggatgccttcaagagcgcccccctgtaccagaggcctggctactacagcgccccccagacccccctgagccccacccccatgttcttccccctggagcccagcgcccccagcaagctgcacagcgtgactggaattgacaccaaggacaagagcctgaagacagtgtcctctggggccaagaagagctttgagctgctgtctgagagtgatggagccctgatggagcaccctgaggtgtcccaggtgcggaggaagacagtggagttcaacctgacagacatgcctgagatccctgagaaccacctgaaggagcccctggagcagagccccaccaacatccacaccaccctgaaggaccacatggacccctactgggccctggagaacagatctgtgctgcacctgaaccagggccactgcatcgccctgtgccccaccccagccagcctggccctgagcctgcccttcctgcacaacttcctgggcttccaccactgccagagcaccctggacctgcggcctgccctggcctggggcatctacctggccaccttcaccggcatcctgggcaaatgttctggccccttcctgaccagcccctggtaccaccctgaggacttcctgggccctggagagggccgctag

SEQ ID NO: 52648 - DNA, 1815 bp, Artificial Sequence
  derived and/or modified sequence
atgttcgagaagctgaccctgtactgcgacagctacatccagctgatccccatttcgtttgttctcggtttttatgtgacgctcgttgtaacacggtggtggaaccagtatgaaaatctgccttggccggatcgccttatgagtctggtttccgggttcgtcgagggcaaagatgaacagggcagactcctgcggcgaaccctgattcgatacgccaacctgggtaacgttctaatactcagatcggtctccacagctgtgtataagagattcccctccgcccagcacctggtgcaggctggctttatgactcccgccgaacacaagcaactggagaaactttcacttcctcacaatatgttctgggtaccctgggtgtggtttgcaaacctctctatgaaagcctggttgggaggccggattcgggatccaatcttgctccaatctctgctgaacgagatgaatacgctgagaacacagtgcggtcacctgtacgcatacgactggattagcatccccctggtctatacacaggtagttaccgtagcagtgtactcattcttccttacctgcctcgtgggcaggcagtttctgaaccctgctaaggcctaccctggacacgagctggatctcgtagtgccggtcttcacttttttgcagttctttttttatgtaggctggctgaaggtggccgaacagctgatcaacccattcggggaagacgacgatgactttgaaactaactggattgtggaccggaacctccaagtttccctactggccgttgacgaaatgcatcaagacctccctcgcatggaacccgatatgtactggaacaagccagaaccccagccaccctatactgccgcttctgcccagttccgccgcgccagcttcatgggcagcacttttaatattagcctcaacaaagaggaaatggagtttcagcccaaccaagaggatgaggaggatgcccatgccggtataatcggacgattcttgggcctccaatcacatgatcaccatccgcccagggccaatagtagaacgaagttactctggccgaagcgcgagtcccttctgcatgaggggcttcctaaaaatcacaaggcggcaaagcagaatgttagaggccaggaagacaacaaggcgtggaaactgaaagccgttgacgcattcaagagtgcaccgctctaccaacgacctggctattacagcgctcctcaaacccccctgtcacccactcctatgttctttcccctagaaccctctgcacctagcaaactgcacagtgtgacaggcatcgacacaaaagataagtccctgaagaccgtatcttccggcgcgaaaaaaagttttgagttgctgagcgaatccgatggagccctgatggaacaccccgaagtaagtcaggtgcgtcgcaaaactgtcgaattcaacctgaccgacatgccagaaattcctgaaaatcacctcaaagagcccttggagcagtcacccaccaacatccataccacattaaaagatcacatggacccttactgggcactggaaaatcgttctgtgctccacctaaatcagggccactgcatagccctttgtcctacccctgccagtctcgcactgtcccttcctttcttgcacaattttctggggtttcaccactgtcagtccactctggaccttaggcccgcactcgcttgggggatatatctggctacattcaccggcattttgggtaaatgcagcgggccgtttcttacgtccccttggtatcaccccgaggatttcctgggccccggtgaagggcgctag

SEQ ID NO: 52649 - DNA, 1815 bp, Artificial Sequence
  derived and/or modified sequence
atgtttgagaagctcacgctctactgcgactcatatatccagttaatacccattagctttgtgctcggtttctacgtgaccctggtcgtgacgcggtggtggaatcagtacgagaacttaccatggccagacaggctgatgagcctcgtctccggctttgtggaagggaaggacgaacagggcagattgctgcggaggacattaattcggtatgctaatctgggcaacgttctgattttgcgcagcgtgtctacggccgtgtacaaaagatttcctagtgcccagcatctagttcaggcaggctttatgacacctgccgaacataagcagcttgagaagcttagtttgccccataacatgttctgggttccatgggtctggttcgctaatctgagtatgaaggcctggttaggaggccgtattcgggatcctattctgctgcaaagccttctaaatgaaatgaacacacttcgaacccagtgcggacacctatatgcatatgactggatttcaatacccctggtatacacccaagtcgttaccgtggccgtctactcattttttctgacctgcctggttggccgacagttcctaaatcctgctaaagcataccccggacacgagctcgacctggtggttccggtgttcaccttcttgcaattttttttttacgtgggatggctcaaagtggccgaacagttgatcaacccttttggcgaagacgacgacgactttgaaacaaactggatcgttgacaggaacctccaggtgtctctgcttgctgtcgacgaaatgcaccaggacttgcctagaatggaaccagatatgtactggaataaaccagagccccagcccccttacacagctgcttccgcccaatttagacgtgctagcttcatgggaagcacttttaatatctccctgaacaaagaagaaatggagtttcagcctaaccaggaagacgaagaagatgcccatgccggaatcatcggacgattcctgggactccagtctcacgaccatcacccaccaagggcaaactcaaggacgaaattgttgtggcctaaaagagagtcactgctgcacgaaggcctgcccaaaaatcacaaggccgctaagcaaaatgtcagaggacaagaagataacaaggcttggaaactgaaagccgtcgacgccttcaaatcggcccctttatatcagaggccaggatattatagcgctccccagacacccttgtcccccactcccatgttcttccctctggagcctagcgcaccatctaagctccactccgtcacaggcattgataccaaggataagtcactgaaaacagtgagctccggggctaaaaagtcctttgagttactctcggagtcagacggggctctgatggagcatccggaagtcagccaggtacgcagaaaaaccgttgagtttaatttgacagatatgcctgagattcctgagaatcatcttaaggagcccctcgagcagtccccaacgaatatccacacgaccctaaaagatcatatggatccctactgggcactggagaataggtccgtcctccacctgaaccagggccattgcatagccctctgccctacccccgcttcgctcgctctgtcattgcccttccttcacaacttcctcggatttcatcattgtcagtcaactttggacttgagaccggcactcgcttggggtatttacctggcgacattcaccgggatactcggtaagtgtagcgggccattccttaccagtccctggtatcaccccgaggatttcttgggtccaggcgaaggcagatag

SEQ ID NO: 52650 - DNA, 1815 bp, Artificial Sequence
  derived and/or modified sequence
atgttcgagaagctgaccctgtactgcgacagctacatccagctgatccccatcagcttcgtgctgggcttctacgtgaccctggtggtgaccagatggtggaaccagtacgagaacctgccctggcccgacagactgatgagcctggtgagcggcttcgtggagggcaaggacgagcagggcagactgctgagaagaaccctgatcagatacgccaacctgggcaacgtgctgatcctgagaagcgtgagcaccgccgtgtacaagagattccccagcgcccagcacctggtgcaggccggcttcatgacccccgccgagcacaagcagctggagaagctgagcctgccccacaacatgttctgggtgccctgggtgtggttcgccaacctgagcatgaaggcctggctgggcggcagaatcagagaccccatcctgctgcagagcctgctgaacgagatgaacaccctgagaacccagtgcggccacctgtacgcctacgactggatcagcatccccctggtgtacacccaggtggtgaccgtggccgtgtacagcttcttcctgacctgcctggtgggcagacagttcctgaaccccgccaaggcctaccccggccacgagctggacctggtggtgcccgtgttcaccttcctgcagttcttcttctacgtgggctggctgaaggtggccgagcagctgatcaaccccttcggcgaggacgacgacgacttcgagaccaactggatcgtggacagaaacctgcaggtgagcctgctggccgtggacgagatgcaccaggacctgcccagaatggagcccgacatgtactggaacaagcccgagccccagcccccctacaccgccgccagcgcccagttcagaagagccagcttcatgggcagcaccttcaacatcagcctgaacaaggaggagatggagttccagcccaaccaggaggacgaggaggacgcccacgccggcatcatcggcagattcctgggcctgcagagccacgaccaccacccccccagagccaacagcagaaccaagctgctgtggcccaagagagagagcctgctgcacgagggcctgcccaagaaccacaaggccgccaagcagaacgtgagaggccaggaggacaacaaggcctggaagctgaaggccgtggacgccttcaagagcgcccccctgtaccagagacccggctactacagcgccccccagacccccctgagccccacccccatgttcttccccctggagcccagcgcccccagcaagctgcacagcgtgaccggcatcgacaccaaggacaagagcctgaagaccgtgagcagcggcgccaagaagagcttcgagctgctgagcgagagcgacggcgccctgatggagcaccccgaggtgagccaggtgagaagaaagaccgtggagttcaacctgaccgacatgcccgagatccccgagaaccacctgaaggagcccctggagcagagccccaccaacatccacaccaccctgaaggaccacatggacccctactgggccctggagaacagaagcgtgctgcacctgaaccagggccactgcatcgccctgtgccccacccccgccagcctggccctgagcctgcccttcctgcacaacttcctgggcttccaccactgccagagcaccctggacctgagacccgccctggcctggggcatctacctggccaccttcaccggcatcctgggcaagtgcagcggccccttcctgaccagcccctggtaccaccccgaggacttcctgggccccggcgagggcagatag

SEQ ID NO: 52651 - protein, 246 aa, Artificial Sequence
  derived and/or modified sequence
MSLQWTAVATFLYAEVFVVLLLCIPFISPKRWQKIFKSRLVELLVSYGNTFFVVLIVILVLLVIDAVREIRKYDDVTEKVNLQNNPGAMEHFHMKLFRAQRNLYIAGFSLLLSFLLRRLVTLISQQATLLASNEAFKKQAESASEAAKKYMEENDQLKKGAAVDGGKLDVGNAEVKLEEENRSLKADLQKLKDELASTKQKLEKAENQVLAMRKQSEGLTKEYDRLLEEHAKLQAAVDGPMDKKEE

SEQ ID NO: 52652 - protein, 182 aa, Artificial Sequence
  derived and/or modified sequence
MSLQWTAVATFLYAEVFVVLLLCIPFISPKRWQKIFKSRLVELLVSYGNTFFVVLIVILVLLVIDAVREIRKYDDVTEKVNLQNNPGAMEHFHMKLFRAQRNLYIAGFSLLLSFLLRRLVTLISQQATLLASNEAFKKQAESASEAAKKYMEENDQLKKGAAVDGGKLDVGNAEVKLEEENR

SEQ ID NO: 52653 - protein, 313 aa, Artificial Sequence
  derived and/or modified sequence
MGAEASSSWCPGTALPEERLSVKRASEISGFLGQGSSGEAALDVLTHVLEGAGNKLTSSCGKPSSNRMSLQWTAVATFLYAEVFVVLLLCIPFISPKRWQKIFKSRLVELLVSYGNTFFVVLIVILVLLVIDAVREIRKYDDVTEKVNLQNNPGAMEHFHMKLFRAQRNLYIAGFSLLLSFLLRRLVTLISQQATLLASNEAFKKQAESASEAAKKYMEENDQLKKGAAVDGGKLDVGNAEVKLEEENRSLKADLQKLKDELASTKQKLEKAENQVLAMRKQSEGLTKEYDRLLEEHAKLQAAVDGPMDKKEE

SEQ ID NO: 52654 - protein, 187 aa, Artificial Sequence
  derived and/or modified sequence
MSLQWTAVATFLYAEVFVVLLLCIPFISPKRWQKIFKSRLVELLVSYGNTFFVVLIVILVLLVIDAVREIRKYDDVTEKVNLQNNPGAMEHFHMKLFRAQRNLYIAGFSLLLSFLLRRLVTLISQQATLLASNEAFKKQAESASEAAKKYMEENDQLKKGAAVDGGKLDVGNAEVKLEEENRSLKAD

SEQ ID NO: 52655 - protein, 138 aa, Artificial Sequence
  derived and/or modified sequence
MSLQWTAVATFLYAEVFVVLLLCIPFISPKRWQKIFKSRLVELLVSYGNTFFVVLIVILVLLVIDAVREIRKYDDVTEKVNLQNNPGAMEHFHMKLFRAQRNLYIAGFSLLLSFLLRRLVTLISQQATLLASNEAFKK

SEQ ID NO: 52656 - protein, 188 aa, Artificial Sequence
  derived and/or modified sequence
MSLQWTAVATFLYAEVFVVLLLCIPFISPKRWQKIFKSRLVELLVSYGNTFFVVLIVILVLLVIDAVREIRKYDDVTEKVNLQNNPGAMEHFHMKLFRAQRNLYIAGFSLLLSFLLRRLVTLISQQATLLASNEAFKKQAESASEAAKKYMEENDQLKKGAAVDGGKLDVGNAEVKLEEENRSLKADL

SEQ ID NO: 52657 - DNA, 942 bp, Artificial Sequence
  derived and/or modified sequence
atgggcgccgaggccagcagcagctggtgccccggcaccgccctgcccgaggagagactgagcgtgaagagagccagcgagatcagcggcttcctgggccagggcagcagcggcgaggccgccctggacgtgctgacccacgtgctggagggcgccggcaacaagctgaccagcagctgcggcaagcccagcagcaacagaatgagcctgcagtggaccgccgtggccaccttcctgtacgccgaggtgttcgtggtgctgctgctgtgcatccccttcatcagccccaagagatggcagaagatcttcaagagcagactggtggagctgctggtgagctacggcaacaccttcttcgtggtgctgatcgtgatcctggtgctgctggtgatcgacgccgtgagagagatcagaaagtacgacgacgtgaccgagaaggtgaacctgcagaacaaccccggcgccatggagcacttccacatgaagctgttcagagcccagagaaacctgtacatcgccggcttcagcctgctgctgagcttcctgctgagaagactggtgaccctgatcagccagcaggccaccctgctggccagcaacgaggccttcaagaagcaggccgagagcgccagcgaggccgccaagaagtacatggaggagaacgaccagctgaagaagggcgccgccgtggacggcggcaagctggacgtgggcaacgccgaggtgaagctggaggaggagaacagaagcctgaaggccgacctgcagaagctgaaggacgagctggccagcaccaagcagaagctggagaaggccgagaaccaggtgctggccatgagaaagcagagcgagggcctgaccaaggagtacgacagactgctggaggagcacgccaagctgcaggccgccgtggacggccccatggacaagaaggaggagtag

SEQ ID NO: 52658 - DNA, 942 bp, Artificial Sequence
  derived and/or modified sequence
atgggggcagaagcatcatcatcctggtgtcctggaacggccctccccgaggaaagacttagcgtgaaacgggcttccgagattagcgggtttcttggccaggggtcttccggagaagctgcattggacgtgctgacccatgtgctggaaggggcaggcaacaaattaacttcctcctgtgggaaacccagtagcaacagaatgagcctgcagtggactgcagtcgccacttttctgtatgccgaggtgtttgttgtgctgctgctgtgcatccctttcatttcaccaaaacggtggcaaaaaatcttcaagtcccggcttgtggagctcctggtgtcctatgggaacaccttctttgtggtgctaatagtgatcctcgtactactggttatcgatgcagttcgagaaatccgcaagtacgacgacgtcaccgaaaaggtcaacttgcagaataatccaggagccatggaacactttcatatgaagcttttcagagcgcagcgtaacctctacatagcaggattttctttacttctgtcctttttgctcaggaggttagtaacactaatttcacagcaagccacgctgctggccagcaacgaggcctttaagaagcaggccgagtctgcaagcgaggctgcgaaaaagtacatggaggaaaacgatcagctcaagaagggtgctgcagtggatggtggtaagttggatgttggaaacgccgaagtgaaactcgaagaagaaaaccggtcccttaaggcagacctacagaagttgaaagacgaactggcttcgactaagcagaaactcgagaaggcagagaatcaagtgctggctatgcgtaagcagtccgaaggcctcacaaaagagtacgacaggttgttggaagagcatgcgaagttacaggcagccgtggacgggcctatggacaaaaaggaagaatag

SEQ ID NO: 52659 - DNA, 942 bp, Artificial Sequence
  derived and/or modified sequence
atgggtgcagaagcatcctcatcatggtgtccaggaaccgcgctcccagaagagaggctgtccgtcaagagagccagcgaaatttccgggttcctgggtcaagggtcctcaggcgaggcagcactggatgtgctcactcacgtactggagggagctgggaacaagctgaccagttcatgcggcaagccctctagcaaccgaatgtccctgcagtggaccgccgtcgctaccttcctgtacgccgaggtgtttgtggtgctgctgctctgcattccatttatcagcccaaagcgatggcagaaaatctttaaaagtcgcctcgtggagctactcgtaagttacggcaacactttttttgtggtgttgatagtcattctggtcctgctggtgatagatgccgtaagagaaataaggaaatacgacgacgttacagagaaggtaaacttacaaaacaaccctggggcaatggagcatttccacatgaagctcttccgggcacagcggaatctttatattgccggattcagtctcctgcttagtttccttctacgccggctggtgactttaatttcccagcaggcaacactgttggcctcgaacgaggccttcaagaaacaagctgagtccgcctccgaagcagccaagaaatacatggaggaaaacgaccagttgaaaaaaggtgccgctgtcgatgggggcaaactggacgtggggaatgccgaggtgaagctagaggaggagaacagatcccttaaggcagatctgcagaagctgaaggacgagctggcctccaccaaacagaagctggagaaagcagagaaccaggtcttagctatgaggaagcagagcgaagggctaaccaaagaatacgatagactcctggaggagcacgccaagcttcaggccgccgtcgatggtccgatggacaaaaaggaagaatag

SEQ ID NO: 52660 - DNA, 942 bp, Artificial Sequence
  derived and/or modified sequence
atgggcgctgaggccagcagctcctggtgccctggaacagccctgcctgaggagcggctgtctgtgaagagggccagcgagatcagcggcttcctgggccagggcagcagtggagaggccgccctggatgtgctgacccacgtgctggagggcgccggcaacaagctgaccagcagctgtgggaagcccagcagcaacaggatgagcctgcagtggacagctgtggccaccttcctgtatgcagaggtgtttgtggtgctgctgctgtgcatccccttcatcagccccaagcgctggcagaagatcttcaagagccggctggtggagctgctggtgtcctatggcaacaccttctttgtggtgctgattgtcatcctggtgctgctggtgattgatgctgtgcgggagatcagaaaatatgatgatgtgacagagaaggtgaacctgcagaacaaccctggggccatggagcacttccacatgaagctgttccgggcccagaggaacctgtacatcgccggcttcagcctgctgctgtccttcctgctgcggcggctggtgaccctcatcagccagcaggccaccctgctggccagcaatgaggccttcaagaagcaggccgagagcgccagcgaggccgccaagaagtacatggaggagaatgaccagctgaagaagggagctgctgtggatggcggcaagctggatgtgggcaatgctgaggtgaagctggaggaggagaacagaagcctgaaggctgacctgcagaagctgaaggatgagctggccagcaccaagcagaagctggagaaggccgagaaccaggtgctggccatgaggaagcagagcgagggcctgaccaaggagtatgaccggctgctggaggagcacgccaagctgcaggccgctgtggatggccccatggacaagaaggaggagtag

SEQ ID NO: 52661 - DNA, 942 bp, Artificial Sequence
  derived and/or modified sequence
atgggcgccgaggccagcagcagctggtgccccggcaccgccctgccagaggagaggttgtcagtgaaacgcgccagtgaaatctcgggctttttaggccaggggtcgtccggggaagccgcactggacgtacttacccacgtccttgagggagccggcaacaagctgaccagcagttgtggtaaaccttcaagcaaccgcatgagcctccagtggacagccgtggccacctttctatacgcggaggtgttcgtggttttactgctgtgcatcccctttatttcacctaaacgctggcaaaaaattttcaagtctcggctcgtggaactactcgtgagttacggtaatactttttttgtggtattgatcgtaattctagtccttctagtgatcgacgcggtgcgtgagattcgtaagtacgacgatgtcaccgagaaagtgaatctgcagaataatccaggtgccatggagcacttccacatgaaactgttccgggcccaaagaaatctgtatatagccgggttcagtctcctgctgtcttttctgcttagaaggttggttacactcatctctcaacaggccacgttgctcgcatctaatgaagctttcaagaagcaggccgaatcggcgtcggaggcggctaagaagtacatggaagagaatgaccagctgaagaaaggcgctgccgtcgacggtggaaagctggacgtgggcaacgctgaagtgaagctcgaagaagaaaatcgcagtcttaaagccgatctgcaaaagctgaaggatgagcttgcctcaacgaagcagaagttggagaaagccgagaatcaggtgttggcgatgcgtaagcagagtgagggcctcaccaaggaatacgaccggctgctggaagagcacgccaaattgcaggcggccgtggatggccccatggacaaaaaggaggaatag

SEQ ID NO: 52662 - DNA, 942 bp, Artificial Sequence
  derived and/or modified sequence
atgggcgccgaggccagcagcagctggtgccccggcaccgccctgcctgaagagcgattatcggtgaaacgggctagtgagatcagcggctttttgggacagggaagcagcggcgaagccgcattggacgtcctgacccacgtgctggagggagccggcaacaagcttacttcttcatgcggaaaaccaagttcaaatcgcatgtccctgcagtggacagcagttgccacttttctgtacgccgaggtgttcgtggttttactgctttgcatccctttcatcagccccaagagatggcagaaaatctttaaaagtcggctggtcgagcttctggtgtcatacggcaacaccttcttcgtcgtcctcattgtaattcttgttcttctggtgatcgatgctgtgagggaaatacggaagtacgatgacgtgactgagaaggtcaacctgcagaacaatcctggcgctatggaacacttccatatgaaactgttccgggctcaaaggaacctgtacattgcgggtttttctctgctgctgtcatttctgctgcgcagactcgtcacccttatttcgcagcaggcgactttgctggcgagcaatgaagcattcaaaaaacaggctgagagcgccagcgaggctgccaaaaagtacatggaggagaacgaccagttaaaaaagggcgccgcggtagacggtgggaagcttgacgtcggtaatgccgaggttaagctggaagaggagaatcgaagcctgaaagctgatctccagaagctgaaggatgaacttgcttccactaagcagaaacttgagaaggccgagaatcaagtcctggctatgcgcaaacagagtgagggtctgacaaaagaatatgatagattgctcgaagagcatgccaagctgcaggcagctgtcgacgggccaatggataagaaggaagagtag

SEQ ID NO: 52663 - DNA, 942 bp, Artificial Sequence
  derived and/or modified sequence
atgggagccgaggccagcagttcctggtgtcccggaaccgccttgccagaggagcggctgagtgtcaagagggcctcagagataagtggattcctgggtcagggatcttctggcgaggcggcactggacgtcctgacccacgtcttagagggtgccggaaataagctgacaagctcctgcggaaaaccatcatccaacagaatgagcctgcaatggacagccgtcgcaacttttctctacgctgaagtgttcgtggtgctcctcctctgcattccgtttatcagtcctaaaagatggcagaagatctttaaatctaggcttgtagagttgctggtatcctatgggaacacattctttgtagtgctcatcgttatcctggtcctgctggttatcgacgctgtccgcgaaatcaggaaatacgatgacgttaccgaaaaggtgaacctgcagaacaatcccggagcaatggagcactttcacatgaagcttttccgcgcacagcgcaatctgtatattgcaggcttcagcctgcttttgtcgttcctattgcgcagattggtaactcttataagtcagcaggctactctgttggcttctaacgaagccttcaaaaaacaggccgaatcagcatcggaggccgctaagaagtacatggaagagaatgatcaactcaaaaaaggagcagcagtcgacgggggaaagttggatgttgggaacgcggaggtgaaattggaggaggagaaccgtagcctgaaggcagacttgcagaaactgaaagacgaactcgcctcaaccaaacagaagctggaaaaagccgagaaccaagtcctggcaatgcgcaagcaaagcgaaggcctgactaaggagtacgatagattactggaggaacacgccaaattgcaagcagccgtagacggacccatggacaagaaagaagaatag

SEQ ID NO: 52664 - DNA, 942 bp, Artificial Sequence
  derived and/or modified sequence
atgggagcagaggcatcttctagctggtgcccaggcactgcgttgcccgaggagcgtctttccgttaaacgtgcatccgagatttctgggtttctcggacaggggtcctcgggtgaggccgctctagacgtgctgacgcatgtgctggagggcgcaggaaataaacttaccagcagctgcggtaagccgtcaagcaaccgcatgagcctacagtggaccgccgttgctacattcctctatgccgaagtgtttgttgtgctcctgctgtgtattccttttatatccccaaagagatggcagaaaatcttcaaaagtagacttgtcgagctgctggttagctatggtaacacctttttcgtcgtgctaattgtgattctggtcctgttggtgatcgatgctgttcgcgaaattagaaaatatgacgacgtgaccgagaaagtcaatctccagaacaaccccggagctatggaacactttcatatgaagctttttcgggctcagaggaacctttacatagctgggttttccctcttgctttcatttctgttgaggcgactcgtgactctaatttcccagcaggcaacactcttagccagcaatgaggctttcaaaaagcaggctgagtcagccagcgaggccgctaagaagtatatggaggagaacgatcagttaaaaaagggggctgcagtggacggcggtaaactggacgtgggaaatgcagaagtgaagttggaagaggagaacagatcactcaaggctgatctgcagaagctcaaggacgaattagcgagtacaaagcagaagttagagaaagctgagaaccaagttctcgcgatgagaaagcagtccgagggcctcacgaaggagtacgataggttactggaggaacacgccaaacttcaggccgcagttgatggcccaatggataagaaagaagaatag

SEQ ID NO: 52665 - DNA, 1589 bp, Artificial Sequence
  derived and/or modified sequence
tctcgcccctcggcggggcccctcccgcaccacagagacgtgggacggccgcgcggactagagaagcggccctcgccggcccgacaaagccccgccccgccccgcccgcgtgctcgctccaccccgccctgctcgcccggagcccgaggcgcctcttcctctcccgctcggagcgccggccctccgctccggggcggggtgggaagcggaggtgggcggagcctccggggcctcgcgagggctggtgggcggtgcccggcgggcgcttccggtttccggccgcggtatgaggggcggggccggggctgctgtgggagagttctgttgctgcggcggggcctgcacgttgactgtgggaaactcggaaacaagctcacatcttcctgtgggaaaccttctagcaacaggatgagtctgcagtggactgcagttgccaccttcctctatgcggaggtctttgttgtgttgcttctctgcattcccttcatttctcctaaaagatggcagaagattttcaagtcccggctggtggagttgttagtgtcctatggcaacaccttctttgtggttctcattgtcatccttgtgctgttggtcatcgatgccgtgcgcgaaattcggaagtatgatgatgtgacggaaaaggtgaacctccagaacaatcccggggccatggagcacttccacatgaagcttttccgtgcccagaggaatctctacattgctggcttttccttgctgctgtccttcctgcttagacgcctggtgactctcatttcgcagcaggccacgctgctggcctccaatgaagcctttaaaaagcaggcggagagtgctagtgaggcggccaagaagtacatggaggagaatgaccagctcaagaagggagctgctgttgacggaggcaagttggatgtcgggaatgctgaggtgaagttggaggaagagaacaggagcctgaaggctgacctgcagaagctaaaggacgagctggccagcactaagcaaaaactagagaaagctgaaaaccaggttctggccatgcggaagcagtctgagggcctcaccaaggagtacgaccgcttgctggaggagcacgcaaagctgcaggctgcagtagatggtcccatggacaagaaggaagagtaagggcctccttcctcccctgcctgcagctggcttccacctggcacgtgcctgctgcttcctgagagcccggcctctccctccagtacttctgtttgtgcccttctgcttcccccattcccttccacagctcatagctcgtcatctcggcccttgtccacactctccaagcacattacaggggacctgattgctacacgttcagaatgcgtttgctgtcatcctgcttggcctggccaggcctggcacagccttggcttccacgcctgagcgtggagagcacgagttagttgtagtccggcttgcggtggggctgacttcctgttggtttgagcccctttttgttttgccctctgggtgttttctttggtcccgcaggagggtgggtggagcaggtggactggagtttctcttgagggcaataaaagttgtcatggtgtgta

SEQ ID NO: 52666 - DNA, 688 bp, Artificial Sequence
  derived and/or modified sequence
aggagcggccgggatgggcctccgggacggtgtgccaggccggggccaagtcggaggcccctcgctctgggtgggcgctggggcccgcgagggctactgaaacaagctcacatcttcctgtgggaaaccttctagcaacaggatgagtctgcagtggactgcagttgccaccttcctctatgcggaggtctttgttgtgttgcttctctgcattcccttcatttctcctaaaagatggcagaagattttcaagtcccggctggtggagttgttagtgtcctatggcaacaccttctttgtggttctcattgtcatccttgtgctgttggtcatcgatgccgtgcgcgaaattcggaagtatgatgatgtgacggaaaaggtgaacctccagaacaatcccggggccatggagcacttccacatgaagcttttccgtgcccagaggaatctctacattgctggcttttccttgctgctgtccttcctgcttagacgcctggtgactctcatttcgcagcaggccacgctgctggcctccaatgaagcctttaaaaagcaggcggagagtgctagtgaggcggccaagaagtacatggaggagaatgaccagctcaagaagggagctgctgttgacggaggcaagttggatgtcgggaatgctgaggtgaagttggaggaagagaacagg

SEQ ID NO: 52667 - DNA, 669 bp, Artificial Sequence
  derived and/or modified sequence
ggtgggcgctggggcccgcgagggctactgtaaggacccctggcttctgaggatactgcgtctagaactttctccgtatggggccttgaggaaacaagctcacatcttcctgtgggaaaccttctagcaacaggatgagtctgcagtggactgcagttgccaccttcctctatgcggaggtctttgttgtgttgcttctctgcattcccttcatttctcctaaaagatggcagaagattttcaagtcccggctggtggagttgttagtgtcctatggcaacaccttctttgtggttctcattgtcatccttgtgctgttggtcatcgatgccgtgcgcgaaattcggaagtatgatgatgtgacggaaaaggtgaacctccagaacaatcccggggccatggagcacttccacatgaagcttttccgtgcccagaggaatctctacattgctggcttttccttgctgctgtccttcctgcttagacgcctggtgactctcatttcgcagcaggccacgctgctggcctccaatgaagcctttaaaaagcaggcggagagtgctagtgaggcggccaagaagtacatggaggagaatgaccagctcaagaagggagctgctgttgacggaggcaagttggatgtcgggaatgctgaggtgaagttggagg

SEQ ID NO: 52668 - DNA, 1499 bp, Artificial Sequence
  derived and/or modified sequence
ggtgtgccaggccggggccaagtcggaggcccctcgctctgggtgggcgctggggcccgcgagggctactgtaaggacccctggcttctgaggatactgcgtctagaactttctccgtatgggtgccgaggcgtcctcctcttggtgccctggcactgctcttcccgaagaacgcctttcagttaaacgggcgtcggaaatctcgggcttcctggggcagggatcgtcgggagaggccgctctggacgtgttgacacacgtgctggagggggcaggaaacaagctcacatcttcctgtgggaaaccttctagcaacaggatgagtctgcagtggactgcagttgccaccttcctctatgcggaggtctttgttgtgttgcttctctgcattcccttcatttctcctaaaagatggcagaagattttcaagtcccggctggtggagttgttagtgtcctatggcaacaccttctttgtggttctcattgtcatccttgtgctgttggtcatcgatgccgtgcgcgaaattcggaagtatgatgatgtgacggaaaaggtgaacctccagaacaatcccggggccatggagcacttccacatgaagcttttccgtgcccagaggaatctctacattgctggcttttccttgctgctgtccttcctgcttagacgcctggtgactctcatttcgcagcaggccacgctgctggcctccaatgaagcctttaaaaagcaggcggagagtgctagtgaggcggccaagaagtacatggaggagaatgaccagctcaagaagggagctgctgttgacggaggcaagttggatgtcgggaatgctgaggtgaagttggaggaagagaacaggagcctgaaggctgacctgcagaagctaaaggacgagctggccagcactaagcaaaaactagagaaagctgaaaaccaggttctggccatgcggaagcagtctgagggcctcaccaaggagtacgaccgcttgctggaggagcacgcaaagctgcaggctgcagtagatggtcccatggacaagaaggaagagtaagggcctccttcctcccctgcctgcagctggcttccacctggcacgtgcctgctgcttcctgagagcccggcctctccctccagtacttctgtttgtgcccttctgcttcccccattcccttccacagctcatagctcgtcatctcggcccttgtccacactctccaagcacattacaggggacctgattgctacacgttcagaatgcgtttgctgtcatcctgcttggcctggccaggcctggcacagccttggcttccacgcctgagcgtggagagcacgagttagttgtagtccggcttgcggtggggctgacttcctgttggtttgagcccctttttgttttgccctctgggtgttttctttggtcccgcaggagggtgggtggagcaggtggactggagtttctcttgagggcaataaaagttgtcatggtgtgt

SEQ ID NO: 52669 - DNA, 684 bp, Artificial Sequence
  derived and/or modified sequence
tcgcccggagcccgaggcgcctcttcctctcccgctcggagcgccggccctccgctccggggcggggtgggaagcggaggaaacaagctcacatcttcctgtgggaaaccttctagcaacaggatgagtctgcagtggactgcagttgccaccttcctctatgcggaggtctttgttgtgttgcttctctgcattcccttcatttctcctaaaagatggcagaagattttcaagtcccggctggtggagttgttagtgtcctatggcaacaccttctttgtggttctcattgtcatccttgtgctgttggtcatcgatgccgtgcgcgaaattcggaagtatgatgatgtgacggaaaaggtgaacctccagaacaatcccggggccatggagcacttccacatgaagcttttccgtgcccagaggaatctctacattgctggcttttccttgctgctgtccttcctgcttagacgcctggtgactctcatttcgcagcaggccacgctgctggcctccaatgaagcctttaaaaagcaggcggagagtgctagtgaggcggccaagaagtacatggaggagaatgaccagctcaagaagggagctgctgttgacggaggcaagttggatgtcgggaatgctgaggtgaagttggaggaagagaacaggagcctgaaggctgac

SEQ ID NO: 52670 - DNA, 570 bp, Artificial Sequence
  derived and/or modified sequence
agtgcagggggtcagggtggagagtggcggccccagcctcgcagggtaactgaactggatgttcttggctgcccagcgcttacaagtcccgtaccttttgtgccctgccaggaaacaagctcacatcttcctgtgggaaaccttctagcaacaggatgagtctgcagtggactgcagttgccaccttcctctatgcggaggtctttgttgtgttgcttctctgcattcccttcatttctcctaaaagatggcagaagattttcaagtcccggctggtggagttgttagtgtcctatggcaacaccttctttgtggttctcattgtcatccttgtgctgttggtcatcgatgccgtgcgcgaaattcggaagtatgatgatgtgacggaaaaggtgaacctccagaacaatcccggggccatggagcacttccacatgaagcttttccgtgcccagaggaatctctacattgctggcttttccttgctgctgtccttcctgcttagacgcctggtgactctcatttcgcagcaggccacgctgctggcctccaatgaagcctttaaaaagc

SEQ ID NO: 52671 - DNA, 1413 bp, Artificial Sequence
  derived and/or modified sequence
gagagttctgttgctgcggcggggcctgcacgttgactgtgggaaactcggtgagcgggctccgcgcgccgggctgggctccgggaccgcggaggctccccggcccatcgacgagggagagaggcgagcggcgcggggaggcccgggggccggggaatctcggggcccgcagcctacctgcgtgaaacaagctcacatcttcctgtgggaaaccttctagcaacaggatgagtctgcagtggactgcagttgccaccttcctctatgcggaggtctttgttgtgttgcttctctgcattcccttcatttctcctaaaagatggcagaagattttcaagtcccggctggtggagttgttagtgtcctatggcaacaccttctttgtggttctcattgtcatccttgtgctgttggtcatcgatgccgtgcgcgaaattcggaagtatgatgatgtgacggaaaaggtgaacctccagaacaatcccggggccatggagcacttccacatgaagcttttccgtgcccagaggaatctctacattgctggcttttccttgctgctgtccttcctgcttagacgcctggtgactctcatttcgcagcaggccacgctgctggcctccaatgaagcctttaaaaagcaggcggagagtgctagtgaggcggccaagaagtacatggaggagaatgaccagctcaagaagggagctgctgttgacggaggcaagttggatgtcgggaatgctgaggtgaagttggaggaagagaacaggagcctgaaggctgacctgcagaagctaaaggacgagctggccagcactaagcaaaaactagagaaagctgaaaaccaggttctggccatgcggaagcagtctgagggcctcaccaaggagtacgaccgcttgctggaggagcacgcaaagctgcaggctgcagtagatggtcccatggacaagaaggaagagtaagggcctccttcctcccctgcctgcagctggcttccacctggcacgtgcctgctgcttcctgagagcccggcctctccctccagtacttctgtttgtgcccttctgcttcccccattcccttccacagctcatagctcgtcatctcggcccttgtccacactctccaagcacattacaggggacctgattgctacacgttcagaatgcgtttgctgtcatcctgcttggcctggccaggcctggcacagccttggcttccacgcctgagcgtggagagcacgagttagttgtagtccggcttgcggtggggctgacttcctgttggtttgagcccctttttgttttgccctctgggtgttttctttggtcccgcaggagggtgggtggagcaggtggactggagtttctcttgagggcaataaaagttgtcatggtgtgtacgtgg

SEQ ID NO: 52672 - DNA, 793 bp, Artificial Sequence
  derived and/or modified sequence
gagagttctgttgctgcggcggggcctgcacgttgactgtgggaaactcggtgagcgggctccgcgcgccgggctgggctccgggaccgcggaggctccccggcccatcgacgagggagagaggcgagcggcgcggggaggcccgggggccggggaatctcggggcccgcagcctacctgcgtgaaacaagctcacatcttcctgtgggaaaccttctagcaacaggatgagtctgcagtggactgcagttgccaccttcctctatgcggaggtctttgttgtgttgcttctctgcattcccttcatttctcctaaaagatggcagaagattttcaagtcccggctggtggagttgttagtgtcctatggcaacaccttctttgtggttctcattgtcatccttgtgctgttggtcatcgatgccgtgcgcgaaattcggaagtatgatgatgtgacggaaaaggtgaacctccagaacaatcccggggccatggagcacttccacatgaagcttttccgtgcccagaggaatctctacattgctggcttttccttgctgctgtccttcctgcttagacgcctggtgactctcatttcgcagcaggccacgctgctggcctccaatgaagcctttaaaaagcaggcggagagtgctagtgaggcggccaagaagtacatggaggagaatgaccagctcaagaagggagctgctgttgacggaggcaagttggatgtcgggaatgctgaggtgaagttggaggaagagaacaggagcctgaaggctgacctgca

SEQ ID NO: 52673 - DNA, 1810 bp, Artificial Sequence
  derived and/or modified sequence
ctccgggacggtgtgccaggccggggccaagtcggaggcccctcgctctgggtgggcgctggggcccgcgagggctactgtaaggacccctggcttctgaggatactgcgtctagaactttctccgtatggggccttgaggtgcttggtcgagacctgcctttgcgcttggtcccgaatcctgccctctaggagtcgctcttgcgggcctccagcccaccggaggcgaagcggccccgggcggaaggccgctggatcctcgagggaggtgccggtttctctccgcgggcgccgtggggacggtgggaggcgggggcgtcggcagcgcttggactaggtgcggccttgggcctgcctggtagcggggatttgggcccgcagagcgcccgcctctgcggctgagttctgcctggcggggaagggagcgcccgatgggtgccgaggcgtcctcctcttggtgccctggcactgctcttcccgaagaacgcctttcagttaaacgggcgtcggaaatctcgggcttcctggggcagggatcgtcgggagaggccgctctggacgtgttgacacacgtgctggagggggcaggaaacaagctcacatcttcctgtgggaaaccttctagcaacaggatgagtctgcagtggactgcagttgccaccttcctctatgcggaggtctttgttgtgttgcttctctgcattcccttcatttctcctaaaagatggcagaagattttcaagtcccggctggtggagttgttagtgtcctatggcaacaccttctttgtggttctcattgtcatccttgtgctgttggtcatcgatgccgtgcgcgaaattcggaagtatgatgatgtgacggaaaaggtgaacctccagaacaatcccggggccatggagcacttccacatgaagcttttccgtgcccagaggaatctctacattgctggcttttccttgctgctgtccttcctgcttagacgcctggtgactctcatttcgcagcaggccacgctgctggcctccaatgaagcctttaaaaagcaggcggagagtgctagtgaggcggccaagaagtacatggaggagaatgaccagctcaagaagggagctgctgttgacggaggcaagttggatgtcgggaatgctgaggtgaagttggaggaagagaacaggagcctgaaggctgacctgcagaagctaaaggacgagctggccagcactaagcaaaaactagagaaagctgaaaaccaggttctggccatgcggaagcagtctgagggcctcaccaaggagtacgaccgcttgctggaggagcacgcaaagctgcaggctgcagtagatggtcccatggacaagaaggaagagtaagggcctccttcctcccctgcctgcagctggcttccacctggcacgtgcctgctgcttcctgagagcccggcctctccctccagtacttctgtttgtgcccttctgcttcccccattcccttccacagctcatagctcgtcatctcggcccttgtccacactctccaagcacattacaggggacctgattgctacacgttcagaatgcgtttgctgtcatcctgcttggcctggccaggcctggcacagccttggcttccacgcctgagcgtggagagcacgagttagttgtagtccggcttgcggtggggctgacttcctgttggtttgagcccctttttgttttgccctctgggtgttttctttggtcccgcaggagggtgggtggagcaggtggactggagtttctcttgagggcaataaaagttgtcatggtgtg

SEQ ID NO: 52674 - protein, 137 aa, Artificial Sequence
  derived and/or modified sequence
MDDSDTPTYYLQIEPQDGCHPGDSVERSVTCLPSASDENENQLDGDGHEHLTSSDSAMGKPQVSEQDSLNNNESCTLSCEVAAGENLQNTLCEASRDEQAFLGKDKKIPGKRSPRSKKGTAKKIPPDSRILFPGGGL

SEQ ID NO: 52675 - protein, 616 aa, Artificial Sequence
  derived and/or modified sequence
MDDSDTPTYYLQIEPQDGCHPGDSVERSVTCLPSASDENENQLDGDGHEHLTSSDSAMGKPQVSEQDSLNNNESCTLSCEVAAGENLQNTLCEASRDEQAFLGKDKKIPGKRSPRSKKGTAKKIPPGLFSGDIAPLMQEKVLSAVTYAVDDEEAAEVNANEQPEAPKLVLQSLFSLIRGEVEQLDSRALPLCLHQIAESYFQEEDYEKAMKFIQLERLYHEQLLANLSAIQEQWETKWKTVQPHTVTALRNSEKGFNGEDFERLTKICATHQDPLLSKHKIAAVEKSQERKCSTQLLVSEDPKEGGATTKESESKTCLGTESSKESQHTVEPLGSSPCCHQMDVQTDSPSLSVTAGKDHMEELLCSAEATLALHTQSSETAGSPSGPDSSEDACEDDSRLQLAQTEACQDVARIEGIAEDPKVFLSSKSKTEPLISPGCDRIPPALISEGKYSQAQRKELRLPLRDASEALPTDQLENNELNELQQPDLTDSDGKSPQAQADSDGSENVLCGNNQISDLGILLPEVCMAPEEKGDKDDQLNKETEDYLNSLLEGCLKDTEDSLSYEDNQDDDSDLLQDLSPEEASYSLQENLPSDESCLSLDDLAKRIEIAEVNQR

SEQ ID NO: 52676 - DNA, 414 bp, Artificial Sequence
  derived and/or modified sequence
atggatgattctgacacgccaacatattacttgcaaattgaaccccaagacggatgccatcctggagattccgtggagaggagtgttacttgcttgccgagcgcctctgacgagaatgagaaccagttagatggagacgggcacgagcacctgacctcctccgatagtgccatggggaaaccacaggtgtccgagcaggactctttgaataacaacgaatcttgcaccttgtcctgcgaggtagctgcaggcgagaaccttcagaatactctatgcgaggcctcccgcgatgaacaagctttcctcggcaaggacaaaaagattcctggcaagcgcagtcccagaagcaagaaaggtactgccaagaaaattcctccagactcgcgcattctattcccgggcggcgggctgtag

SEQ ID NO: 52677 - DNA, 1851 bp, Artificial Sequence
  derived and/or modified sequence
atggacgattctgacactccaacctactatcttcagattgagccacaggatgggtgtcatccaggtgactctgttgaaagatccgtgacttgccttccaagcgcttcagacgaaaacgaaaaccagctggatggagacggccatgagcacttaacgagtagcgatagtgcaatgggcaaacctcaagtctccgagcaagactcgctcaacaacaatgaaagttgcaccttaagttgtgaagttgccgctggggaaaatctccagaacactctgtgcgaagcctctagggatgagcaagcctttctgggtaaggataagaaaatacccggcaagcgctctcctcgatctaaaaagggaacggccaaaaagattcccccgggactgttcagcggagacatcgcacccctgatgcaagaaaaggttctgagcgctgtcacatacgccgttgatgatgaagaagctgctgaggttaacgccaatgagcaaccggaggctccaaagttggtgctgcagagtctcttctctctgatcagaggcgaggtggagcagctggactcaagagccctgccgctgtgcctgcaccagattgccgagtcctactttcaagaggaggattatgaaaaggcaatgaagttcattcagctcgagaggttgtaccacgaacaactgctggccaatctcagtgccattcaggagcagtgggagaccaagtggaagacagtgcagccccacaccgttaccgcgcttcgcaactcagagaaaggattcaacggcgaagattttgagcgcctgactaagatctgcgctactcaccaagacccccttctcagtaaacacaaaatcgccgccgtggaaaagtctcaagagaggaagtgttcaacacagttgcttgtctcagaggacccgaaggagggaggcgctaccacaaaggagtccgagagtaagacttgcctagggacagagagttccaaagagtcgcaacataccgtggagcccctgggttccagcccatgctgccaccagatggatgtgcagaccgactcgccaagtttatccgtgacagccggtaaggatcatatggaagaattgctttgctccgctgaagctaccctagccctgcacacccaatcgtctgagacggcaggctctccgagcggacctgatagtagcgaggacgcctgcgaggatgactctaggctgcagctcgcacaaacagaggcctgccaagacgtggcccgtatcgaagggattgccgaggaccctaaagtgttcctcagtagtaagagtaaaacggaaccactgatctctccaggatgcgatcggatcccaccagcattaatctccgaggggaaatatagccaggctcaacggaaagaattaagactgccattgcgcgatgcctccgaagctctgcctacggatcagttggagaacaatgaactgaacgagttacagcaacccgacttgaccgactccgatggcaagagccctcaagcacaggctgactccgacggttccgaaaacgtcctttgtggtaacaatcagattagcgacttaggcattttacttccggaagtgtgtatggcaccagaggagaaaggggacaaggacgaccagctcaataaggaaacagaagattatctgaactctctgctggaggggtgtctgaaagataccgaagactccctatcctatgaggacaatcaggacgacgattcagaccttctgcaagacctgtccccggaggaggccagctactctctgcaagagaacctccctagcgacgagtcctgtctgtccctggatgacctcgccaaaagaattgaaatcgctgaagtcaaccaacgatag

SEQ ID NO: 52678 - DNA, 414 bp, Artificial Sequence
  derived and/or modified sequence
atggatgacagcgacacccccacctactacctgcagatcgagccccaggacggctgccaccctggggacagcgtggagaggtctgtgacctgcctgcccagcgccagtgatgaaaatgaaaaccagctggatggagatggccacgagcacctgaccagcagtgacagcgccatgggcaagccccaggtgtctgagcaggacagcctgaacaacaatgaaagctgcaccctgagctgtgaggtggccgccggggagaacctgcagaacaccctgtgtgaggccagcagagatgagcaggccttcctgggcaaggacaagaagatccctgggaagaggagccccaggagcaagaagggcacagccaagaagatccccccagacagccgcatcctcttccctgggggcggcctgtag

SEQ ID NO: 52679 - DNA, 1851 bp, Artificial Sequence
  derived and/or modified sequence
atggatgacagcgacacccccacctactacctgcagatcgagccccaggacggctgccaccctggggacagcgtggagaggtctgtgacctgcctgcccagcgccagtgatgaaaatgaaaaccagctggatggagatggccacgagcacctgaccagcagtgacagcgccatgggcaagccccaggtgtctgagcaggacagcctgaacaacaatgaaagctgcaccctgagctgtgaggtggccgccggggagaacctgcagaacaccctgtgtgaggccagcagagatgagcaggccttcctgggcaaggacaagaagatccctgggaagaggagccccaggagcaagaagggcacagccaagaagatccccccaggcctcttcagcggggacatcgcccccctgatgcaggagaaggtgctgtctgctgtgacctatgctgtggatgatgaggaggccgctgaggtgaatgccaatgagcagcctgaggcccccaagctggtgctgcagagcctcttcagcctcatccggggggaggtggagcagctggacagccgggccctgcccctgtgcctgcaccagattgctgagagctacttccaggaggaggactatgagaaggccatgaagttcatccagctggagcggctgtaccacgagcagctgctggccaacctgagcgccatccaggagcagtgggagaccaagtggaagacagtgcagccccacacagtgacagccctgaggaacagcgagaagggcttcaatggagaagattttgagcggctgaccaagatctgtgccacccaccaggaccccctgctgagcaagcacaagattgctgctgtggagaagagccaggagaggaagtgcagcacccagctgctggtgtctgaggaccccaaggagggcggggccaccaccaaggagagcgagagcaagacctgcctgggcacagagagcagcaaggagagccagcacacagtggagcccctgggcagcagcccctgctgccaccagatggatgtgcagacagacagccccagcctgtctgtgacagctgggaaggaccacatggaggagctgctgtgcagcgctgaggccaccctggccctgcacacccagagcagcgagacagctggcagccccagcggccctgacagcagtgaagatgcctgtgaagatgacagccggctgcagctggcccagacagaggcctgccaggatgtggcccgcatcgagggcattgctgaggaccccaaggtgttcctgagcagcaagagcaagacagagcccctcatcagccctggctgtgaccgcatccccccagccctgatcagcgagggcaagtacagccaggcccagaggaaggagctgcggctgcccctgagagatgccagcgaggccctgcccacagaccagctggagaacaatgagctgaatgagctgcagcagcctgacctgacagacagtgatggcaagagcccccaggcccaggccgacagtgatggctctgaaaatgtgctgtgtggcaacaaccagatcagtgacctgggcatcctgctgcctgaggtgtgcatggcccctgaggagaagggggacaaggatgaccagctgaacaaggagacagaggactacctgaacagcctgctggagggctgcctgaaggacacagaggacagcctgtcctatgaggacaaccaggatgatgacagcgacctgctgcaggacctgagccctgaggaggccagctacagcctgcaggagaacctgcccagtgatgagagctgcctgagcctggatgacctggccaagagaattgaaattgctgaggtgaaccagaggtag

SEQ ID NO: 52680 - DNA, 414 bp, Artificial Sequence
  derived and/or modified sequence
atggacgacagcgacacccccacctactacctgcagatcgagccccaggatggttgccatcccggcgattctgtcgaacgaagcgtgacctgtctaccttctgctagcgacgaaaatgagaatcaactggatggtgacgggcacgagcatctcacatccagcgacagcgccatggggaagccacaggtttcagaacaggactccctcaacaacaatgagtcttgtaccttgagctgtgaggtcgctgctggtgaaaacctgcagaacaccctgtgcgaagctagtagggacgagcaggccttcctgggcaaggacaaaaaaatacctggaaaaagatcccctcgttccaaaaagggaacagccaagaaaattcctcctgactctcgcatcttatttcctggggggggcctgtag

SEQ ID NO: 52681 - DNA, 1851 bp, Artificial Sequence
  derived and/or modified sequence
atggacgacagcgacacccccacctactacctgcagatcgagccccaggacgggtgccaccccggcgactcagtggagcgcagtgttacctgcctcccttcagcttcggacgagaacgagaaccagttagacggagatggacacgagcacctaactagcagcgactcggcgatggggaagccccaggttagtgagcaggattccctgaacaataacgaaagttgtactctttcatgcgaggtcgctgccggtgaaaatctgcaaaacactctttgcgaagcctcacgggacgagcaggccttcctcgggaaggataagaagatacctggcaagagatctccgcgaagcaagaagggtaccgctaagaagattcctcccgggctgttttcaggcgatatcgctcctctcatgcaggaaaaggtcctctccgcagtcacctacgccgtggatgacgaggaggccgcggaagtcaacgccaacgaacaacctgaagcccctaagttagttctacagtctctgttcagcctgattcgtggcgaagtcgaacagttggactccagagctcttcccttgtgcctgcaccaaatcgctgagagttattttcaggaggaggactatgaaaaggccatgaaatttatacagctagagcggctgtatcacgaacagctcctggcgaacctgtcagccatccaagagcagtgggagacaaagtggaaaaccgtccaacctcataccgtgacggcgttgaggaactctgaaaagggcttcaatggggaagactttgagaggctgactaagatctgtgccacacatcaggatccgttactttctaagcacaaaatcgcggcagtggaaaagagccaggagcgaaaatgctccactcagctgctggtttccgaagaccccaaagaagggggggccactaccaaagaatctgaatcaaagacttgtctcggcactgaatcttccaaagagtcccagcatacagtcgaaccgctgggcagctccccttgttgccatcagatggacgttcagactgactccccctctctcagcgtgacagctggcaaagatcacatggaggaacttctctgttcagccgaggccacgctagccctgcacacccagtcgtcagagacagcagggtcccccagtggccccgattcctcagaagatgcctgcgaagatgactcacggctgcaactcgcgcagacggaagcctgccaggatgtcgctagaatcgagggcattgccgaagatccaaaggtctttctgagcagtaagtctaagacggagcctcttatctcccccggctgcgatagaattccccctgctcttatttccgaagggaagtattctcaggctcagagaaaggaattgcggctccctctgagagacgcctcagaggccttgcccactgaccaactggagaataacgagctcaatgagctgcagcagcccgacctcacggattctgacggaaagtcccctcaagcccaggcggactctgatggcagcgagaacgtgctctgtggtaacaatcagattagcgatctaggcatcctgttacccgaggtctgtatggccccagaggagaagggtgataaagacgaccagctcaataaagagactgaggactacctgaactcactgctcgagggatgcctgaaggatacagaggactctctctcctatgaggataatcaggacgatgacagcgacctgctgcaggatcttagccccgaggaggcttcctactctctgcaggaaaatcttccatcagacgaatcttgcctgagcctcgatgacctcgccaagagaatagagatcgcagaggtgaatcagcgctag

SEQ ID NO: 52682 - DNA, 414 bp, Artificial Sequence
  derived and/or modified sequence
atggacgatagtgacacaccaacgtattatctacagatcgaaccccaggacggttgtcatcccggtgattcggtggagagatctgtgacttgcctaccgagcgcctctgacgaaaatgagaatcagcttgatggtgacgggcacgaacacctgacctcttccgacagtgcgatgggaaaacctcaggtgtctgaacaggatagccttaacaataacgagtcctgtactctttcctgcgaggtggctgccggtgaaaacttacaaaatacgctgtgcgaggcatctcgcgacgaacaggccttcttgggaaaggacaagaagatcccaggcaaaaggagcccccgaagtaagaaaggcactgctaaaaaaataccccctgattccagaatcctgttcccaggagggggactatag

SEQ ID NO: 52683 - DNA, 1851 bp, Artificial Sequence
  derived and/or modified sequence
atggacgactcggatacccctacgtactacctgcagatcgaaccacaggatggctgccaccccggtgactccgtggaaaggagcgtgacttgtctgccgtctgcatcggatgagaatgagaatcagctagatggcgatggccatgagcatctgacttccagcgactctgcaatgggtaaaccgcaggtttcagaacaggactcactgaacaacaacgagtcttgcacactaagctgtgaggtggccgcaggagaaaacctgcagaacacattgtgtgaggcctctcgtgacgagcaggctttcctgggcaaagacaaaaagattccgggtaagagaagtcctcgaagtaagaagggcacggcgaagaagatcccaccaggcctcttttccggtgacatcgcgccactcatgcaagagaaggttctgagcgcagtcacttatgcagtcgacgatgaggaggctgcagaggtgaatgcaaatgagcaacctgaggcgcctaaactggtgctgcagtccttgttctctctgatccgcggagaagtcgaacagctggactcccgggcactccccctttgcctgcaccagattgcagagagctatttccaggaggaggattatgaaaaagcgatgaagtttatacagttggagcggctctaccatgagcagcttctcgctaatctgagtgccatccaagaacagtgggaaaccaagtggaaaacggtgcaacctcacacggtgacagccctgcggaactctgaaaaggggtttaatggcgaagatttcgaacgactaaccaagatttgcgcaacgcaccaagacccgctgctgtctaagcacaagatcgctgcagtggagaagtcccaggaacgcaaatgtagcacgcagcttctcgtctccgaagaccccaaggagggaggcgcaacaacaaaagagagtgaatccaagacgtgccttggcacagagtccagcaaggagagccagcatactgtggaacctctcggtagttcaccgtgctgccaccagatggacgtccaaactgattctccctccctgtcagtcactgccggaaaggatcacatggaggaactcctatgttccgccgaagcaaccctagcactacacactcagtcaagcgagaccgctggaagtccttccggccctgattcatccgaagacgcatgtgaggacgactcaagactgcaacttgcacagacggaagcctgccaggacgtggctcgcatagaaggaatcgcggaagacccaaaggtctttctgtcctccaaatctaagacggagcccctcatatcacccggatgtgaccggattcccccagccctaataagcgagggcaagtatagccaggcacaacggaaggagttgcgcctgcccctgcgggatgcctcagaagccctgcccacggatcagctcgagaacaatgagctcaatgagctccagcagcctgacctgactgactctgacggaaagtcaccacaggcgcaggctgactctgatggaagtgaaaatgtcctttgtggcaacaaccaaatcagtgacctgggtatccttctcccagaggtgtgcatggcccctgaagaaaagggagacaaagatgatcagctgaacaaagagacagaagattacctgaatagtctgttggagggctgtctgaaagacacagaagatagtctgagttacgaggacaaccaagatgacgactccgatttgctacaggacttgagccccgaagaggcgtcttatagcctccaagagaatctgcccagcgacgagtcttgcctaagtctcgatgacctcgcaaagcgaatcgagatcgctgaggttaatcagcgctag

SEQ ID NO: 52684 - DNA, 645 bp, Artificial Sequence
  derived and/or modified sequence
ggggcggaaaggcgagaggtgtctcctccaccggagccaggggagacccgagcaagctccgtgacagcacgtcggccgccatgtcgccgagtggggctggaaacagacccggcgcccagcggtagccctccttgcgcctccgattcccagacatggaaggtctttaatgtaactttaaatggttcaccaaaggatgctctaatggatgacagcgatactcctacatattatctgcaaatagaaccacaagatggatgtcatcctggtgacagcgtggaaaggagtgtgacctgtctgccttctgcatcagatgaaaatgaaaatcagcttgacggggacgggcatgagcatctgaccagcagtgacagtgcgatgggaaagccccaagtgtctgagcaggacagtctcaataataatgaaagctgcacattgagctgcgaggtggctgcaggtgagaacttgcaaaacaccctttgtgaagcctccagagatgaacaggccttcttgggaaaggacaaaaaaattcctggaaaaagaagtccaagaagcaaaaaagggactgctaagaagataccaccagatagcagaatcctatttccaggaggaggactatgagaaagcaatgaaattcattcagctagaacg

SEQ ID NO: 52685 - DNA, 2422 bp, Artificial Sequence
  derived and/or modified sequence
cgcgggccgccagcctccagccggccagccgcgaggggtgcgcagagggaggcggggcggaaaggcgagaggtgtctcctccaccggagccaggggagacccgagcaagctccgtgacagcacgtcggccgccatgtcgccgagtggggctggaaacagacccggcgcccagcggtagccctccttgcgcctccgattcccaggtgaggagaggaggagcgggatgcaggggacccgccggctcgcggccgggatggaaagcctttcggaagcctctcgctcctccccctgcgctgtcctcctccagccgcgcagcctctgccctccggacatggaaggtctttaatgtaactttaaatggttcaccaaaggatgctctaatggatgacagcgatactcctacatattatctgcaaatagaaccacaagatggatgtcatcctggtgacagcgtggaaaggagtgtgacctgtctgccttctgcatcagatgaaaatgaaaatcagcttgacggggacgggcatgagcatctgaccagcagtgacagtgcgatgggaaagccccaagtgtctgagcaggacagtctcaataataatgaaagctgcacattgagctgcgaggtggctgcaggtgagaacttgcaaaacaccctttgtgaagcctccagagatgaacaggccttcttgggaaaggacaaaaaaattcctggaaaaagaagtccaagaagcaaaaaagggactgctaagaagataccaccaggacttttttcaggagatattgcacctttaatgcaagaaaaagtactaagcgcagtcacatatgctgttgatgatgaagaagctgctgaagtaaatgctaatgagcagccagaggcgccaaagcttgttctgcagtctctgttttcacttatacgaggtgaagttgagcagttggattcaagagcacttcccctttgccttcatcagatagcagaatcctatttccaggaggaggactatgagaaagcaatgaaattcattcagctagaacgattgtatcatgagcaattgctcgcaaatctttctgccattcaagaacagtgggaaacaaaatggaaaactgtgcaaccacatacagttacggctctaaggaattcagaaaagggatttaatggtgaagattttgaacggcttacgaaaatttgtgcaacacatcaagatcctcttttatccaaacataagatagcagctgtggagaagtcccaggaaaggaaatgctccacgcagttactagtgtctgaagatccaaaggaaggaggagctaccaccaaagagtcagagagtaaaacttgtctcggcacagagtcaagtaaagaaagccaacatacagtggagcccctggggagcagtccctgctgtcatcagatggacgtgcaaacagattccccaagcctttcggtaactgcaggaaaggaccacatggaggagctgctctgcagcgctgaagccacgttagcgctccacacccagtcctccgagacagcagggagcccgtctgggccagactcttctgaggatgcttgtgaggatgacagtcgcttgcagctggctcaaacagaggcctgccaggatgtggccagaatagagggcattgctgaagaccctaaggtgtttctttccagcaagtcaaagacagagccgttgatttcaccaggctgtgaccgtatacctcctgcattgatttctgagggtaaatattcacaggctcagaggaaagaactccgtttgccacttcgggatgcttctgaggcgttgcccacagaccaacttgagaacaatgaattaaatgagctgcagcagcctgatcttacagacagtgatggaaaatcaccacaggcgcaggctgactcagacggttctgagaatgtgctctgtggaaataatcaaatatctgacttaggcatactgcttccagaggtgtgtatggccccagaggaaaagggagataaagacgaccaactcaacaaagaaacagaagactatttgaacagccttttagaaggatgtttaaaagatactgaagattccctttcctatgaagataaccaagacgacgactccgatctccttcaagatctctctcctgaagaagcatcctatagtctccaggagaatctgccttctgatgagagctgtctttctcttgatgatcttgccaaaaggatagagattgcagaggtaaatcagagatgaagtacaattaaaagtaaaatggcatttaaaaaacatatatatgtattaaatattgccttgtttttgtaagttttcccttgtctcaaacatgagggaaaattctagttaacgtaagcttttaattattagtagtttttacatttgtatgtattgaataaaatgacttttaatcattgcaatgttcatactac

SEQ ID NO: 52686 - DNA, 414 bp, Artificial Sequence
  derived and/or modified sequence
atggacgacagcgacacccccacctactacctgcagatcgagccccaggacggctgccaccccggcgacagcgtggagagaagcgtgacctgcctgcccagcgccagcgacgagaacgagaaccagctggacggcgacggccacgagcacctgaccagcagcgacagcgccatgggcaagccccaggtgagcgagcaggacagcctgaacaacaacgagagctgcaccctgagctgcgaggtggccgccggcgagaacctgcagaacaccctgtgcgaggccagcagagacgagcaggccttcctgggcaaggacaagaagatccccggcaagagaagccccagaagcaagaagggcaccgccaagaagatcccccccgacagcagaatcctgttccccggcggcggcctgtag

SEQ ID NO: 52687 - DNA, 1851 bp, Artificial Sequence
  derived and/or modified sequence
atggacgacagcgacacccccacctactacctgcagatcgagccccaggacggctgccaccccggcgacagcgtggagagaagcgtgacctgcctgcccagcgccagcgacgagaacgagaaccagctggacggcgacggccacgagcacctgaccagcagcgacagcgccatgggcaagccccaggtgagcgagcaggacagcctgaacaacaacgagagctgcaccctgagctgcgaggtggccgccggcgagaacctgcagaacaccctgtgcgaggccagcagagacgagcaggccttcctgggcaaggacaagaagatccccggcaagagaagccccagaagcaagaagggcaccgccaagaagatcccccccggcctgttcagcggcgacatcgcccccctgatgcaggagaaggtgctgagcgccgtgacctacgccgtggacgacgaggaggccgccgaggtgaacgccaacgagcagcccgaggcccccaagctggtgctgcagagcctgttcagcctgatcagaggcgaggtggagcagctggacagcagagccctgcccctgtgcctgcaccagatcgccgagagctacttccaggaggaggactacgagaaggccatgaagttcatccagctggagagactgtaccacgagcagctgctggccaacctgagcgccatccaggagcagtgggagaccaagtggaagaccgtgcagccccacaccgtgaccgccctgagaaacagcgagaagggcttcaacggcgaggacttcgagagactgaccaagatctgcgccacccaccaggaccccctgctgagcaagcacaagatcgccgccgtggagaagagccaggagagaaagtgcagcacccagctgctggtgagcgaggaccccaaggagggcggcgccaccaccaaggagagcgagagcaagacctgcctgggcaccgagagcagcaaggagagccagcacaccgtggagcccctgggcagcagcccctgctgccaccagatggacgtgcagaccgacagccccagcctgagcgtgaccgccggcaaggaccacatggaggagctgctgtgcagcgccgaggccaccctggccctgcacacccagagcagcgagaccgccggcagccccagcggccccgacagcagcgaggacgcctgcgaggacgacagcagactgcagctggcccagaccgaggcctgccaggacgtggccagaatcgagggcatcgccgaggaccccaaggtgttcctgagcagcaagagcaagaccgagcccctgatcagccccggctgcgacagaatcccccccgccctgatcagcgagggcaagtacagccaggcccagagaaaggagctgagactgcccctgagagacgccagcgaggccctgcccaccgaccagctggagaacaacgagctgaacgagctgcagcagcccgacctgaccgacagcgacggcaagagcccccaggcccaggccgacagcgacggcagcgagaacgtgctgtgcggcaacaaccagatcagcgacctgggcatcctgctgcccgaggtgtgcatggcccccgaggagaagggcgacaaggacgaccagctgaacaaggagaccgaggactacctgaacagcctgctggagggctgcctgaaggacaccgaggacagcctgagctacgaggacaaccaggacgacgacagcgacctgctgcaggacctgagccccgaggaggccagctacagcctgcaggagaacctgcccagcgacgagagctgcctgagcctggacgacctggccaagagaatcgagatcgccgaggtgaaccagagatag

SEQ ID NO: 52688 - protein, 577 aa, Artificial Sequence
  derived and/or modified sequence
MTELAGASSSCCHRPAGRGAMQSVLHHFQRLRGREGGSHFINTSSPRGEAKMSITSDEVNFLVYRYLQESGFSHSAFTFGIESHISQSNINGTLVPPAALISILQKGLQYVEAEISINEDGTVFDGRPIESLSLIDAVMPDVVQTRQQAFREKLAQQQASAAAAAAAATAAATAATTTSAGVSHQNPSKNREATVNGEENRAHSVNNHAKPMEIDGEVEIPSSKATVLRGHESEVFICAWNPVSDLLASGSGDSTARIWNLNENSNGGSTQLVLRHCIREGGHDVPSNKDVTSLDWNTNGTLLATGSYDGFARIWTEDGNLASTLGQHKGPIFALKWNRKGNYILSAGVDKTTIIWDAHTGEAKQQFPFHSAPALDVDWQNNTTFASCSTDMCIHVCRLGCDRPVKTFQGHTNEVNAIKWDPSGMLLASCSDDMTLKIWSMKQEVCIHDLQAHNKEIYTIKWSPTGPATSNPNSNIMLASASFDSTVRLWDIERGVCTHTLTKHQEPVYSVAFSPDGKYLASGSFDKCVHIWNTQSGNLVHSYRGTGGIFEVCWNARGDKVGASASDGSVCVLDLRK

SEQ ID NO: 52689 - protein, 75 aa, Artificial Sequence
  derived and/or modified sequence
MSITSDEVNFLVYRYLQESGFSHSAFTFGIESHISQSNINGTLVPPAALISILQKGLQYVEAEISINEDGTVFDG

SEQ ID NO: 52690 - protein, 59 aa, Artificial Sequence
  derived and/or modified sequence
MTELAGASSSCCHRPAGRGAMQSVLHHFQRLRGREGGSHFINTSSPRGEAKMSITSDEV

SEQ ID NO: 52691 - protein, 80 aa, Artificial Sequence
  derived and/or modified sequence
MTELAGASSSCCHRPAGRGAMQSVLHHFQRLRGREGGSHFINTSSPRGEAKMSITSDEVNFLVYRYLQESGFSHSAFTFG

SEQ ID NO: 52692 - DNA, 592 bp, Artificial Sequence
  derived and/or modified sequence
tattttgggggtggttggaggcggtggcggcggcggcgaggaggggaatttccttgtgcctccattcccgggaggggggagcggcgttggaggccaccgtttccagcatcaacaacagcaacttgtgattggcggtgaccggatattcagttgcacatccccacatcaatgcactgccaatgatgaggaaactgaggccttggactagaacagaggtctcctgactcagtccaggactctttctattacatcatgcggcctgatatttgtctttatggaactcagcaacatcacatacaggtagagacggggtttcaccgtgttagccaggatggtctcaatctcctgacctcgtgatctgtccgccttggcctcccaaaggtttgggattacagacgtgagccaccgcacccagccgatattgttttattttaatcaaggcaaaactggttatatcctgtgttgtgacctcatggtttaagtgggaataaagatgagtataagcagtgatgaggtcaacttcttggtatatagatacttgcaagagtcaggattttctcattcagcatttacctttggtatagaaagccat

SEQ ID NO: 52693 - DNA, 180 bp, Artificial Sequence
  derived and/or modified sequence
atgaccgagctggccggcgccagcagcagctgctgccacagacccgccggcagaggcgccatgcagagcgtgctgcaccacttccagagactgagaggcagagagggcggcagccacttcatcaacaccagcagccccagaggcgaggccaagatgagcatcaccagcgacgaggtgtag

SEQ ID NO: 52694 - DNA, 243 bp, Artificial Sequence
  derived and/or modified sequence
atgaccgagctggccggcgccagcagcagctgctgccacagacccgccggcagaggcgccatgcagagcgtgctgcaccacttccagagactgagaggcagagagggcggcagccacttcatcaacaccagcagccccagaggcgaggccaagatgagcatcaccagcgacgaggtgaacttcctggtgtacagatacctgcaggagagcggcttcagccacagcgccttcaccttcggctag

SEQ ID NO: 52695 - DNA, 1734 bp, Artificial Sequence
  derived and/or modified sequence
atgaccgaactagctggtgcatcgtcgtcctgttgtcatcgcccggctggacgcggggccatgcagtctgtcctgcaccacttccagagactgcgaggaagggagggaggtagccacttcattaacaccagctcccctcggggagaagccaagatgtcaatcaccagcgacgaagtgaattttctggtgtataggtacctgcaggaatcagggttctcacactccgcctttacgttcgggatcgaatcccatattagccagtctaacatcaacggtactctagtaccacccgccgccctgatctccattctgcaaaaggggttgcagtacgtggaagcagagattagcattaatgaagatggcactgtttttgacgggcgccctattgagtcgttgagcctcatcgatgcagtaatgcccgacgtcgtccagacccgacagcaagctttcagggaaaagctggcacagcagcaagctagtgccgctgccgcagctgcagccgccacagctgccgctaccgccgccactactaccagcgctggcgtgagtcaccagaacccatctaaaaacagagaggcgaccgtgaatggcgaagagaatagggcccatagcgtgaataaccatgctaaaccaatggaaatcgatggggaggtggagattcccagttcaaaggccacagtccttcgcggtcacgaatcggaagtcttcatctgcgcctggaatcctgtgtccgatctcctggcttccggcagcggagactcaaccgcccgaatctggaatcttaatgaaaactcaaacggaggatccacccaattggtgctgcgccactgcatacgagaaggaggccacgacgtcccgagtaataaggacgtcacgtctcttgattggaacaccaacggaactttgctggctacgggatcctatgacggcttcgcccgcatctggaccgaggatggtaacctggcatcaactttgggccagcataaaggccccatctttgcactaaagtggaatcggaaggggaactatatcctttcagccggcgtggataagactaccattatctgggacgcgcacacaggtgaagccaagcagcagttcccattccatagtgcccccgcgcttgatgtcgactggcagaacaataccacatttgcatcatgtagtaccgatatgtgtatccacgtgtgtcggttaggatgtgaccggcccgtgaagacattccaggggcacactaacgaagtgaacgccatcaagtgggatccatctgggatgctcctggcctcgtgtagtgatgacatgaccttgaaaatctggtccatgaaacaggaggtctgcatccacgacttacaggcccacaacaaggaaatttataccatcaaatggtcccctaccggccccgccacttccaaccccaacagcaacatcatgcttgcttcagcatcttttgatagtaccgtgcgcttgtgggatattgaaagaggggtgtgcacgcacaccctcactaagcaccaggaacccgtgtactccgtcgcattctcccccgatggcaagtatctggcttccggctcttttgataagtgtgtgcatatttggaatactcagtccggtaacctagtccactcgtaccgcggcacgggcgggattttcgaggtctgctggaacgctaggggagataaggtgggggccagcgcctcagatggctcagtctgcgtgttggatctgcgcaagtag

SEQ ID NO: 52696 - DNA, 1734 bp, Artificial Sequence
  derived and/or modified sequence
atgactgagctggcaggagcaagctctagctgttgtcatagaccagcagggcgcggggctatgcagtccgtgcttcatcatttccagcgcctgcggggccgcgagggcggctcacacttcataaataccagcagtcccaggggggaggctaagatgtccataacttcagatgaagtgaactttctggtctataggtatctccaggaatctggcttttcacattctgcttttacatttggaatcgaaagccacatatcccagagtaacattaatggcactctcgtgcctcctgctgcgctgattagcattctgcagaaagggctgcaatacgtggaggctgagatcagcatcaacgaagacggtacagtatttgacgggagaccaatagagtcgctgagtctaattgatgctgtgatgcccgacgtcgtccagacacggcaacaggcctttcgggagaaactggctcagcagcaggcctcagcggcagcggccgccgccgctgccaccgccgccgctactgcagctactaccacctccgctggtgtctctcaccagaacccctctaaaaatagggaggctactgtcaacggagaagagaacagggctcacagtgtcaacaatcatgctaagcccatggaaatcgatggagaggtggagattcctagcagcaaggcgactgttctccggggccatgagtccgaggttttcatctgcgcctggaatcctgtatcggacctgctggcttcagggagcggagactctacagcaagaatctggaacctgaacgagaattcaaacgggggctctacacagctggttctgagacattgcatcagagaaggcggtcatgacgtcccttcaaataaggatgtgacgagtttagattggaatacaaatggcaccctgcttgccaccgggagttacgacggctttgcccgcatctggactgaggacggaaacctggcctccacactcggtcagcacaagggtcctatttttgccctgaagtggaaccgcaaaggcaattatatcttgtcggccggagttgacaaaacaacgattatctgggacgcccatacgggggaggctaagcagcagtttccatttcactctgctcctgctttagacgtagattggcagaataacacaacatttgcttcttgcagcaccgatatgtgtatccatgtctgtcggctgggatgcgatcggccggtcaagacctttcagggccacacaaatgaggtgaatgccattaaatgggacccttcggggatgctactggcctcctgctcagacgacatgacccttaaaatttggtccatgaagcaggaggtgtgcattcacgacctgcaggcccacaataaggaaatctacacaatcaaatggagtcccaccggcccagccaccagtaaccctaactctaacatcatgctggctagcgcatcctttgactcaaccgtgcgattgtgggatattgagagaggcgtttgcacacatactctgacaaagcaccaggagccagtgtatagcgtcgccttctcacctgacgggaagtatttggccagcggatcattcgacaagtgcgtgcacatatggaatacacagtccggcaatctcgtgcactcttaccggggtacaggcggcatctttgaagtatgctggaacgcaaggggcgataaggtcggcgcaagcgcttctgacggcagcgtatgcgtactggacctgcgcaaatag

SEQ ID NO: 52697 - DNA, 180 bp, Artificial Sequence
  derived and/or modified sequence
atgaccgagctggccggagccagttcgagttgctgccaccggcccgccggccgaggggctatgcagagcgtgctgcaccatttccagcggctacggggacgagaggggggctcccacttcatcaacacaagctcgccaaggggggaagccaaaatgtccattacctctgacgaggtgtag

SEQ ID NO: 52698 - DNA, 243 bp, Artificial Sequence
  derived and/or modified sequence
atgactgaattggccggggcttcctcctcatgctgccatcggcccgccggcagaggtgccatgcagtctgtcctgcaccattttcagcgcttaaggggtcgggaaggcgggtcgcattttatcaatacaagctcaccgcgcggtgaggccaagatgtctatcacttcggatgaagttaatttcctggtgtaccgctatctgcaggaatccggcttttctcactcagcattcacatttggttag

SEQ ID NO: 52699 - DNA, 1734 bp, Artificial Sequence
  derived and/or modified sequence
atgacagagctggccggggccagcagcagctgctgccacaggcctgctggccgcggggccatgcagagcgtgctgcaccacttccagaggctgcggggccgggagggcggcagccacttcatcaacaccagcagccccagaggagaggccaagatgagcatcaccagtgatgaggtgaacttcctggtgtaccgctacctgcaggagagcggcttcagccacagcgccttcacctttggaattgagagccacatcagccagagcaacatcaatggcaccctggtgcccccagctgccctgatcagcatcctgcagaagggcctgcagtatgtggaggccgagatcagcatcaatgaagatggcaccgtgtttgatggccggcccatcgagagcctgagcctgattgatgctgtgatgccagatgtggtgcagacccggcagcaggccttccgggagaagctggcccagcagcaggccagcgctgctgctgctgctgctgctgccacagctgctgccacagctgccaccaccaccagcgctggggtgagccaccagaaccccagcaagaaccgggaggccaccgtgaatggagaagaaaatagagcccacagcgtgaacaaccacgccaagcccatggagattgatggagaggtggagatccccagcagcaaggccaccgtgctgcggggccatgaaagtgaggtgttcatctgtgcctggaaccctgtgtctgacctgctggccagcggcagcggggacagcacagcccgcatctggaacctgaatgaaaacagcaatggaggcagcacccagctggtgctgcggcactgcatccgggagggcggccatgatgtgcccagcaacaaggatgtgaccagcctggactggaacaccaacggcaccctgctggccaccggcagctatgatggctttgcccgcatctggacagaagatggcaacctggccagcaccctgggccagcacaagggccccatctttgccctgaagtggaacaggaagggcaactacatcctgtctgctggggtggacaagaccaccatcatctgggatgcccacactggagaggccaagcagcagttccccttccacagcgccccagccctggatgtggactggcagaacaacaccacctttgccagctgcagcacagacatgtgcatccacgtgtgccgcctgggctgtgacaggcctgtgaagaccttccagggccacaccaatgaggtgaatgccatcaagtgggaccccagcggcatgctgctggccagctgcagtgatgacatgaccctgaagatctggagcatgaagcaggaggtgtgcatccatgacctgcaggcccacaacaaggagatctacaccatcaagtggagccccactggacctgccaccagcaaccccaacagcaacatcatgctggccagcgccagctttgacagcacagtgcggctgtgggacatcgagcggggcgtgtgcacccacaccctgaccaagcaccaggagcctgtgtacagcgtggccttctccccagatggcaagtacctggccagcggcagctttgataaatgtgtgcacatctggaacacccagagcggcaacctggtgcacagctaccggggcaccggcggcatctttgaggtgtgctggaatgcccggggggacaaggtgggcgccagcgccagtgatggctctgtgtgtgtgctggacctgaggaagtag

SEQ ID NO: 52700 - DNA, 180 bp, Artificial Sequence
  derived and/or modified sequence
atgacagagctggccggggccagcagcagctgctgccacaggcctgctggccgcggggccatgcagagcgtgctgcaccacttccagaggctgcggggccgggagggcggcagccacttcatcaacaccagcagccccagaggagaggccaagatgagcatcaccagtgatgaggtgtag

SEQ ID NO: 52701 - DNA, 243 bp, Artificial Sequence
  derived and/or modified sequence
atgacagagctggccggggccagcagcagctgctgccacaggcctgctggccgcggggccatgcagagcgtgctgcaccacttccagaggctgcggggccgggagggcggcagccacttcatcaacaccagcagccccagaggagaggccaagatgagcatcaccagtgatgaggtgaacttcctggtgtaccgctacctgcaggagagcggcttcagccacagcgccttcacctttggatag

SEQ ID NO: 52702 - DNA, 1734 bp, Artificial Sequence
  derived and/or modified sequence
atgaccgagctggccggcgccagcagcagctgctgccaccggcccgctggccgcggcgccatgcagtcggtccttcatcattttcaacgcctcagagggcgtgagggtgggagtcacttcattaatactagttccccacgcggagaggccaagatgtcaataacctccgatgaggttaacttcttggtgtacagatatcttcaggaatctgggttctcccactccgcttttacattcggaattgaaagtcatatttctcagtcgaacatcaacggtacgctggtccctccagccgccttaatctctatccttcagaagggcttgcagtacgtggaagctgaaatctccatcaatgaggacggtacagtgttcgacggtagaccaatagaaagcttgtccctcatcgatgccgttatgccagacgtcgtccagactcgtcaacaagcattcagggaaaaactggcccaacaacaagcatctgccgcggcggcagctgccgctgcaaccgccgcggccaccgcagctaccacgacctctgcaggagtaagtcatcagaatccatcaaaaaatcgggaggccacagtcaatggcgaagaaaacagggcccacagcgtcaataatcacgccaaacccatggaaatcgatggtgaagtagaaattccatcaagtaaagccaccgtgctgagaggacatgagtccgaagtttttatctgcgcgtggaatcctgtctccgacctcctagcttcaggttccggggacagcaccgcccggatctggaacctgaatgagaactccaacggcggatcaacccagctagtcctacgccactgtatcagggagggagggcacgatgtgccgtccaataaggacgtcacaagtctcgattggaacactaatggcaccttgctggcaactggctcctacgatggatttgccaggatctggactgaggatggtaaccttgcgtctactctgggtcagcacaagggcccaattttcgcactgaaatggaacagaaagggcaactacatactgtctgccggcgttgataagacgaccatcatttgggatgcccacactggcgaggctaagcaacagtttcctttccacagcgcccccgcgttagacgtggattggcagaataacacaaccttcgcttcctgtagcaccgacatgtgcatccacgtttgccgcctagggtgcgataggcccgttaaaaccttccagggacatacaaatgaggtgaacgccatcaaatgggatccatccggcatgctgttagcctcttgctctgatgacatgacactgaagatttggagtatgaagcaggaggtgtgtattcacgacctccaagcacataataaggagatctatacaatcaaatggtctccgactggacccgccacgtccaacccaaattcaaacataatgctggcctccgcttctttcgattcaacagtcagactctgggatatcgagaggggcgtgtgtactcataccttgacgaaacatcaggagcccgtgtacagcgttgcgttcagcccggatggaaaatatctggccagtggaagcttcgataaatgcgttcatatctggaacacccagtccggcaatctcgtgcattcctatcggggaaccgggggaattttcgaggtgtgttggaacgcacgcggcgataaagtaggggcctcggcttccgacggaagcgtgtgcgtcctggatttacgaaaatag

SEQ ID NO: 52703 - DNA, 1734 bp, Artificial Sequence
  derived and/or modified sequence
atgaccgagctggccggcgccagcagcagctgctgccaccggcccgccgggcgcggagccatgcagtctgtcctgcaccatttccaaaggctgagggggcgtgagggaggcagtcattttatcaatacctcatcccctaggggggaggccaaaatgtctataacgtcagatgaggtgaacttcttagtgtacaggtatctgcaagaaagtggtttcagtcactctgctttcacattcggcattgagagccatatttcccagtcaaacatcaatggcacattggtccctccagctgcgcttatttcaattttgcagaagggactgcagtacgtggaagctgagatctcaataaacgaagatggtaccgtcttcgatggccgccctatcgaatcgctgtccctaatcgatgccgtaatgcccgatgtggtccagacacgacagcaggctttcagagagaagcttgctcagcagcaggccagtgctgccgctgccgccgccgctgcaaccgccgctgcaactgccgccactacaacttcagccggcgtgtcccaccagaatccctccaagaatcgcgaggctacggtgaacggagaggagaacagggcccatagcgttaacaatcacgcaaagccaatggagatcgatggggaggtggaaatcccctccagcaaggccaccgtgctcagagggcacgaaagcgaagttttcatctgtgcctggaaccccgtttccgatctcctggcttccgggtctggggatagcacagcccggatttggaatctcaacgaaaatagtaatgggggaagcacacaactcgtgctcaggcactgcatcagggagggaggacacgacgtgccgagcaataaagacgtgactagcctggattggaacacaaacggcacactgctggcgacaggtagctacgatggatttgccaggatttggaccgaagatggcaatcttgcaagtacactcggccaacacaaagggcccatcttcgcgctgaagtggaataggaagggcaactacattctttcagcaggggtggacaagactaccatcatctgggacgcccacactggtgaggccaagcaacaatttccattccactccgctcctgcgctggacgtcgattggcagaacaacacaacctttgcctcctgctccactgatatgtgtattcatgtgtgccgactggggtgcgacagacccgttaaaacgtttcaagggcacacaaatgaagttaacgccattaagtgggatccttcaggaatgctgcttgcgagctgtagtgatgatatgacactcaaaatttggagcatgaagcaggaagtgtgtatccacgacctgcaggcacataataaagaaatatatactataaaatggtcgccgactgggcccgcaacgagcaatcccaactcaaacattatgctcgcctcagcctcatttgactctacagtgcgactctgggacatagagcgaggcgtctgtacccacaccctgactaaacaccaagagccggtatatagcgtggccttcagccctgatggcaaatatctggcatccggctctttcgacaagtgcgtccatatctggaatactcagagcggtaatctggttcattcttatcgaggcacggggggcatcttcgaagtctgctggaacgccagaggtgacaaagttggcgctagcgctagtgatggatccgtgtgcgtgctcgacctgagaaaatag

SEQ ID NO: 52704 - DNA, 180 bp, Artificial Sequence
  derived and/or modified sequence
atgaccgagctggccggcgccagcagcagctgctgccaccggcccgctggtcgcggtgcaatgcagtctgttttacatcatttccaacggctcagagggagggaaggcgggagtcatttcattaacacaagcagcccccgcggcgaagctaaaatgtccattacgtctgacgaggtctag

SEQ ID NO: 52705 - DNA, 243 bp, Artificial Sequence
  derived and/or modified sequence
atgaccgagctggccggcgccagcagcagctgctgccaccggcccgctggccgcggcgctatgcagtccgttctgcaccatttccagcggcttagaggccgggaagggggatcccactttattaatacctccagccctcggggtgaagcaaaaatgtccatcacttcagacgaagtgaacttcttggtgtatcgatacttgcaggagtcaggcttctctcattccgccttcactttcggctag

SEQ ID NO: 52706 - DNA, 1734 bp, Artificial Sequence
  derived and/or modified sequence
atgaccgaactagctggagcttccagtagctgctgccacaggcctgcagggagaggcgctatgcaatccgttctgcaccattttcagcgattacgcggacgcgaggggggtagccactttatcaatactagtagccccagaggagaagccaaaatgtcaatcacatcggacgaggtgaatttcttggtgtacaggtatctgcaggagagtggcttctcccactctgccttcacgttcggtatcgaatctcatatctcccagtccaacataaacgggactttagtgccccctgccgcactgatatccatcctacagaaaggtcttcagtacgtggaggcggagattagcataaacgaagatggaactgtgttcgacgggcgtccaatcgagagcctgtctctgatcgacgcagtgatgcccgatgtcgtccagacgaggcagcaggccttccgggagaaattagcacaacagcaggcaagcgctgctgctgctgccgcagcagccacagctgcagctacggccgctacgaccacaagcgcaggagtcagccaccaaaatccttcaaagaaccgggaagcgactgttaacggggaggagaatagagcccattccgtgaataaccacgcaaaacccatggagattgatggcgaggttgagattcctagttcaaaagcaaccgtccttcgagggcacgagtccgaagttttcatctgcgcgtggaacccagtctcagatcttctcgcgagtggctcaggcgattccactgctaggatttggaacctgaatgagaattccaacgggggatctactcagctggtgttgcgccactgcatcagagaggggggtcatgacgttccgagcaacaaagatgtaacaagcctggattggaatacaaatggaacattattggcgactggaagctacgatggcttcgctagaatatggactgaggatgggaacttggcatcgactctcggacaacataaaggaccaatttttgctctgaagtggaaccgcaaaggaaattatatcctgtccgccggagtggataaaacaaccattatctgggacgctcataccggcgaagcaaagcaacaattcccttttcactcagcacctgcccttgacgttgattggcagaataatacaacttttgcatcatgctcaacagatatgtgtatccacgtttgccgcctaggatgcgacagacctgtcaaaaccttccaggggcataccaatgaagtgaacgctatcaaatgggacccgagtgggatgttgcttgcctcatgtagtgacgacatgactttgaaaatatggagcatgaagcaagaggtgtgcattcatgatctgcaggcgcacaataaggagatttacaccatcaagtggtctcctaccggcccagcaacctctaatccgaactcaaacatcatgctcgccagtgcttcctttgatagcaccgtgcgcctgtgggacatcgagaggggcgtgtgcacacataccttgacgaagcatcaagagcccgtgtactctgtcgcattctcccccgacggcaaatacctggcatccggttctttcgataagtgcgtccacatctggaacactcagagtggcaatctggtacattcctataggggcactgggggaatcttcgaagtatgttggaatgctcgcggagacaaggtaggagcgtcagcatcggatggttctgtttgcgtattggatctgcgtaaatag

SEQ ID NO: 52707 - DNA, 1734 bp, Artificial Sequence
  derived and/or modified sequence
atgactgaactggctggagcaagctcttcgtgctgccaccgaccagctgggcgaggagcaatgcagtcggtgctgcaccactttcagcgcctgcgaggtagagagggcggttctcactttattaataccagctcaccacggggtgaggctaaaatgtccataacctccgatgaggtaaacttcttggtgtaccgttatcttcaagagagcggctttagccactcagcctttacttttggtatagaaagccacatcagtcagtcaaatatcaatgggacgttggtaccccctgcagcccttatcagcatcctccagaagggattgcagtatgtcgaagccgaaatttcaatcaacgaggatggcaccgtctttgacggcaggccaatagaaagcctatctctcatcgacgccgtgatgccagacgttgtgcagactcgccagcaagccttccgggagaagctggcacagcaacaagcctctgcagctgctgcggctgctgccgcaacagccgcagccaccgccgcaaccacaacctccgccggtgtgagccaccagaacccatcaaagaatagggaagcaaccgtcaacggagaagagaacagagcacacagcgtgaataaccatgcaaaaccgatggagatcgatggggaagtcgaaattccctccagtaaagcaaccgtgctgagaggccatgaaagtgaagttttcatctgcgcctggaatccagttagtgatctccttgcatctgggtcgggtgactcaacagcgcgaatctggaatctaaatgaaaattcaaatggcggatctactcagctagtgctgcgccattgcattcgggaaggaggccatgacgtcccctccaacaaggacgtgaccagcctggactggaacacgaacggcactctgctggccacaggcagttatgacggcttcgctcggatttggaccgaggatggcaacctggcgtcgaccctcggccagcataagggccctatctttgccctgaagtggaataggaaaggaaattacattttatccgcgggagtcgacaaaacaacgatcatttgggacgctcacacaggggaggccaagcagcagtttcccttccattctgctcctgctctggacgtagattggcaaaacaatactacttttgcgtcgtgcagtacagacatgtgcatacatgtgtgccgcctagggtgcgataggcctgtaaaaaccttccaagggcatacgaatgaagtcaacgctattaagtgggatccctccggaatgttgctggcttcctgctcagacgatatgacacttaagatctggtccatgaaacaggaagtgtgtatccatgaccttcaggcccacaacaaagagatttacacaatcaaatggagtcccacaggccctgccacttccaaccccaactcaaatatcatgctagccagcgcttcattcgactctacagtgagattgtgggatattgaaaggggcgtgtgtactcataccctgacaaagcaccaggaaccagtatatagcgttgcatttagcccagacggcaagtatctggcctcaggttcatttgacaaatgcgtgcatatatggaacacacagtccggaaatctggtgcacagctatcgtggcacaggcggaatattcgaggtgtgctggaatgccaggggcgataaggtcggggcttccgctagcgacgggagcgtctgcgtgctggacctgcggaaatag

SEQ ID NO: 52708 - DNA, 180 bp, Artificial Sequence
  derived and/or modified sequence
atgaccgagctggccggagcaagttcttcatgttgccatcggccagccggtcgtggtgccatgcaatctgtactgcaccacttccagaggttgagaggcagggaagggggatctcatttcatcaatacgagttctccaaggggggaagctaagatgtcaattacttctgacgaagtttag

SEQ ID NO: 52709 - DNA, 243 bp, Artificial Sequence
  derived and/or modified sequence
atgaccgagttagccggtgcgtcctcctcctgctgtcacaggcctgcaggtcggggagcaatgcaaagtgtgctgcaccattttcagaggcttcgtggcagagagggcggtagccacttcataaacaccagttcacccaggggagaagctaagatgagtattactagcgacgaagtgaattttctggtctacagatatttgcaggaaagcgggttctcccattccgcttttaccttcggctag

SEQ ID NO: 52710 - DNA, 5866 bp, Artificial Sequence
  derived and/or modified sequence
gggccggcggcgggggcggacccctggcggtcctcctggctggggtccgcgcgctcgcggcagctccccgtggaggtcactgtccgtgccagtccctcccgctgtcccgccctctcccgctgccgccgccgccgccgccgcgcccgcctcagcgcccccactccgcgcttgggagcgaggagccgccagcgcccccgccccgccgccgccgcagcgccctcaggccgccattcgccaccgaaactttccagcgcccgcgctctctccgggactcggcggcggcggggcgggggcggcccgggggcggcgcgcggctgctccggggcgccgggccctcttcggccgccgcacggccgggactcggaggctgccggctggagggaggttcggagcgcggccgggcgcgcggcgccgccacaagttgcgctgctcgcgacgagatttccgtgagggtggaagaaaatcataccatatcagatgcctcgcagagcaccaggcccaccgtgaaaggctggtccctgcagacggcttcccatttttatgaccggatgctgggaagcctgctggtccacaggtccatacatgaagtcaccataaggagccctggcctccttgcagaaacatcgaggtgacatgtagcatgaccgagctcgctggcgcctcttcatcgtgctgccaccgccctgcaggaagaggggccatgcagtcagtcttgcaccactttcaacgtttgcgagggagagagggtggttcccacttcatcaacacctcatcgccgcgaggtgaggctaagatgagcataaccagtgacgaggtgaactttctggtgtatcggtatctccaggagtcaggtttttcccactcggctttcacgtttgggattgagagccacatcagccagtccaacatcaatgggacgctagtgccaccggccgccctcatctccattctccagaagggcctgcagtatgtagaggccgagatcagtatcaacgaggatggcacagtgttcgacggccgccccatagagtccctgtcactgatagacgccgtgatgcccgacgtggtgcagacgcggcagcaggcattccgagagaagctcgctcagcagcaagccagtgcggcggcggcggcggctgcggccacggcagcagcgacagcagccaccacgacctcagccggcgtttcccaccaaaatccatcgaagaacagagaggccacggtgaatggggaagagaacagagcacattcagtcaataatcacgcgaagccaatggaaatagatggagaggttgagattccatccagcaaagccacagtccttcggggccatgagtctgaggtgttcatttgtgcctggaatcctgtcagtgatttgctagcctccggatctggagactcaactgcaaggatatggaacctgaatgagaatagcaacgggggctccacccagctcgtgttgaggcactgtatacgagaggggggccatgacgtcccgagtaacaaagacgtcacctcactggactggaataccaatggaacactcttggctacgggttcatatgacggttttgcaagaatatggacggaagatggtaacctggccagcaccttaggccaacataaaggccccatctttgccttgaaatggaaccgaaaggggaattacattttgagtgctggtgtagacaaaacaacaataatttgggatgcccacacaggagaagccaaacagcagtttccttttcattcagcccctgcccttgatgtggactggcagaacaacacgacctttgcctcctgtagcacagacatgtgtatccatgtgtgcaggctcggctgtgaccgcccagtcaaaaccttccagggacacacaaacgaggtcaacgccatcaaatgggatccgtctggaatgttgctggcatcctgctcggatgacatgacattgaagatctggagcatgaaacaggaggtgtgcatccatgatcttcaggctcacaataaagagatctacaccatcaagtggagccccactgggcccgccaccagcaacccaaactccaacatcatgttggcaagtgcttcgtttgattctacggtgcgactgtgggacatagaacgaggcgtctgcacccacacgctcacgaagcatcaggagcctgtctatagcgtagctttcagccctgatgggaagtacttggccagtggatccttcgacaagtgcgtccatatctggaatactcagagtggaaatcttgtccacagctaccgaggcactggcggcatcttcgaggtgtgctggaacgcccgaggagacaaagtgggtgccagcgcgtccgacggctctgtgtgtgttttggatctgcggaagtaaccacaaaatattatcgaaaaaagaaaagaattctaatgaccagccgtgaatgtgtagggttgcagctctattctccaaaactgtaggaacttgacttgcgttagagtgtactctgaaaccaactcgtctctggccgcaggagtctatatgttttcgtaatcttcatcaagaagtttttaaaaggcaagcaaaaacagaagcaaatcatatcaaacggggatagaatggtttccactgaggacattcagcctgggaaggaggaagtcaccagctcgaggcgtgtggattggtttccacccggaacaggctctgtgatggctgaatggaaagaaacgtaaaaagctgtgccaaaaaaaaagcaaaatgctgtgataaaccaaacagggaagggggaaaaaccctcctccttgggattttttttttttgttttccctaacaatttggacactacaattgctctcacaaaggaggttcaaagaccagtttgtaccgatgaaacgcgcaactttgtaatcccaacactttctattttctagaatcttctttgttcattgggtggtttttcagtcggctggaattctatcttctgggggccttccgtctgagatggaagctgtcttgggcttgttgtctcttccttctgttgctccctgcccctccccctgcctttccactctgtctggtgagctctgctttttcagtgcaccatcaagagatgcagccccgtggacatgaagacacaatctcccacggacagctttcccccttccgccctctcccaccctctcctccccttgcgctcgcgctcgcgctcgctttctcactggcgtgctctctttctctctctctctccctctgtacctttctcatagttgcttcagatcttaggtctcaagggcactttggcgcgtagtaagtgctttatgtaagaaggcagggcaggggggctttttacaggagaaaaaaaaatgacttataagagaaagagcctggagtatttttggaaaaaaaaataatatttttatgttaaaacaattttaaaatcttaaaatggccatcagacatagagagctttgtgtgattcatgttttaaaaagaaccgaagaagccacaggcagggcctgagggagcccctggctttcccctcagcctcaggaaaggtggtcaggaaaactctggctggacaagggtcagtcttcggggtcagcagcgagattgctctgcagccagtgagggaggtccccgccatgccggctggaagaagaacctcgcatcttttggtgtgtatgcaccttggcagccagcaggaaagcagcgaagagccgcgcgccctctggcctcaagggagcattggcagaaccataaggtactgcagaagccgtcgaaaccgactgctcggctggattaggcgtgttggctacatctttcccacaaccgtataacgaccgatggtcatttctccaagagcaggcttggcgagtccttgcagagctgacatagaggcgcccgcatgtcacttagtctaacgctgacagaaatgaatgcagaaggaagattttcagtcctgaacgtgaattatagaggtagaacgtcgctaataatttctgccatctttataatttctttgtctcacagaagactaggagaaagatcttttttaaataatctttttgctgtttttaaaaaattaaacaaggctttgtgttcctagaagagcttcatttcagtgaatctggtgacctccatctgcttgctgtcataacccgacacggacttatttttgtcattagcaagggggaaaaggccaaaggacaagggcctcttctcccattggttttcctgtgggcagaagggctgaggaagatggcccagcccgtgggggctgctgggtcaccagcagtgggtagggtgcaatctggtgtgtgttccagcagtgagacggtgttattgtgaaggtggcattcatctgcggagccaaaacccagccatcggggaagggtcagggcttctgtggaacttggaacgtgccaggaccacctgcaaaagccagggtgcgttgatcattctcagatcattgattggcctccacttgggtatgtgaattattcatgtcccagaagaccaaaaagtgctctggttctgagatgagtattttattcgtgttctgtttccgaaacacttagcaaagaaggtcacagtgatgtggagtcgccgcacccatctttgaagatagccagtgtccctggatgaggtgatgatttcccgtcccaaggactctgtgaagtttagagtacagtttgttggggtccaaaagacaccatctctaccccacccaaataaaaatgcactcatctctgtagaacatctgctgtcaaaggccagcctgtcgttagggcatggcttatgcttgacaaaccagtaacaactgtgggatggcgatggtgggatgtgtcgcaagcaattcactagacaatcttcacatgaatgtcggtagccagggtctctcccgagggatggctttagtcttgatgaatgtgaaccatgtcggaattgttaggtagaaacctgggctgggaggcctcggaccccaggctccatccctggcttccccagcctgcggccgcaagcaaaaccaagcgcgagatgcagctagcacccttcatatccatccccgttctcagcgggacaacaccatggacagccgttttcagagcctccagcatttgcacaccactactcaccctctctgctgctggcatgttggtagagtcatccctgtaatcaagaaatggcctgtggaatgttattgttcaacgttgtttacagctcttaaaacatggtgaggaatgcctaagtcttagtgaccaaacgtgaccttgaaagcagacatagcatgacagaccttcctagagtgtttggtcgggttcacagtgaccgagagtcaggtccagcacacacctgggaaagggatgctgccccaagggggaccaaaagggccggacgttacagggtgaaaccctctgacccctcgcgacaccgtaggacttgacttttgtttagtctttctaagaaatagatcatggagccaagtgaagtgcactttgtcaaatgtaagggtctgctttgttcttgttgcttttctgttttttaaccttttgttccgccatttaaaaaaagaaaaaaaaaaagcttatgtttcttgtcaaatgcagaaatgttccttccgccactcactgaagttttgcattctggcttgtgcagtttttattgtctgtgtcagacgtacagccagacatgttctctattggcatttttccgattctgttcagatgacagcgaccgccttttcattccccccgccacctgtactcaccctcacgctctttgaagaaaaaaaaaaaaatcaccttgtgtgttgtagctcatttgtttcaagagagaatcaacagatcatattcagtgtcttgaataaattgctctattttgatatta

SEQ ID NO: 52711 - DNA, 4674 bp, Artificial Sequence
  derived and/or modified sequence
gcccagggagcccaggagcaacgaagggcaggctcaagggaaggccccaccatgtccttctggggggccttgaatggcaactgatacataataagacacaatctattctgctgattcacaattatggagactgtatttccgtgagggtggaagaaaatcataccatatcagatgcctcgcagagcaccaggcccaccgtgaaagctcctggcaaccactattccactccctgcttctttgaatttcacaacttgaggtagcttgtgtaagtggaattattttaaaagctggttcatgttaaagtgcttagaacagagcttggtgagcatccggtcaacagctggtccctgcagacggcttcccatttttatgaccggatgctgggaagcctgctggtccacaggtccatacatgaagtcaccataagagggtggttcccacttcatcaacacctcatcgccgcgaggtgaggctaagatgagcataaccagtgacgaggtgaactttctggtgtatcggtatctccaggagtcaggtttttcccactcggctttcacgtttgggattgagagccacatcagccagtccaacatcaatgggacgctagtgccaccggccgccctcatctccattctccagaagggcctgcagtatgtagaggccgagatcagtatcaacgaggatggcacagtgttcgacggccgccccatagagtccctgtcactgatagacgccgtgatgcccgacgtggtgcagacgcggcagcaggcattccgagagaagctcgctcagcagcaagccagtgcggcggcggcggcggctgcggccacggcagcagcgacagcagccaccacgacctcagccggcgtttcccaccaaaatccatcgaagaacagagaggccacggtgaatggggaagagaacagagcacattcagtcaataatcacgcgaagccaatggaaatagatggagaggttgagattccatccagcaaagccacagtccttcggggccatgagtctgaggtgttcatttgtgcctggaatcctgtcagtgatttgctagcctccggatctggagactcaactgcaaggatatggaacctgaatgagaatagcaacgggggctccacccagctcgtgttgaggcactgtatacgagaggggggccatgacgtcccgagtaacaaagacgtcacctcactggactggaataccaatggaacactcttggctacgggttcatatgacggttttgcaagaatatggacggaagatggtaacctggccagcaccttaggccaacataaaggccccatctttgccttgaaatggaaccgaaaggggaattacattttgagtgctggtgtagacaaaacaacaataatttgggatgcccacacaggagaagccaaacagcagtttccttttcattcagcccctgcccttgatgtggactggcagaacaacacgacctttgcctcctgtagcacagacatgtgtatccatgtgtgcaggctcggctgtgaccgcccagtcaaaaccttccagggacacacaaacgaggtcaacgccatcaaatgggatccgtctggaatgttgctggcatcctgctcggatgacatgacattgaagatctggagcatgaaacaggaggtgtgcatccatgatcttcaggctcacaataaagagatctacaccatcaagtggagccccactgggcccgccaccagcaacccaaactccaacatcatgttggcaagtgcttcgtttgattctacggtgcgactgtgggacatagaacgaggcgtctgcacccacacgctcacgaagcatcaggagcctgtctatagcgtagctttcagccctgatgggaagtacttggccagtggatccttcgacaagtgcgtccatatctggaatactcagagtggaaatcttgtccacagctaccgaggcactggcggcatcttcgaggtgtgctggaacgcccgaggagacaaagtgggtgccagcgcgtccgacggctctgtgtgtgttttggatctgcggaagtaaccacaaaatattatcgaaaaaagaaaagaattctaatgaccagccgtgaatgtgtagggttgcagctctattctccaaaactgtaggaacttgacttgcgttagagtgtactctgaaaccaactcgtctctggccgcaggagtctatatgttttcgtaatcttcatcaagaagtttttaaaaggcaagcaaaaacagaagcaaatcatatcaaacggggatagaatggtttccactgaggacattcagcctgggaaggaggaagtcaccagctcgaggcgtgtggattggtttccacccggaacaggctctgtgatggctgaatggaaagaaacgtaaaaagctgtgccaaaaaaaaagcaaaatgctgtgataaaccaaacagggaagggggaaaaaccctcctccttgggattttttttttttgttttccctaacaatttggacactacaattgctctcacaaaggaggttcaaagaccagtttgtaccgatgaaacgcgcaactttgtaatcccaacactttctattttctagaatcttctttgttcattgggtggtttttcagtcggctggaattctatcttctgggggccttccgtctgagatggaagctgtcttgggcttgttgtctcttccttctgttgctccctgcccctccccctgcctttccactctgtctggtgagctctgctttttcagtgcaccatcaagagatgcagccccgtggacatgaagacacaatctcccacggacagctttcccccttccgccctctcccaccctctcctccccttgcgctcgcgctcgcgctcgctttctcactggcgtgctctctttctctctctctctccctctgtacctttctcatagttgcttcagatcttaggtctcaagggcactttggcgcgtagtaagtgctttatgtaagaaggcagggcaggggggctttttacaggagaaaaaaaaatgacttataagagaaagagcctggagtatttttggaaaaaaaaataatatttttatgttaaaacaattttaaaatcttaaaatggccatcagacatagagagctttgtgtgattcatgttttaaaaagaaccgaagaagccacaggcagggcctgagggagcccctggctttcccctcagcctcaggaaaggtggtcaggaaaactctggctggacaagggtcagtcttcggggtcagcagcgagattgctctgcagccagtgagggaggtccccgccatgccggctggaagaagaacctcgcatcttttggtgtgtatgcaccttggcagccagcaggaaagcagcgaagagccgcgcgccctctggcctcaagggagcattggcagaaccataaggtactgcagaagccgtcgaaaccgactgctcggctggattaggcgtgttggctacatctttcccacaaccgtataacgaccgatggtcatttctccaagagcaggcttggcgagtccttgcagagctgacatagaggcgcccgcatgtcacttagtctaacgctgacagaaatgaatgcagaaggaagattttcagtcctgaacgtgaattatagaggtagaacgtcgctaataatttctgccatctttataatttctttgtctcacagaagactaggagaaagatcttttttaaataatctttttgctgtttttaaaaaattaaacaaggctttgtgttcctagaagagcttcatttcagtgaatctggtgacctccatctgcttgctgtcataacccgacacggacttatttttgtcattagcaagggggaaaaggccaaaggacaagggcctcttctcccattggttttcctgtgggcagaagggctgaggaagatggcccagcccgtgggggctgctgggtcaccagcagtgggtagggtgcaatctggtgtgtgttccagcagtgagacggtgttattgtgaaggtggcattcatctgcggagccaaaacccagccatcggggaagggtcagggcttctgtggaacttggaacgtgccaggaccacctgcaaaagccagggtgcgttgatcattctcagatcattgattggcctccacttgggtatgtgaattattcatgtcccagaagaccaaaaagtgctctggttctgagatgagtattttattcgtgttctgtttccgaaacacttagcaaagaaggtcacagtgatgtggagtcgccgcacccatctttgaagatagccagtgtccctggatgaggtgatgatttcccgtcccaaggactctgtgaagtttagagtacagtttgttggggtccaaaagacaccatctctaccccacccaaataaaaatgcactcatctctgtagaacatctgctgtcaaaggccagcctgtcgttagggcatggcttatgcttgacaaaccagtaacaactgtgggatggcgatggtgggatgtgtcgcaagcaattcactagacaatcttcacatgaatgtcggtagccagggtctctcccgagggatggctttagtcttgatgaatgtgaaccatgtcggaattgttaggtagaaacctgggctgggaggcctcggaccccaggctccatccctggcttccccagcct

SEQ ID NO: 52712 - DNA, 5596 bp, Artificial Sequence
  derived and/or modified sequence
attgcatgtaatacctcagcatcagtctgcacaagcccagggagcccaggagcaacgaagggcaggctcaagggaaggccccaccatgtccttctggggggccttgaatggcaactgatacataataagacacaatctattctgctgattcacaattatggagactgtatttccgtgagggtggaagaaaatcataccatatcagatgcctcgcagagcaccaggcccaccgtgaaaggctggtccctgcagacggcttcccatttttatgaccggatgctgggaagcctgctggtccacaggtccatacatgaagtcaccataaggagccctggcctccttgcagaaacatcgaggtgacatgtagcatgaccgagctcgctggcgcctcttcatcgtgctgccaccgccctgcaggaagaggggccatgcagtcagtcttgcaccactttcaacgtttgcgagggagagagggtggttcccacttcatcaacacctcatcgccgcgaggtgaggctaagatgagcataaccagtgacgaggtgaactttctggtgtatcggtatctccaggagtcaggtttttcccactcggctttcacgtttgggattgagagccacatcagccagtccaacatcaatgggacgctagtgccaccggccgccctcatctccattctccagaagggcctgcagtatgtagaggccgagatcagtatcaacgaggatggcacagtgttcgacggccgccccatagagtccctgtcactgatagacgccgtgatgcccgacgtggtgcagacgcggcagcaggcattccgagagaagctcgctcagcagcaagccagtgcggcggcggcggcggctgcggccacggcagcagcgacagcagccaccacgacctcagccggcgtttcccaccaaaatccatcgaagaacagagaggccacggtgaatggggaagagaacagagcacattcagtcaataatcacgcgaagccaatggaaatagatggagaggttgagattccatccagcaaagccacagtccttcggggccatgagtctgaggtgttcatttgtgcctggaatcctgtcagtgatttgctagcctccggatctggagactcaactgcaaggatatggaacctgaatgagaatagcaacgggggctccacccagctcgtgttgaggcactgtatacgagaggggggccatgacgtcccgagtaacaaagacgtcacctcactggactggaataccaatggaacactcttggctacgggttcatatgacggttttgcaagaatatggacggaagatggtaacctggccagcaccttaggccaacataaaggccccatctttgccttgaaatggaaccgaaaggggaattacattttgagtgctggtgtagacaaaacaacaataatttgggatgcccacacaggagaagccaaacagcagtttccttttcattcagcccctgcccttgatgtggactggcagaacaacacgacctttgcctcctgtagcacagacatgtgtatccatgtgtgcaggctcggctgtgaccgcccagtcaaaaccttccagggacacacaaacgaggtcaacgccatcaaatgggatccgtctggaatgttgctggcatcctgctcggatgacatgacattgaagatctggagcatgaaacaggaggtgtgcatccatgatcttcaggctcacaataaagagatctacaccatcaagtggagccccactgggcccgccaccagcaacccaaactccaacatcatgttggcaagtgcttcgtttgattctacggtgcgactgtgggacatagaacgaggcgtctgcacccacacgctcacgaagcatcaggagcctgtctatagcgtagctttcagccctgatgggaagtacttggccagtggatccttcgacaagtgcgtccatatctggaatactcagagtggaaatcttgtccacagctaccgaggcactggcggcatcttcgaggtgtgctggaacgcccgaggagacaaagtgggtgccagcgcgtccgacggctctgtgtgtgttttggatctgcggaagtaaccacaaaatattatcgaaaaaagaaaagaattctaatgaccagccgtgaatgtgtagggttgcagctctattctccaaaactgtaggaacttgacttgcgttagagtgtactctgaaaccaactcgtctctggccgcaggagtctatatgttttcgtaatcttcatcaagaagtttttaaaaggcaagcaaaaacagaagcaaatcatatcaaacggggatagaatggtttccactgaggacattcagcctgggaaggaggaagtcaccagctcgaggcgtgtggattggtttccacccggaacaggctctgtgatggctgaatggaaagaaacgtaaaaagctgtgccaaaaaaaaagcaaaatgctgtgataaaccaaacagggaagggggaaaaaccctcctccttgggattttttttttttgttttccctaacaatttggacactacaattgctctcacaaaggaggttcaaagaccagtttgtaccgatgaaacgcgcaactttgtaatcccaacactttctattttctagaatcttctttgttcattgggtggtttttcagtcggctggaattctatcttctgggggccttccgtctgagatggaagctgtcttgggcttgttgtctcttccttctgttgctccctgcccctccccctgcctttccactctgtctggtgagctctgctttttcagtgcaccatcaagagatgcagccccgtggacatgaagacacaatctcccacggacagctttcccccttccgccctctcccaccctctcctccccttgcgctcgcgctcgcgctcgctttctcactggcgtgctctctttctctctctctctccctctgtacctttctcatagttgcttcagatcttaggtctcaagggcactttggcgcgtagtaagtgctttatgtaagaaggcagggcaggggggctttttacaggagaaaaaaaaatgacttataagagaaagagcctggagtatttttggaaaaaaaaataatatttttatgttaaaacaattttaaaatcttaaaatggccatcagacatagagagctttgtgtgattcatgttttaaaaagaaccgaagaagccacaggcagggcctgagggagcccctggctttcccctcagcctcaggaaaggtggtcaggaaaactctggctggacaagggtcagtcttcggggtcagcagcgagattgctctgcagccagtgagggaggtccccgccatgccggctggaagaagaacctcgcatcttttggtgtgtatgcaccttggcagccagcaggaaagcagcgaagagccgcgcgccctctggcctcaagggagcattggcagaaccataaggtactgcagaagccgtcgaaaccgactgctcggctggattaggcgtgttggctacatctttcccacaaccgtataacgaccgatggtcatttctccaagagcaggcttggcgagtccttgcagagctgacatagaggcgcccgcatgtcacttagtctaacgctgacagaaatgaatgcagaaggaagattttcagtcctgaacgtgaattatagaggtagaacgtcgctaataatttctgccatctttataatttctttgtctcacagaagactaggagaaagatcttttttaaataatctttttgctgtttttaaaaaattaaacaaggctttgtgttcctagaagagcttcatttcagtgaatctggtgacctccatctgcttgctgtcataacccgacacggacttatttttgtcattagcaagggggaaaaggccaaaggacaagggcctcttctcccattggttttcctgtgggcagaagggctgaggaagatggcccagcccgtgggggctgctgggtcaccagcagtgggtagggtgcaatctggtgtgtgttccagcagtgagacggtgttattgtgaaggtggcattcatctgcggagccaaaacccagccatcggggaagggtcagggcttctgtggaacttggaacgtgccaggaccacctgcaaaagccagggtgcgttgatcattctcagatcattgattggcctccacttgggtatgtgaattattcatgtcccagaagaccaaaaagtgctctggttctgagatgagtattttattcgtgttctgtttccgaaacacttagcaaagaaggtcacagtgatgtggagtcgccgcacccatctttgaagatagccagtgtccctggatgaggtgatgatttcccgtcccaaggactctgtgaagtttagagtacagtttgttggggtccaaaagacaccatctctaccccacccaaataaaaatgcactcatctctgtagaacatctgctgtcaaaggccagcctgtcgttagggcatggcttatgcttgacaaaccagtaacaactgtgggatggcgatggtgggatgtgtcgcaagcaattcactagacaatcttcacatgaatgtcggtagccagggtctctcccgagggatggctttagtcttgatgaatgtgaaccatgtcggaattgttaggtagaaacctgggctgggaggcctcggaccccaggctccatccctggcttccccagcctgcggccgcaagcaaaaccaagcgcgagatgcagctagcacccttcatatccatccccgttctcagcgggacaacaccatggacagccgttttcagagcctccagcatttgcacaccactactcaccctctctgctgctggcatgttggtagagtcatccctgtaatcaagaaatggcctgtggaatgttattgttcaacgttgtttacagctcttaaaacatggtgaggaatgcctaagtcttagtgaccaaacgtgaccttgaaagcagacatagcatgacagaccttcctagagtgtttggtcgggttcacagtgaccgagagtcaggtccagcacacacctgggaaagggatgctgccccaagggggaccaaaagggccggacgttacagggtgaaaccctctgacccctcgcgacaccgtaggacttgacttttgtttagtctttctaagaaatagatcatggagccaagtgaagtgcactttgtcaaatgtaagggtctgctttgttcttgttgcttttctgttttttaaccttttgttccgccatttaaaaaaagaaaaaaaaaaagcttatgtttcttgtcaaatgcagaaatgttccttccgccactcactgaagttttgcattctggcttgtgcagtttttattgtctgtgtcagacgtacagccagacatgttctctattggcatttttccgattctgttcagatgacagcgaccgccttttcattccccccgccacctgtactcaccctcacgctctttgaagaaaaaaaaaaaaatcaccttgtgtgttgtagctcatttgtttcaagagagaatcaacagatcatattcagtgtcttgaataaattgctctattttgatattaga

SEQ ID NO: 52713 - DNA, 565 bp, Artificial Sequence
  derived and/or modified sequence
ccagggagcccaggagcaacgaagggcaggctcaagggaaggccccaccatgtccttctggggggccttgaatggcaactgatacataataagacacaatctattctgctgattcacaattatggagactgtatttccgtgagggtggaagaaaatcataccatatcagatgcctcgcagagcaccaggcccaccgtgaaaggctggtccctgcagacggcttcccatttttatgaccggatgctgggaagcctgctggtccacaggtccatacatgaagtcaccataagagggtggttcccacttcatcaacacctcatcgccgcgaggtgaggctaagatgagcataaccagtgacgaggtgaactttctggtgtatcggtatctccaggagtcaggtttttcccactcggctttcacgtttgggattgagagccacatcagccagtccaacatcaatgggacgctagtgccaccggccgccctcatctccattctccagaagggcctgcagtatgtagaggccgagatcagtatcaacgaggatggcacagtgttcgacggc

SEQ ID NO: 52714 - DNA, 496 bp, Artificial Sequence
  derived and/or modified sequence
gcgggggcggcccgggggcggcgcgcggctgctccggggcgccgggccctcttcggccgccgcacggccgggactcggaggctgccggctggagggaggttcggagcgcggccgggcgcgcggcgccgccacaagttgcgctgctcgcgacgagatttccgtgagggtggaagaaaatcataccatatcagatgcctcgcagagcaccaggcccaccgtgaaaggctggtccctgcagacggcttcccatttttatgaccggatgctgggaagcctgctggtccacaggtccatacatgaagtcaccataagagggtggttcccacttcatcaacacctcatcgccgcgaggtgaggctaagatgagcataaccagtgacgaggtgaactttctggtgtatcggtatctccaggagtcaggtttttcccactcggctttcacgtttgggattgagagccacatcagccagtccaacatcaatgggacgctagtgcc

SEQ ID NO: 52715 - DNA, 5451 bp, Artificial Sequence
  derived and/or modified sequence
attgcatgtaatacctcagcatcagtctgcacaagcccagggagcccaggagcaacgaagggcaggctcaagggaaggccccaccatgtccttctggggggccttgaatggcaactgatacataataagacacaatctattctgctgattcacaattatggagactgtatttccgtgagggtggaagaaaatcataccatatcagatgcctcgcagagcaccaggcccaccgtgaaaggctggtccctgcagacggcttcccatttttatgaccggatgctgggaagcctgctggtccacaggtccatacatgaagtcaccataagagggtggttcccacttcatcaacacctcatcgccgcgaggtgaggctaagatgagcataaccagtgacgaggtgaactttctggtgtatcggtatctccaggagtcaggtttttcccactcggctttcacgtttgggattgagagccacatcagccagtccaacatcaatgggacgctagtgccaccggccgccctcatctccattctccagaagggcctgcagtatgtagaggccgagatcagtatcaacgaggatggcacagtgttcgacggccgccccatagagtccctgtcactgatagacgccgtgatgcccgacgtggtgcagacgcggcagcaggcattccgagagaagctcgctcagcagcaagccagtgcggcggcggcggcggctgcggccacggcagcagcgacagcagccaccacgacctcagccggcgtttcccaccaaaatccatcgaagaacagagaggccacggtgaatggggaagagaacagagcacattcagtcaataatcacgcgaagccaatggaaatagatggagaggttgagattccatccagcaaagccacagtccttcggggccatgagtctgaggtgttcatttgtgcctggaatcctgtcagtgatttgctagcctccggatctggagactcaactgcaaggatatggaacctgaatgagaatagcaacgggggctccacccagctcgtgttgaggcactgtatacgagaggggggccatgacgtcccgagtaacaaagacgtcacctcactggactggaataccaatggaacactcttggctacgggttcatatgacggttttgcaagaatatggacggaagatggtaacctggccagcaccttaggccaacataaaggccccatctttgccttgaaatggaaccgaaaggggaattacattttgagtgctggtgtagacaaaacaacaataatttgggatgcccacacaggagaagccaaacagcagtttccttttcattcagcccctgcccttgatgtggactggcagaacaacacgacctttgcctcctgtagcacagacatgtgtatccatgtgtgcaggctcggctgtgaccgcccagtcaaaaccttccagggacacacaaacgaggtcaacgccatcaaatgggatccgtctggaatgttgctggcatcctgctcggatgacatgacattgaagatctggagcatgaaacaggaggtgtgcatccatgatcttcaggctcacaataaagagatctacaccatcaagtggagccccactgggcccgccaccagcaacccaaactccaacatcatgttggcaagtgcttcgtttgattctacggtgcgactgtgggacatagaacgaggcgtctgcacccacacgctcacgaagcatcaggagcctgtctatagcgtagctttcagccctgatgggaagtacttggccagtggatccttcgacaagtgcgtccatatctggaatactcagagtggaaatcttgtccacagctaccgaggcactggcggcatcttcgaggtgtgctggaacgcccgaggagacaaagtgggtgccagcgcgtccgacggctctgtgtgtgttttggatctgcggaagtaaccacaaaatattatcgaaaaaagaaaagaattctaatgaccagccgtgaatgtgtagggttgcagctctattctccaaaactgtaggaacttgacttgcgttagagtgtactctgaaaccaactcgtctctggccgcaggagtctatatgttttcgtaatcttcatcaagaagtttttaaaaggcaagcaaaaacagaagcaaatcatatcaaacggggatagaatggtttccactgaggacattcagcctgggaaggaggaagtcaccagctcgaggcgtgtggattggtttccacccggaacaggctctgtgatggctgaatggaaagaaacgtaaaaagctgtgccaaaaaaaaagcaaaatgctgtgataaaccaaacagggaagggggaaaaaccctcctccttgggattttttttttttgttttccctaacaatttggacactacaattgctctcacaaaggaggttcaaagaccagtttgtaccgatgaaacgcgcaactttgtaatcccaacactttctattttctagaatcttctttgttcattgggtggtttttcagtcggctggaattctatcttctgggggccttccgtctgagatggaagctgtcttgggcttgttgtctcttccttctgttgctccctgcccctccccctgcctttccactctgtctggtgagctctgctttttcagtgcaccatcaagagatgcagccccgtggacatgaagacacaatctcccacggacagctttcccccttccgccctctcccaccctctcctccccttgcgctcgcgctcgcgctcgctttctcactggcgtgctctctttctctctctctctccctctgtacctttctcatagttgcttcagatcttaggtctcaagggcactttggcgcgtagtaagtgctttatgtaagaaggcagggcaggggggctttttacaggagaaaaaaaaatgacttataagagaaagagcctggagtatttttggaaaaaaaaataatatttttatgttaaaacaattttaaaatcttaaaatggccatcagacatagagagctttgtgtgattcatgttttaaaaagaaccgaagaagccacaggcagggcctgagggagcccctggctttcccctcagcctcaggaaaggtggtcaggaaaactctggctggacaagggtcagtcttcggggtcagcagcgagattgctctgcagccagtgagggaggtccccgccatgccggctggaagaagaacctcgcatcttttggtgtgtatgcaccttggcagccagcaggaaagcagcgaagagccgcgcgccctctggcctcaagggagcattggcagaaccataaggtactgcagaagccgtcgaaaccgactgctcggctggattaggcgtgttggctacatctttcccacaaccgtataacgaccgatggtcatttctccaagagcaggcttggcgagtccttgcagagctgacatagaggcgcccgcatgtcacttagtctaacgctgacagaaatgaatgcagaaggaagattttcagtcctgaacgtgaattatagaggtagaacgtcgctaataatttctgccatctttataatttctttgtctcacagaagactaggagaaagatcttttttaaataatctttttgctgtttttaaaaaattaaacaaggctttgtgttcctagaagagcttcatttcagtgaatctggtgacctccatctgcttgctgtcataacccgacacggacttatttttgtcattagcaagggggaaaaggccaaaggacaagggcctcttctcccattggttttcctgtgggcagaagggctgaggaagatggcccagcccgtgggggctgctgggtcaccagcagtgggtagggtgcaatctggtgtgtgttccagcagtgagacggtgttattgtgaaggtggcattcatctgcggagccaaaacccagccatcggggaagggtcagggcttctgtggaacttggaacgtgccaggaccacctgcaaaagccagggtgcgttgatcattctcagatcattgattggcctccacttgggtatgtgaattattcatgtcccagaagaccaaaaagtgctctggttctgagatgagtattttattcgtgttctgtttccgaaacacttagcaaagaaggtcacagtgatgtggagtcgccgcacccatctttgaagatagccagtgtccctggatgaggtgatgatttcccgtcccaaggactctgtgaagtttagagtacagtttgttggggtccaaaagacaccatctctaccccacccaaataaaaatgcactcatctctgtagaacatctgctgtcaaaggccagcctgtcgttagggcatggcttatgcttgacaaaccagtaacaactgtgggatggcgatggtgggatgtgtcgcaagcaattcactagacaatcttcacatgaatgtcggtagccagggtctctcccgagggatggctttagtcttgatgaatgtgaaccatgtcggaattgttaggtagaaacctgggctgggaggcctcggaccccaggctccatccctggcttccccagcctgcggccgcaagcaaaaccaagcgcgagatgcagctagcacccttcatatccatccccgttctcagcgggacaacaccatggacagccgttttcagagcctccagcatttgcacaccactactcaccctctctgctgctggcatgttggtagagtcatccctgtaatcaagaaatggcctgtggaatgttattgttcaacgttgtttacagctcttaaaacatggtgaggaatgcctaagtcttagtgaccaaacgtgaccttgaaagcagacatagcatgacagaccttcctagagtgtttggtcgggttcacagtgaccgagagtcaggtccagcacacacctgggaaagggatgctgccccaagggggaccaaaagggccggacgttacagggtgaaaccctctgacccctcgcgacaccgtaggacttgacttttgtttagtctttctaagaaatagatcatggagccaagtgaagtgcactttgtcaaatgtaagggtctgctttgttcttgttgcttttctgttttttaaccttttgttccgccatttaaaaaaagaaaaaaaaaaagcttatgtttcttgtcaaatgcagaaatgttccttccgccactcactgaagttttgcattctggcttgtgcagtttttattgtctgtgtcagacgtacagccagacatgttctctattggcatttttccgattctgttcagatgacagcgaccgccttttcattccccccgccacctgtactcaccctcacgctctttgaagaaaaaaaaaaaaatcaccttgtgtgttgtagctcatttgtttcaagagagaatcaacagatcatattcagtgtcttgaataaattgctctattttgatattaga

SEQ ID NO: 52716 - DNA, 520 bp, Artificial Sequence
  derived and/or modified sequence
tctgcacaagcccagggagcccaggagcaacgaagggcaggctcaagggaaggccccaccatgtccttctggggggccttgaatggcaactgatacataataagacacaatctattctgctgattcacaattatggagactgtatttccgtgagggtggaagaaaatcataccatatcagatgcctcgcagagcaccaggcccaccgtgaaaggctggtccctgcagacggcttcccatttttatgaccggatgctgggaagcctgctggtccacaggtccatacatgaagtcaccataaggagccctggcctccttgcagaaacatcgaggtgacatgtagcatgaccgagctcgctggcgcctcttcatcgtgctgccaccgccctgcaggaagaggggccatgcagtcagtcttgcaccactttcaacgtttgcgagggagagagggtggttcccacttcatcaacacctcatcgccgcgaggtgaggctaagatgagcataaccagtgacgaggtg

SEQ ID NO: 52717 - DNA, 387 bp, Artificial Sequence
  derived and/or modified sequence
caacttgaggtagcttgtgctggtccctgcagacggcttcccatttttatgaccggatgctgggaagcctgctggtccacaggtccatacatgaagtcaccataaggagccctggcctccttgcagaaacatcgaggtgacatgtagcatgaccgagctcgctggcgcctcttcatcgtgctgccaccgccctgcaggaagaggggccatgcagtcagtcttgcaccactttcaacgtttgcgagggagagagggtggttcccacttcatcaacacctcatcgccgcgaggtgaggctaagatgagcataaccagtgacgaggtgaactttctggtgtatcggtatctccaggagtcaggtttttcccactcggctttcacgtttgg

SEQ ID NO: 52718 - DNA, 2101 bp, Artificial Sequence
  derived and/or modified sequence
agcatcagtctgcacaagcccagggagcccaggagcaacgaagggcaggctcaagggaaggccccaccatgtccttctggggggccttgaatggcaactgatacataataagacacaatctattctgctgattcacaattatggagactgtatttccgtgagggtggaagaaaatcataccatatcagatgcctcgcagagcaccaggcccaccgtgaaaggctggtccctgcagacggcttcccatttttatgaccggatgctgggaagcctgctggtccacaggtccatacatgaagtcaccataaggagccctggcctccttgcagaaacatcgaggtgacatgtagcatgaccgagctcgctggcgcctcttcatcgtgctgccaccgccctgcaggaagaggggccatgcagtcagtcttgcaccactttcaacgtttgcgagggagagagggtggttcccacttcatcaacacctcatcgccgcgaggtgaggctaagatgagcataaccagtgacgaggtgaactttctggtgtatcggtatctccaggagtcaggtttttcccactcggctttcacgtttgggattgagagccacatcagccagtccaacatcaatgggacgctagtgccaccggccgccctcatctccattctccagaagggcctgcagtatgtagaggccgagatcagtatcaacgaggatggcacagtgttcgacggccgccccatagagtccctgtcactgatagacgccgtgatgcccgacgtggtgcagacgcggcagcaggcattccgagagaagctcgctcagcagcaagccagtgcggcggcggcggcggctgcggccacggcagcagcgacagcagccaccacgacctcagccggcgtttcccaccaaaatccatcgaagaacagagaggccacggtgaatggggaagagaacagagcacattcagtcaataatcacgcgaagccaatggaaatagatggagaggttgagattccatccagcaaagccacagtccttcggggccatgagtctgaggtgttcatttgtgcctggaatcctgtcagtgatttgctagcctccggatctggagactcaactgcaaggatatggaacctgaatgagaatagcaacgggggctccacccagctcgtgttgaggcactgtatacgagaggggggccatgacgtcccgagtaacaaagacgtcacctcactggactggaataccaatggaacactcttggctacgggttcatatgacggttttgcaagaatatggacggaagatggtaacctggccagcaccttaggccaacataaaggccccatctttgccttgaaatggaaccgaaaggggaattacattttgagtgctggtgtagacaaaacaacaataatttgggatgcccacacaggagaagccaaacagcagtttccttttcattcagcccctgcccttgatgtggactggcagaacaacacgacctttgcctcctgtagcacagacatgtgtatccatgtgtgcaggctcggctgtgaccgcccagtcaaaaccttccagggacacacaaacgaggtcaacgccatcaaatgggatccgtctggaatgttgctggcatcctgctcggatgacatgacattgaagatctggagcatgaaacaggaggtgtgcatccatgatcttcaggctcacaataaagagatctacaccatcaagtggagccccactgggcccgccaccagcaacccaaactccaacatcatgttggcaagtgcttcgtttgattctacggtgcgactgtgggacatagaacgaggcgtctgcacccacacgctcacgaagcatcaggagcctgtctatagcgtagctttcagccctgatgggaagtacttggccagtggatccttcgacaagtgcgtccatatctggaatactcagagtggaaatcttgtccacagctaccgaggcactggcggcatcttcgaggtgtgctggaacgcccgaggagacaaagtgggtgccagcgcgtccgacggctctgtgtgtgttttggatctgcggaagtaaccacaaaatattatcg

SEQ ID NO: 52719 - DNA, 1734 bp, Artificial Sequence
  derived and/or modified sequence
atgaccgagctggccggcgccagcagcagctgctgccacagacccgccggcagaggcgccatgcagagcgtgctgcaccacttccagagactgagaggcagagagggcggcagccacttcatcaacaccagcagccccagaggcgaggccaagatgagcatcaccagcgacgaggtgaacttcctggtgtacagatacctgcaggagagcggcttcagccacagcgccttcaccttcggcatcgagagccacatcagccagagcaacatcaacggcaccctggtgccccccgccgccctgatcagcatcctgcagaagggcctgcagtacgtggaggccgagatcagcatcaacgaggacggcaccgtgttcgacggcagacccatcgagagcctgagcctgatcgacgccgtgatgcccgacgtggtgcagaccagacagcaggccttcagagagaagctggcccagcagcaggccagcgccgccgccgccgccgccgccgccaccgccgccgccaccgccgccaccaccaccagcgccggcgtgagccaccagaaccccagcaagaacagagaggccaccgtgaacggcgaggagaacagagcccacagcgtgaacaaccacgccaagcccatggagatcgacggcgaggtggagatccccagcagcaaggccaccgtgctgagaggccacgagagcgaggtgttcatctgcgcctggaaccccgtgagcgacctgctggccagcggcagcggcgacagcaccgccagaatctggaacctgaacgagaacagcaacggcggcagcacccagctggtgctgagacactgcatcagagagggcggccacgacgtgcccagcaacaaggacgtgaccagcctggactggaacaccaacggcaccctgctggccaccggcagctacgacggcttcgccagaatctggaccgaggacggcaacctggccagcaccctgggccagcacaagggccccatcttcgccctgaagtggaacagaaagggcaactacatcctgagcgccggcgtggacaagaccaccatcatctgggacgcccacaccggcgaggccaagcagcagttccccttccacagcgcccccgccctggacgtggactggcagaacaacaccaccttcgccagctgcagcaccgacatgtgcatccacgtgtgcagactgggctgcgacagacccgtgaagaccttccagggccacaccaacgaggtgaacgccatcaagtgggaccccagcggcatgctgctggccagctgcagcgacgacatgaccctgaagatctggagcatgaagcaggaggtgtgcatccacgacctgcaggcccacaacaaggagatctacaccatcaagtggagccccaccggccccgccaccagcaaccccaacagcaacatcatgctggccagcgccagcttcgacagcaccgtgagactgtgggacatcgagagaggcgtgtgcacccacaccctgaccaagcaccaggagcccgtgtacagcgtggccttcagccccgacggcaagtacctggccagcggcagcttcgacaagtgcgtgcacatctggaacacccagagcggcaacctggtgcacagctacagaggcaccggcggcatcttcgaggtgtgctggaacgccagaggcgacaaggtgggcgccagcgccagcgacggcagcgtgtgcgtgctggacctgagaaagtag

SEQ ID NO: 52720 - protein, 625 aa, Artificial Sequence
  derived and/or modified sequence
MNAAVVRRTQEALGKVIRRPPLTEKLLSKPPFRYLHDIITEVIRMTGFMKGLYTDAEMKSDNVKDKDAKISFLQKAIDVVVMVSGEPLLAKPARIVAGHEPERTNELLQIIGKCCLNKLSSDDAVRRVLAGEKGEVKGRASLTSRSQELDNKNVREEESRVHKNTEDRGDAEIKERSTSRDRKQKEELKEDRKPREKDKDKEKAKENGGNRHREGERERAKARARPDNERQKDRGNRERDRDSERKKETERKSEGGKEKERLRDRDRERDRDKGKDRDRRRVKNGEHSWDLDREKNREHDKPEKKSASSGEMSKKLSDGTFKDSKAETETEISTRASKSLTTKTSKRRSKNSVEGDSTSDAEGDAGPAGQDKSEVPETPEIPNELSSNIRRIPRPGSARPAPPRVKRQDSMEALQMDRSGSGKTVSNVITESHNSDNEEDDQFVVEAAPQLSEMSEIEMVTAVELEEEEKHGGLVKKILETKKDYEKLQQSPKPGEKERSLFESAWKKEKDIVSKEIEKLRTSIQTLCKSALPLGKIMDYIQEDVDAMQNELQMWHSENRQHAEALQQEQRITDCAVEPLKAELAELEQLIKDQQDKICAVKANILKNEEKIQKMVYSINLTSRR

SEQ ID NO: 52721 - protein, 625 aa, Artificial Sequence
  derived and/or modified sequence
MNAAVVRRTQEALGKVIRRPPLTEKLLSKPPFRYLHDIITEVIRMTGFMKGLYTDAEMKSDNVKDKDAKISFLQKAIDVVVMVSGEPLLAKPARIVAGHEPERTNELLQIIGKCCLNKLSSDDAVRRVLAGEKGEVKGRASLTSRSQELDNKNVREEESRVHKNTEDRGDAEIKERSTSRDRKQKEELKEDRKPREKDKDKEKAKENGGNRHREGERERAKARARPDNERQKDRGNRERDRDSERKKETERKSEGGKEKERLRDRDRERDRDKGKDRDRRRVKNGEHSWDLDREKNREHDKPEKKSASSGEMSKKLSDGTFKDSKAETETEISTRASKSLTTKTSKRRSKNSVEGTAKLILEGDAGPAGQDKSEVPETPEIPNELSSNIRRIPRPGSARPAPPRVKRQDSMEALQMDRSGSGKTVSNVITESHNSDNEEDDQFVVEAAPQLSEMSEIEMVTAVELEEEEKHGGLVKKILETKKDYEKLQQSPKPGEKERSLFESAWKKEKDIVSKEIEKLRTSIQTLCKSALPLGKIMDYIQEDVDAMQNELQMWHSENRQHAEALQQEQRITDCAVEPLKAELAELEQLIKDQQDKICAVKANILKNEEKIQKMVYSINLTSRR

SEQ ID NO: 52722 - DNA, 1878 bp, Artificial Sequence
  derived and/or modified sequence
atgaacgccgccgtggtgagaagaacccaggaggccctgggcaaggtgatcagaagaccccccctgaccgagaagctgctgagcaagccccccttcagatacctgcacgacatcatcaccgaggtgatcagaatgaccggcttcatgaagggcctgtacaccgacgccgagatgaagagcgacaacgtgaaggacaaggacgccaagatcagcttcctgcagaaggccatcgacgtggtggtgatggtgagcggcgagcccctgctggccaagcccgccagaatcgtggccggccacgagcccgagagaaccaacgagctgctgcagatcatcggcaagtgctgcctgaacaagctgagcagcgacgacgccgtgagaagagtgctggccggcgagaagggcgaggtgaagggcagagccagcctgaccagcagaagccaggagctggacaacaagaacgtgagagaggaggagagcagagtgcacaagaacaccgaggacagaggcgacgccgagatcaaggagagaagcaccagcagagacagaaagcagaaggaggagctgaaggaggacagaaagcccagagagaaggacaaggacaaggagaaggccaaggagaacggcggcaacagacacagagagggcgagagagagagagccaaggccagagccagacccgacaacgagagacagaaggacagaggcaacagagagagagacagagacagcgagagaaagaaggagaccgagagaaagagcgagggcggcaaggagaaggagagactgagagacagagacagagagagagacagagacaagggcaaggacagagacagaagaagagtgaagaacggcgagcacagctgggacctggacagagagaagaacagagagcacgacaagcccgagaagaagagcgccagcagcggcgagatgagcaagaagctgagcgacggcaccttcaaggacagcaaggccgagaccgagaccgagatcagcaccagagccagcaagagcctgaccaccaagaccagcaagagaagaagcaagaacagcgtggagggcgacagcaccagcgacgccgagggcgacgccggccccgccggccaggacaagagcgaggtgcccgagacccccgagatccccaacgagctgagcagcaacatcagaagaatccccagacccggcagcgccagacccgccccccccagagtgaagagacaggacagcatggaggccctgcagatggacagaagcggcagcggcaagaccgtgagcaacgtgatcaccgagagccacaacagcgacaacgaggaggacgaccagttcgtggtggaggccgccccccagctgagcgagatgagcgagatcgagatggtgaccgccgtggagctggaggaggaggagaagcacggcggcctggtgaagaagatcctggagaccaagaaggactacgagaagctgcagcagagccccaagcccggcgagaaggagagaagcctgttcgagagcgcctggaagaaggagaaggacatcgtgagcaaggagatcgagaagctgagaaccagcatccagaccctgtgcaagagcgccctgcccctgggcaagatcatggactacatccaggaggacgtggacgccatgcagaacgagctgcagatgtggcacagcgagaacagacagcacgccgaggccctgcagcaggagcagagaatcaccgactgcgccgtggagcccctgaaggccgagctggccgagctggagcagctgatcaaggaccagcaggacaagatctgcgccgtgaaggccaacatcctgaagaacgaggagaagatccagaagatggtgtacagcatcaacctgaccagcagaagatag

SEQ ID NO: 52723 - DNA, 1878 bp, Artificial Sequence
  derived and/or modified sequence
atgaacgccgccgtggtgagaagaacccaggaggccctgggcaaggtgatcagaagaccccccctgaccgagaagctgctgagcaagccccccttcagatacctgcacgacatcatcaccgaggtgatcagaatgaccggcttcatgaagggcctgtacaccgacgccgagatgaagagcgacaacgtgaaggacaaggacgccaagatcagcttcctgcagaaggccatcgacgtggtggtgatggtgagcggcgagcccctgctggccaagcccgccagaatcgtggccggccacgagcccgagagaaccaacgagctgctgcagatcatcggcaagtgctgcctgaacaagctgagcagcgacgacgccgtgagaagagtgctggccggcgagaagggcgaggtgaagggcagagccagcctgaccagcagaagccaggagctggacaacaagaacgtgagagaggaggagagcagagtgcacaagaacaccgaggacagaggcgacgccgagatcaaggagagaagcaccagcagagacagaaagcagaaggaggagctgaaggaggacagaaagcccagagagaaggacaaggacaaggagaaggccaaggagaacggcggcaacagacacagagagggcgagagagagagagccaaggccagagccagacccgacaacgagagacagaaggacagaggcaacagagagagagacagagacagcgagagaaagaaggagaccgagagaaagagcgagggcggcaaggagaaggagagactgagagacagagacagagagagagacagagacaagggcaaggacagagacagaagaagagtgaagaacggcgagcacagctgggacctggacagagagaagaacagagagcacgacaagcccgagaagaagagcgccagcagcggcgagatgagcaagaagctgagcgacggcaccttcaaggacagcaaggccgagaccgagaccgagatcagcaccagagccagcaagagcctgaccaccaagaccagcaagagaagaagcaagaacagcgtggagggcaccgccaagctgatcctggagggcgacgccggccccgccggccaggacaagagcgaggtgcccgagacccccgagatccccaacgagctgagcagcaacatcagaagaatccccagacccggcagcgccagacccgccccccccagagtgaagagacaggacagcatggaggccctgcagatggacagaagcggcagcggcaagaccgtgagcaacgtgatcaccgagagccacaacagcgacaacgaggaggacgaccagttcgtggtggaggccgccccccagctgagcgagatgagcgagatcgagatggtgaccgccgtggagctggaggaggaggagaagcacggcggcctggtgaagaagatcctggagaccaagaaggactacgagaagctgcagcagagccccaagcccggcgagaaggagagaagcctgttcgagagcgcctggaagaaggagaaggacatcgtgagcaaggagatcgagaagctgagaaccagcatccagaccctgtgcaagagcgccctgcccctgggcaagatcatggactacatccaggaggacgtggacgccatgcagaacgagctgcagatgtggcacagcgagaacagacagcacgccgaggccctgcagcaggagcagagaatcaccgactgcgccgtggagcccctgaaggccgagctggccgagctggagcagctgatcaaggaccagcaggacaagatctgcgccgtgaaggccaacatcctgaagaacgaggagaagatccagaagatggtgtacagcatcaacctgaccagcagaagatag

SEQ ID NO: 52724 - DNA, 1878 bp, Artificial Sequence
  derived and/or modified sequence
atgaatgccgccgtggtgcgtcgtacacaagaggccttaggcaaagtaatcaggcgacctcccctgactgaaaagttactgtccaagcctccattccggtacctccacgacataattaccgaagtaattcggatgactggattcatgaaggggctgtataccgatgctgagatgaagtccgataatgtaaaggacaaggatgcaaaaatctctttcttgcagaaagctatcgacgttgtggtgatggtgtccggggagcctctccttgcaaaacccgcaagaatcgtggctggacacgagcccgagagaaccaacgaattgttgcagatcattggcaagtgctgcctgaataagctctctagcgacgatgcagttcgccgtgtgctggctggggaaaagggagaggtgaagggaagggcctcacttaccagccggtctcaagagctggataacaaaaacgttagggaagaagagagccgggtgcacaagaacacagaggatcgcggggacgccgagattaaggagagatctactagtagagatcgcaaacagaaagaggagctcaaggaggacagaaaaccgcgggaaaaggacaaagacaaggagaaggcgaaggagaatggtggtaaccgacatagagagggcgaacgagaacgcgcaaaggcacgggcacgcccagacaatgagagacagaaagataggggcaatcgtgaacgggatcgcgattctgaacgcaagaaggaaaccgaacgcaaatctgaggggggtaaggagaaggaacggctccgcgatcgagaccgagagagagacagggataagggaaaggaccgcgacagaagaagggtgaagaatggagaacatagttgggatctggatcgcgagaaaaatagagagcacgacaagcccgaaaagaagagcgcttccagtggagagatgtccaagaagctcagcgatgggaccttcaaggatagcaaggcggagactgagacggaaataagcactagagcctccaagagcctaaccaccaagactagcaagcgtcggtccaagaattctgtggagggagacagcacctccgacgctgagggggacgccggacccgccgggcaagacaagtccgaggtcccagagacccccgaaattcctaacgagctcagctctaacatccgccgcataccccgacctggctcagcccggccagctcctcctagagtaaaaagacaggattcaatggaagcattacaaatggatcggagcggtagtggcaagactgttagcaacgtcattaccgagtcacacaattccgataacgaggaagatgatcagttcgttgtggaagcggccccccagctctctgagatgtccgagatcgaaatggtcactgccgttgagctggaggaggaggaaaagcacggcgggctcgtgaagaaaattctggaaaccaagaaggactacgaaaaacttcagcagtcgccaaagcctggggaaaaggaacgcagtctgttcgagtctgcctggaaaaaggagaaagatatcgtttccaaagaaattgaaaagttacggacctccatccagacattatgtaagagtgccttgccactgggaaagatcatggactatattcaggaggacgtggatgcaatgcaaaatgagctgcagatgtggcattctgaaaataggcagcatgcagaggctctccagcaggaacaacggattaccgattgcgccgtggaacccctcaaggcagagctggctgagcttgagcagctgattaaagaccaacaggataaaatctgtgctgtgaaagcaaatattctgaaaaatgaggagaaaattcagaagatggtgtattcaatcaatctcacctcacgcagatag

SEQ ID NO: 52725 - DNA, 1878 bp, Artificial Sequence
  derived and/or modified sequence
atgaatgctgctgtggttcgacggactcaggaagcactgggaaaagtgattcgtcgccccccgttgaccgagaagctgctctccaaacccccgttccggtacttgcacgacatcattactgaagtgatcaggatgactggattcatgaaaggactgtacaccgacgcggagatgaaatctgataacgtcaaggacaaggacgccaagataagttttctgcagaaggcaattgatgtcgtggttatggtgtcaggcgagcctctgttggctaagcctgccagaatagtcgccggccatgagcccgagcggacaaatgaactgctgcagattatcggcaaatgttgtctgaataaattgtcatcagacgacgcagtgagaagagtgctcgcaggagaaaagggagaagtgaaggggagagccagcttgacctccaggtcccaagagctggataataagaacgtaagggaagaagagtcgagagtacacaagaacactgaggaccgcggagatgcagagataaaggagcgatctacttctcgcgatcgcaaacaaaaggaagagctcaaagaggaccggaaaccccgggagaaggacaaggataaagaaaaagctaaagagaatgggggcaaccgacaccgtgaaggagagagggagcgagccaaagctagggccaggccagacaacgagagacagaaagatagaggtaatcgcgaacgggatagggattccgaacggaagaaagagactgagagaaaatccgagggcggaaaagagaaagaacgcttgcgggatagagaccgggaaagggacagagacaaagggaaggaccgtgatagaaggcgagtgaaaaatggggagcacagctgggacctggaccgagaaaagaatagagagcacgataagcccgaaaagaaatctgctagttctggtgagatgtcaaagaaattgagcgacggaaccttcaaggattcaaaagccgaaaccgaaacagaaatatccacacgggcctcaaaaagcttgactaccaagacgagcaagcgtcgttcaaaaaactccgttgaagggaccgcaaagctgatcctagagggtgacgctggacctgccggacaggacaagagcgaggtgccagaaactcccgaaatcccaaacgaactcagtagcaatatcaggaggataccccggccaggatccgctcgaccagccccaccccgagtaaaacggcaagattccatggaggcgttacagatggatcggtccggtagtgggaagacagtttcgaatgtcatcactgaaagtcataattccgataacgaagaagacgaccagttcgttgtggaggccgcgccccaactcagcgagatgtcggaaattgagatggtgaccgccgtcgagctcgaggaagaagagaagcacggggggctggtgaaaaagattctggagacaaagaaagactatgaaaaacttcagcagagcccgaaaccgggggaaaaagaacgctcgctgttcgaatctgcctggaagaaagaaaaggatatcgtcagcaaagagatcgagaagcttcgaacaagcatacagacgctgtgtaaatccgctctgcccctgggaaagattatggattacattcaggaagacgtagatgctatgcagaatgagctacagatgtggcactccgagaacagacagcacgcggaggctctgcagcaagagcagaggatcactgactgtgcagtagaaccattgaaggcggaactggccgagctggaacagctgattaaggatcagcaagataagatttgtgcggttaaggcgaatattctgaaaaacgaggagaagatccagaagatggtgtattcaataaatctgacgtcccggaggtag

SEQ ID NO: 52726 - DNA, 1878 bp, Artificial Sequence
  derived and/or modified sequence
atgaatgctgctgtggtgcggaggacccaggaggccctgggcaaggtgatccggcggccccccctgacagagaagctgctgagcaagccacccttccgctacctgcatgacatcatcacagaggtgatccgcatgacaggcttcatgaagggcctgtacacagatgctgagatgaagagtgacaacgtgaaggacaaggatgccaagatctccttcctgcagaaggccattgatgtggtggtgatggtgtctggagagcccctgctggccaagccagccagaattgtggccggccacgagcctgagaggaccaatgagctgctgcagatcatcggcaagtgctgcctgaacaagctgagcagtgatgatgctgtgcggcgggtgctggccggggagaagggggaggtgaagggccgggccagcctgaccagccgcagccaggagctggacaacaagaatgtgcgggaggaggagagccgggtgcacaagaacacagaggacagaggagatgctgagatcaaggagaggagcaccagccgggacaggaagcagaaggaggagctgaaggaggacaggaagccccgggagaaggacaaggacaaggagaaggccaaggaaaatggaggcaacagacaccgggagggggagcgggagcgggccaaggcccgggcccggccagacaatgaaaggcagaaggaccggggcaaccgggagcgggaccgggacagcgagaggaagaaggagacagagaggaagtctgagggcggcaaggagaaggagcggctgcgggaccgggaccgggagcgggaccgggacaagggcaaggaccgggacagaagaagagtgaagaatggagagcacagctgggacctggaccgggagaagaaccgggagcatgacaagccagagaagaagagcgccagcagtggagagatgagcaagaagctgagtgatggcaccttcaaggacagcaaggccgagacagaaacagagatcagcacccgggccagcaagagcctgaccaccaagaccagcaagagaagaagcaagaacagcgtggagggggacagcaccagtgatgctgaaggagatgctggccctgctggccaggacaagtctgaggtgcctgagaccccagagatccccaatgagctgagcagcaacatccgccgcatccccaggcctggcagcgcccggcctgccccaccccgggtgaagaggcaggacagcatggaggccctgcagatggacagaagtggcagcggcaagacagtgtccaatgtcatcacagagagccacaacagcgacaatgaagaagatgaccagtttgtggtggaggccgccccccagctgtctgagatgtctgaaattgagatggtgacagctgtggagctggaggaggaggagaagcatggaggcctggtgaagaagatcctggagaccaagaaggactatgagaagctgcagcagagccccaagccaggagagaaggagaggagcctgtttgagagcgcctggaagaaggagaaggacatcgtgtccaaggagattgagaagctgcggaccagcatccagaccctgtgcaagagcgccctgcccctgggcaagatcatggactacatccaggaggatgtggatgccatgcagaatgagctgcagatgtggcacagcgagaaccggcagcacgccgaggccctgcagcaggagcagaggatcacagactgtgctgtggagcccctgaaggccgagctggccgagctggagcagctgatcaaggaccagcaggacaagatctgtgctgtgaaggccaacatcctgaagaatgaggagaagatccagaagatggtgtacagcatcaacctgaccagcagaagatag

SEQ ID NO: 52727 - DNA, 1878 bp, Artificial Sequence
  derived and/or modified sequence
atgaatgctgctgtggtgcggaggacccaggaggccctgggcaaggtgatccggcggccccccctgacagagaagctgctgagcaagccacccttccgctacctgcatgacatcatcacagaggtgatccgcatgacaggcttcatgaagggcctgtacacagatgctgagatgaagagtgacaacgtgaaggacaaggatgccaagatctccttcctgcagaaggccattgatgtggtggtgatggtgtctggagagcccctgctggccaagccagccagaattgtggccggccacgagcctgagaggaccaatgagctgctgcagatcatcggcaagtgctgcctgaacaagctgagcagtgatgatgctgtgcggcgggtgctggccggggagaagggggaggtgaagggccgggccagcctgaccagccgcagccaggagctggacaacaagaatgtgcgggaggaggagagccgggtgcacaagaacacagaggacagaggagatgctgagatcaaggagaggagcaccagccgggacaggaagcagaaggaggagctgaaggaggacaggaagccccgggagaaggacaaggacaaggagaaggccaaggaaaatggaggcaacagacaccgggagggggagcgggagcgggccaaggcccgggcccggccagacaatgaaaggcagaaggaccggggcaaccgggagcgggaccgggacagcgagaggaagaaggagacagagaggaagtctgagggcggcaaggagaaggagcggctgcgggaccgggaccgggagcgggaccgggacaagggcaaggaccgggacagaagaagagtgaagaatggagagcacagctgggacctggaccgggagaagaaccgggagcatgacaagccagagaagaagagcgccagcagtggagagatgagcaagaagctgagtgatggcaccttcaaggacagcaaggccgagacagaaacagagatcagcacccgggccagcaagagcctgaccaccaagaccagcaagagaagaagcaagaacagcgtggagggcacagccaagctgatcctggagggagatgctggccctgctggccaggacaagtctgaggtgcctgagaccccagagatccccaatgagctgagcagcaacatccgccgcatccccaggcctggcagcgcccggcctgccccaccccgggtgaagaggcaggacagcatggaggccctgcagatggacagaagtggcagcggcaagacagtgtccaatgtcatcacagagagccacaacagcgacaatgaagaagatgaccagtttgtggtggaggccgccccccagctgtctgagatgtctgaaattgagatggtgacagctgtggagctggaggaggaggagaagcatggaggcctggtgaagaagatcctggagaccaagaaggactatgagaagctgcagcagagccccaagccaggagagaaggagaggagcctgtttgagagcgcctggaagaaggagaaggacatcgtgtccaaggagattgagaagctgcggaccagcatccagaccctgtgcaagagcgccctgcccctgggcaagatcatggactacatccaggaggatgtggatgccatgcagaatgagctgcagatgtggcacagcgagaaccggcagcacgccgaggccctgcagcaggagcagaggatcacagactgtgctgtggagcccctgaaggccgagctggccgagctggagcagctgatcaaggaccagcaggacaagatctgtgctgtgaaggccaacatcctgaagaatgaggagaagatccagaagatggtgtacagcatcaacctgaccagcagaagatag

SEQ ID NO: 52728 - DNA, 1878 bp, Artificial Sequence
  derived and/or modified sequence
atgaacgccgccgtggtgcggcggacccaggaggccctgggcaaggtcattcgccggccacccctgaccgagaaattgctgtctaagcccccatttcgatatctacatgacatcattaccgaggttattaggatgacaggatttatgaaaggactttacacggatgcggaaatgaagagcgacaacgttaaagacaaagacgccaaaataagtttcttacaaaaggctattgatgtcgtggttatggtgtcaggagaacctctgctcgcaaaacccgcacgcatcgtcgctggccatgagccagagcgaactaacgaactgctacagattatcggtaagtgttgtctgaacaagttgagctcagacgatgctgtccgccgggtgctggccggtgaaaagggagaagtcaaaggacgggcatctctaacatcgcgcagccaggaactcgataacaagaatgttagggaggaagagtctagagtccataagaacacggaggatcggggagatgcagagataaaggagcggtctacttctagggaccgtaaacagaaggaagagctaaaggaggaccgcaaacctcgggagaaagacaaagacaaggaaaaagcgaaagaaaatggcggcaaccgccacagagagggagagcgagagagagccaaggcaagggctcgacccgacaatgagcgccagaaggatagaggaaatagggagcgcgacagggactccgagcggaagaaggaaacagaacggaaatcggaaggcggcaaggagaaggagcgacttagggaccgggatcgagaaagagacagggataaagggaaggatcgggataggcgacgggtgaagaatggggaacactcctgggacctagaccgagagaaaaatcgagaacatgacaagcccgaaaagaaaagcgctagttccggcgaaatgagcaagaaactctctgatgggaccttcaaagacagcaaagcagagacagagacggaaatctccacacgggcaagcaagtcactcacgacaaaaacctctaagcggaggtccaagaactctgtcgagggtgactccacctccgatgccgagggagatgccggaccggctggtcaggataagtctgaggtccccgagaccccagagatccctaacgaactatctagtaacatccgcaggatcccccggccaggaagcgccagacccgcgcctccacgcgtgaagcgacaagactccatggaagccctccagatggaccgcagtggaagtggcaagacagtgagcaacgtgatcaccgagagtcacaatagcgacaacgaagaagacgatcagttcgtagtcgaagctgctccccaactatcagaaatgtcagagatcgagatggtcactgccgtggagctggaggaagaggagaaacacggcggtctggtcaaaaagatcttggagaccaagaaggattacgaaaaactgcaacaatccccgaaacccggagagaaggaaagaagtctgttcgagtccgcatggaagaaagagaaagacatagtttccaaagagatcgaaaagctacgcacgagtattcagactctgtgcaagtcagcactgcccttaggaaaaataatggattatattcaggaggatgtcgatgccatgcagaatgagctccagatgtggcatagcgagaacaggcagcatgctgaggccctgcagcaagagcagaggatcacagattgtgcagtcgaaccactgaaagcagagctggctgaacttgaacagttgatcaaggatcagcaagacaagatctgtgcagtgaaggcgaatatcctaaagaacgaggagaagattcaaaagatggtttatagcattaaccttacttctcgacgttag

SEQ ID NO: 52729 - DNA, 1878 bp, Artificial Sequence
  derived and/or modified sequence
atgaacgccgccgtggtgcggcggacccaggaggccctgggcaaggtcatcagaagaccccctttgactgagaaactgctgagcaagccccccttccggtacctgcacgacattattactgaggttatacgaatgacgggattcatgaaaggcctgtataccgatgcggagatgaagagtgataatgtgaaagataaggacgctaagatctccttcctgcagaaggccatcgatgtggtcgttatggtgagtggcgaacccttgttagcaaagccagcacgcattgtcgccggtcacgagccggagaggaccaatgagcttttacagatcattggcaaatgctgcctgaacaagctgagtagcgatgacgccgtgaggcgcgtgttggcaggggaaaaaggagaggtaaaggggagggcttccttaaccagtcgcagtcaggagctagataacaaaaacgtccgggaagaagaatctagagtgcataaaaacactgaggataggggagatgctgaaattaaggagaggtccactagccgggatcggaaacagaaggaggagctcaaggaggaccgaaagcccagggagaaagacaaagataaggagaaagccaaggaaaacggtggcaaccgacaccgtgagggcgaacgtgagcgagctaaagcacgggcacgccccgataatgaacgccagaaggatcggggtaatagggagcgggatcgagattccgaacgaaaaaaagagactgagcgcaaaagcgagggcggaaaggagaaagaacggctgcgggacagagacagggagagagaccgagacaagggaaaagatagagatagaagaagagttaaaaacggagagcatagctgggacctggaccgagagaaaaaccgggagcacgataagcctgaaaaaaaatcagcaagctccggagaaatgtccaaaaagttgtcagacggcaccttcaaggatagcaaggccgagacagagacggagataagtacccgtgctagtaaaagccttacaactaaaacttcaaagagacgcagtaagaactccgtagaaggcacggcaaagctaatccttgagggcgatgctggacctgctgggcaggacaaatcagaggtgccagagactcctgagattccgaacgaactgtcatcaaatatccggcgcataccgaggccagggtccgctcgaccagcccccccgagagtgaaacggcaggactcaatggaagccctgcaaatggaccggtcaggctccgggaagacagtgagcaacgtgattactgaaagtcacaactctgacaacgaagaggacgaccagtttgtcgtggaggccgctcctcagttgagcgagatgagcgaaatcgaaatggtcactgcggtcgaacttgaagaggaggaaaagcacggggggttagtgaaaaagatactagagacaaagaaagactatgagaagttgcaacagtcacctaaaccaggggaaaaagaacggagcctgtttgaaagtgcatggaaaaaggaaaaggacattgtgagcaaggaaatcgagaagctgcgcaccagcatccagacgctgtgtaaatcggcactcccactcggtaaaatcatggactacattcaggaggacgtagatgctatgcagaatgagctgcagatgtggcacagcgagaaccgacagcacgccgaggcactacagcaagaacagcgtattacggattgcgctgtggagccgctcaaagctgagctcgccgagctggaacagctgattaaagaccagcaggacaagatttgcgcggtgaaagctaatattctgaaaaatgaggagaagattcagaagatggtgtactccatcaatctgacaagtcgaagatag

SEQ ID NO: 52730 - DNA, 1878 bp, Artificial Sequence
  derived and/or modified sequence
atgaatgccgcagtggtgcgacggactcaggaagctctggggaaagtgatccgcaggccaccattaaccgaaaaactcctgtccaagcccccattccggtacctccacgatattatcacggaagtgatcagaatgaccggcttcatgaagggcctgtacactgatgctgagatgaaaagtgataacgtgaaggacaaagatgctaagattagctttttgcagaaggcgatcgacgtggttgttatggtctctggggagcctctgctggctaagcccgctagaatagtagctggacacgaacccgaacggactaatgaactcctccaaatcataggaaagtgttgccttaataagctttctagcgacgacgccgtccgtcgggtactcgcaggggagaaaggggaggtcaaaggcagggcttcgctcacatctaggtctcaagaattagataacaaaaacgtgcgtgaggaagagtctcgggtacacaaaaacaccgaagatcgcggtgacgcagaaattaaggagcgatctacttcaagggatcgcaagcagaaggaggaactgaaagaagaccgtaagccacgagagaaggacaaggataaggagaaagcaaaagaaaacggtggtaaccgtcaccgggagggcgaacgcgaacgcgcaaaggccagggccaggccagacaacgagcgacagaaagatcgagggaaccgggagcgggaccgcgacagcgagcggaaaaaagagacagaacgcaaaagcgagggtggcaaagaaaaggaaagattacgggacagagacagggagcgggatagagacaagggcaaagaccgggacaggaggcgggtgaagaatggcgagcactcgtgggacttagatcgggaaaagaatcgagagcatgacaagcccgaaaagaagtcggcatccagcggagagatgtctaaaaaactttccgatgggacatttaaggattcaaaggcggaaaccgagaccgagattagcacccgagcgtcaaaatctctgaccacaaaaacctcaaagcggagatctaaaaacagtgtggaaggtgattccacaagcgatgccgagggcgacgccggtccagcagggcaggacaagagtgaggtgcccgagactcccgaaataccaaatgagttatcctccaacatccggcgaatccccaggcctggtagtgcgcgtcccgcacctccaagggtgaagcgacaggacagtatggaagccctgcagatggaccggagtgggtccggcaagacagtcagtaatgtaatcaccgagtcccacaattctgataatgaggaggacgatcagtttgttgtggaggccgcaccccagctgtccgagatgtctgagatcgagatggtgacagccgtggagctggaggaggaggagaaacacggcggattggtgaaaaagatcctcgagaccaaaaaggattatgaaaagcttcagcagagtcccaaaccaggcgagaaagaacgttctttattcgaatccgcttggaagaaagagaaagacatcgtgagtaaagagattgagaagctgcgtacttctattcaaacactgtgcaaatctgcgctgcccctaggtaagattatggattatatccaggaagacgtggatgctatgcagaacgaacttcagatgtggcactcggagaacaggcagcatgctgaagcactccaacaggaacagaggatcactgattgcgcagtggagcctttaaaggccgaactcgctgagttggagcagctcatcaaagatcagcaggataagatttgcgccgtgaaggctaacattttaaagaatgaagaaaaaatccaaaaaatggtctattcaattaacttaacctcccgccgatag

SEQ ID NO: 52731 - DNA, 1878 bp, Artificial Sequence
  derived and/or modified sequence
atgaacgctgcagtggtgcggagaactcaggaggctctgggtaaggttattcgacgaccacctctcacggagaagctgctctcaaaaccgccattcagatacctccacgacatcattactgaagtgattaggatgactggattcatgaagggcctgtacacagacgccgagatgaaatccgacaacgttaaagacaaggacgctaaaatttcctttctccagaaggctatcgacgtggtggtcatggtctccggagagcccctgctcgccaaacccgctaggatcgtggccggtcacgagcccgagaggaccaacgagctcctgcagattatcggcaaatgttgcctgaacaaactatcttctgatgatgcggttaggcgtgtgctcgccggtgagaagggcgaagtgaagggcagagcatccctgactagccggagccaggagctcgataacaaaaacgtgagagaagaggagagcagggttcacaagaacactgaggacaggggcgacgcagagataaaagagaggagtacatcgcgagatcgcaaacagaaggaagagctgaaagaggatagaaagccacgcgaaaaggataaagacaaggagaaggcaaaggagaacgggggaaatagacatcgggaaggggagagggagagggccaaggccagggctcggccagataacgagcggcaaaaagatcggggaaatcgtgaacgggatcgcgattcagaaaggaagaaagagaccgaacggaagtctgagggaggcaaagagaaagagagactccgcgaccgcgatagagagcgagatagagataagggtaaagaccgggatcgacggagagtcaaaaacggcgaacacagctgggaccttgatcgcgagaaaaatcgagaacatgataaacccgagaaaaaaagcgcaagcagcggtgaaatgagcaaaaagttatcggacggcacatttaaggattcgaaagccgaaactgagaccgaaatcagtacaagagctagcaaaagcctgaccacaaagacaagcaaacggaggagcaaaaacagcgtcgaaggaaccgccaaactgatcctggagggcgacgccggaccagcgggacaagataaaagcgaggtgccagaaacccccgagattcccaatgaactttccagtaatattcgccgtattcccaggccgggaagcgctagaccagctccaccacgcgtgaaacggcaagatagtatggaagcccttcaaatggaccggtcaggctccggcaagaccgtcagcaacgttatcaccgagagtcacaactccgacaacgaggaggatgatcaattcgtcgtcgaggccgcaccacagctgtctgaaatgtcagaaatcgagatggttacagccgtcgaactggaagaagaggagaaacatggcggactagtgaagaaaattctcgaaactaagaaagattacgaaaaactgcagcagtcgcctaaaccaggagagaaggagcgaagtctctttgagtccgcttggaaaaaagagaaagatatagtgagtaaagagatcgaaaaactgcgcacctcaatccaaactttgtgtaagtctgcactgccactagggaaaatcatggattatatacaagaagacgtggacgcaatgcagaacgaacttcaaatgtggcactccgagaatcggcagcatgccgaagcactgcaacaggagcaacgcatcacagattgtgctgtggaaccattgaaagccgagctggcggagctggaacagctgataaaagatcagcaggataagatatgcgccgtgaaggccaacattctgaaaaatgaggagaagattcaaaagatggtctactccatcaacctcaccagtcgccgatag

SEQ ID NO: 52732 - DNA, 4003 bp, Artificial Sequence
  derived and/or modified sequence
gtccgttgctaaggccgcgcagccctagtgaccgaacgccctgcggcggccgcgcaggcgctgtggtgggctccggtgcactgtgggatggaaaccggagcggcgcgtcctggcaggaccgggcggcggcggcggcggggccggcggcggccagggacccgggcttaggctcggccaggccggctgaggggcgcgggcggccagcgggcggcggacgccgtcatgaacgcggcggtggtgaggcggacgcaggaggcgctggggaaagtgattcggaggccgccgctgaccgagaagctgctgagcaagcccccgttccgctacctgcacgacatcatcacggaggtgattagaatgactggtttcatgaagggcctctacacagacgccgagatgaagtctgataatgtgaaggataaagatgcaaaaattagcttcctacaaaaggccatagacgtggttgtaatggtgtcgggagagccactgttggccaaaccagcccgaatcgtggcggggcatgagcctgaaagaacaaacgagctgctccagataattggaaaatgctgtctcaacaagctctctagtgacgatgcggtgcggagggttttagctggagagaagggagaagtgaaaggccgggcctcactgacctcaagatctcaggaattggataataagaatgtgcgagaagaagagtccagagttcacaaaaatacagaggatagaggagacgctgaaataaaagagagaagtacaagcagagatcgaaaacagaaggaagaattgaaagaagaccgcaagccaagagaaaaggacaaggacaaggagaaggccaaggagaatggcggaaacagacacagagaaggggagagagagagagccaaagcccgggccaggccagacaacgagcgacagaaagacagaggcaacagggagcgggacagagactccgagcgcaagaaggagacagagagaaagagtgagggggggaaagagaaggagagactgagagacagggaccgagagcgcgaccgggacaaagggaaggacagggacagacggagagtgaaaaacggggagcactcctgggacctggacagggagaagaacagagagcatgacaaacctgagaaaaagtcagcaagctcaggggagatgtctaaaaagttatcagatggaacttttaaagactccaaggctgaaacagagactgagatttccactagagcttccaagtcattgacaacaaaaacatcaaaacggcgatccaaaaattcagtggaaggtgactccaccagtgatgcagaaggagatgctggacctgctggccaagataagtctgaggtgccagagactccagaaattcctaatgagctttcatccaacatcagaagaattcctcggcctgggagtgcaagaccagcccctccccgggtcaaacggcaagacagcatggaggcgctacaaatggataggtcagggagtggtaaaaccgtttcaaatgtgattacagagtcacacaattctgacaatgaagaggatgatcaatttgtggtggaagctgcccctcagctctctgaaatgtcagaaattgaaatggtaacagcagtggaactagaagaagaggagaagcatggtggacttgtgaaaaaaattttggagacgaagaaagattatgagaaattgcagcagtcacccaaacctggggagaaggagcgatctctctttgagtcggcatggaagaaggagaaggacatcgtttccaaggagatagagaagctccgcacgtccatccagaccctgtgcaagagcgcacttcccctggggaagatcatggactacatccaggaagacgtggatgccatgcagaatgagctgcagatgtggcacagcgagaacaggcagcacgccgaggccctgcagcaggagcagaggatcacagactgtgccgtggagcccttaaaggctgagctcgcggagctggagcagctgatcaaagaccagcaagacaagatctgtgctgtgaaggccaacatcctcaagaatgaagaaaaaatccagaaaatggtatatagtatcaatttgacttcgagaaggtgaacactcaaaagtttcagagatgaaaagtcacctcagtttaaaagcaaaaaggaagatagaaaatcattactcttttaagttccagtttgctaagaaaatgaacagtttacaatgttattatccagctaattttcagagctttaaaactgtaagcatgttaagtgtattaaaaaaaccatgttttcttacctccttccagatggaatactggctagttataaatagcgcttccaaacacctctgtgaaaagtttttttgaaagcctgttctttgtgtttctgctgtaacctgtttagttctgtaccagaactctctagcaggtaagtggtgtgggcataccaagggaacagtagtcctttattttggtttagtggaaagactttcagaggtcagtgccgaatgaaggatgactgtgtactttttgataggcacttgataagtagaatgaggcctgaaaatgaatacattatatttttagttaatttccaatggaaagggctaacctcagcctgtctccatatcaggtacctatcaactggattgttttcatttttgttttttgacctctttgtaattgcatgtacttctctatgtaattttcctcttgatctctactatcgtttgcttgtgtttctagtccttaaagttcataaatttaaaaaggagatttcaggatggcctttatggacgttgtctggacatacatcctcactttcttccgcagtttaccctggttttcctcagacagaggctagcgcagccccccggagtccttgttctccttaagagggtctcgctctgcaaagcattggcgccatggcttttcctttgcatgggtgtgcataccgagagacaggcagcttaggaaaaacaacataaggaagacttaaaaggatgcactgatttacgacgttttttgatgttagccatttttttggaaattgttttttaaagcaaaagttttttaaaaacatggtttatagtttttcacttacatatactattgtaaatacttagcagagtcttaagttactgtataaaacatttcattgtgtttgaagacatacttatgggtcttgaggtctgggtcctaatacttttaaatagtgtatttattatgtaaactgaggagtgccatttaaagtgtgaggattgcctgaaaaggttttgtttctttcttttttttttttttttgagatggagtcttactctgtcgcccaggctggagtgcagtggcgcaatctcggctcactgcaaccaccgcctcccgagttcaagtgattctcctgcctcagcctcctgagtaactgggactacaggcgcacgccaccatgcccagctaatttttgtattttcagtagagatggggtttcaccgtgttgaccaggatggtctccacctcctgacctcgtgatccgcctgcctcggcctcccaaagtgctgggattacaggcatgagccactgcacccggccaggttttgtttctttaaggattagcacaaatggcaccgttgggtttttcttcatacaatttccaaaataaattctgtactcaggttgttatatgattttctgagctgaataagttcaggagcagattattaagatctgccattctgaaacgctggtctttttctccttcctatagtgcaccataaaattctgtttgatcagattatattacatacattttgggggagtggagggacatgagttaagtagcccttcatgtatttataatctcttttctactgaatcaaatgacttagccatgaccctgaatggaccttgttttacttcaagttgagatgtctgccttttatgaatttgtatatgtgaatagagtttgggggttgccaaaaattgcatacattgtatgtaagtaaaattttttatgaagta

SEQ ID NO: 52733 - DNA, 3974 bp, Artificial Sequence
  derived and/or modified sequence
cgcgtcctggcaggaccgggcggcggcggcggcggggccggcggcggccagggacccgggcttaggctcggccaggccggctgaggggcgcgggcggccagcgggcggcggacgccgtcatgaacgcggcggtggtgaggcggacgcaggaggcgctggggaaagtgattcggaggccgccgctgaccgagaagctgctgagcaagcccccgttccgctacctgcacgacatcatcacggaggtgattagaatgactggtttcatgaagggcctctacacagacgccgagatgaagtctgataatgtgaaggataaagatgcaaaaattagcttcctacaaaaggccatagacgtggttgtaatggtgtcgggagagccactgttggccaaaccagcccgaatcgtggcggggcatgagcctgaaagaacaaacgagctgctccagataattggaaaatgctgtctcaacaagctctctagtgacgatgcggtgcggagggttttagctggagagaagggagaagtgaaaggccgggcctcactgacctcaagatctcaggaattggataataagaatgtgcgagaagaagagtccagagttcacaaaaatacagaggatagaggagacgctgaaataaaagagagaagtacaagcagagatcgaaaacagaaggaagaattgaaagaagaccgcaagccaagagaaaaggacaaggacaaggagaaggccaaggagaatggcggaaacagacacagagaaggggagagagagagagccaaagcccgggccaggccagacaacgagcgacagaaagacagaggcaacagggagcgggacagagactccgagcgcaagaaggagacagagagaaagagtgagggggggaaagagaaggagagactgagagacagggaccgagagcgcgaccgggacaaagggaaggacagggacagacggagagtgaaaaacggggagcactcctgggacctggacagggagaagaacagagagcatgacaaacctgagaaaaagtcagcaagctcaggggagatgtctaaaaagttatcagatggaacttttaaagactccaaggctgaaacagagactgagatttccactagagcttccaagtcattgacaacaaaaacatcaaaacggcgatccaaaaattcagtggaaggtactgcaaaacttattttagaaggagatgctggacctgctggccaagataagtctgaggtgccagagactccagaaattcctaatgagctttcatccaacatcagaagaattcctcggcctgggagtgcaagaccagcccctccccgggtcaaacggcaagacagcatggaggcgctacaaatggataggtcagggagtggtaaaaccgtttcaaatgtgattacagagtcacacaattctgacaatgaagaggatgatcaatttgtggtggaagctgcccctcagctctctgaaatgtcagaaattgaaatggtaacagcagtggaactagaagaagaggagaagcatggtggacttgtgaaaaaaattttggagacgaagaaagattatgagaaattgcagcagtcacccaaacctggggagaaggagcgatctctctttgagtcggcatggaagaaggagaaggacatcgtttccaaggagatagagaagctccgcacgtccatccagaccctgtgcaagagcgcacttcccctggggaagatcatggactacatccaggaagacgtggatgccatgcagaatgagctgcagatgtggcacagcgagaacaggcagcacgccgaggccctgcagcaggagcagaggatcacagactgtgccgtggagcccttaaaggctgagctcgcggagctggagcagctgatcaaagaccagcaagacaagatctgtgctgtgaaggccaacatcctcaagaatgaagaaaaaatccagaaaatggtatatagtatcaatttgacttcgagaaggtgaacactcaaaagtttcagagatgaaaagtcacctcagtttaaaagcaaaaaggaagatagaaaatcattactcttttaagttccagtttgctaagaaaatgaacagtttacaatgttattatccagctaattttcagagctttaaaactgtaagcatgttaagtgtattaaaaaaaccatgttttcttacctccttccagatggaatactggctagttataaatagcgcttccaaacacctctgtgaaaagtttttttgaaagcctgttctttgtgtttctgctgtaacctgtttagttctgtaccagaactctctagcaggtaagtggtgtgggcataccaagggaacagtagtcctttattttggtttagtggaaagactttcagaggtcagtgccgaatgaaggatgactgtgtactttttgataggcacttgataagtagaatgaggcctgaaaatgaatacattatatttttagttaatttccaatggaaagggctaacctcagcctgtctccatatcaggtacctatcaactggattgttttcatttttgttttttgacctctttgtaattgcatgtacttctctatgtaattttcctcttgatctctactatcgtttgcttgtgtttctagtccttaaagttcataaatttaaaaaggagatttcaggatggcctttatggacgttgtctggacatacatcctcactttcttccgcagtttaccctggttttcctcagacagaggctagcgcagccccccggagtccttgttctccttaagagggtctcgctctgcaaagcattggcgccatggcttttcctttgcatgggtgtgcataccgagagacaggcagcttaggaaaaacaacataaggaagacttaaaaggatgcactgatttacgacgttttttgatgttagccatttttttggaaattgttttttaaagcaaaagttttttaaaaacatggtttatagtttttcacttacatatactattgtaaatacttagcagagtcttaagttactgtataaaacatttcattgtgtttgaagacatacttatgggtcttgaggtctgggtcctaatacttttaaatagtgtatttattatgtaaactgaggagtgccatttaaagtgtgaggattgcctgaaaaggttttgtttctttcttttttttttttttttgagatggagtcttactctgtcgcccaggctggagtgcagtggcgcaatctcggctcactgcaaccaccgcctcccgagttcaagtgattctcctgcctcagcctcctgagtaactgggactacaggcgcacgccaccatgcccagctaatttttgtattttcagtagagatggggtttcaccgtgttgaccaggatggtctccacctcctgacctcgtgatccgcctgcctcggcctcccaaagtgctgggattacaggcatgagccactgcacccggccaggttttgtttctttaaggattagcacaaatggcaccgttgggtttttcttcatacaatttccaaaataaattctgtactcaggttgttatatgattttctgagctgaataagttcaggagcagattattaagatctgccattctgaaacgctggtctttttctccttcctatagtgcaccataaaattctgtttgatcagattatattacatacattttgggggagtggagggacatgagttaagtagcccttcatgtatttataatctcttttctactgaatcaaatgacttagccatgaccctgaatggaccttgttttacttcaagttgagatgtctgccttttatgaatttgtatatgtgaatagagtttgggggttgccaaaaattgcatacattgtatgtaagtaaaattttttatgaagtagtctgtcaaattgtatcataaagtttatttttcttttatacgtaaatcattaaaaataatcacatattttttcc

SEQ ID NO: 52734 - protein, 199 aa, Artificial Sequence
  derived and/or modified sequence
MSGKVTKPKEEKDASKEPQLKGIVTKLYSRQGYHLQLQADGTIDGTKDEDSTYTLFNLIPVGLRVVAIQGVQTKLYLAMNSEGYLYTSELFTPECKFKESVFENYYVTYSSMIYRQQQSGRGWYLGLNKEGEIMKGNHVKKNKPAAHFLPKPLKVAMYKEPSLHDLTEFSRSGSGTPTKSRSVSGVLNGGKSMSHNEST

SEQ ID NO: 52735 - DNA, 600 bp, Artificial Sequence
  derived and/or modified sequence
atgagcggcaaggtgaccaagcccaaggaggagaaggacgccagcaaggagccccagctgaagggcatcgtgaccaagctgtacagcagacagggctaccacctgcagctgcaggccgacggcaccatcgacggcaccaaggacgaggacagcacctacaccctgttcaacctgatccccgtgggcctgagagtggtggccatccagggcgtgcagaccaagctgtacctggccatgaacagcgagggctacctgtacaccagcgagctgttcacccccgagtgcaagttcaaggagagcgtgttcgagaactactacgtgacctacagcagcatgatctacagacagcagcagagcggcagaggctggtacctgggcctgaacaaggagggcgagatcatgaagggcaaccacgtgaagaagaacaagcccgccgcccacttcctgcccaagcccctgaaggtggccatgtacaaggagcccagcctgcacgacctgaccgagttcagcagaagcggcagcggcacccccaccaagagcagaagcgtgagcggcgtgctgaacggcggcaagagcatgagccacaacgagagcacctag

SEQ ID NO: 52736 - DNA, 600 bp, Artificial Sequence
  derived and/or modified sequence
atgtccggaaaagttacaaaaccaaaagaggaaaaagacgcctccaaagagccccagctgaagggtatcgtcacgaagctgtactcccgacagggctaccatcttcaacttcaggccgacgggaccatcgatggtactaaagacgaggactccacgtatacgctcttcaatctaatccctgttgggcttcgggttgtagctatacagggtgtacaaaccaagctgtacctggccatgaacagcgaaggctacctgtacacctccgagttgtttactcccgagtgtaagtttaaggaatccgtcttcgagaactattacgtgacgtattcctccatgatctatagacagcagcaatcaggaagggggtggtacctcggcctaaataaagaaggggaaatcatgaaaggaaatcacgtgaaaaaaaataagcctgcagcccatttcctgccgaaacccctgaaggttgcaatgtataaggagccaagtttgcacgatctgacagaattttctagatcgggttctggaacacccaccaagtctagatccgtaagtggagtgctgaatggaggcaaaagtatgtcccataacgaatctacttag

SEQ ID NO: 52737 - DNA, 600 bp, Artificial Sequence
  derived and/or modified sequence
atgtctgggaaggtgaccaagcccaaggaggagaaggatgccagcaaggagccccagctgaagggcatcgtgaccaagctgtacagccggcagggctaccacctgcagctgcaggctgatggcaccattgatggcaccaaggatgaggacagcacctacaccctcttcaacctgatccctgtgggcctgcgggtggtggccatccagggcgtgcagaccaagctgtacctggccatgaacagcgagggctacctgtacaccagcgagctgttcaccccagagtgcaagttcaaggagagcgtgtttgagaactactacgtgacctacagctccatgatctaccggcagcagcagagcggccggggctggtacctgggcctgaacaaggagggggagatcatgaagggcaaccacgtgaagaagaacaagccagctgcccacttcctgcccaagcccctgaaggtggccatgtacaaggagcccagcctgcatgacctgacagagttcagccgcagcggcagcggcacccccaccaagagccgctctgtgtctggagtgctgaatggaggcaagtccatgagccacaatgaaagcacctag

SEQ ID NO: 52738 - DNA, 600 bp, Artificial Sequence
  derived and/or modified sequence
atgagcggcaaggtgaccaagcccaaggaggagaaggacgccagcaaggagccacaactgaaagggattgttaccaaactgtacagcaggcagggttatcatctgcagctccaggccgacggcactattgacggcacaaaagatgaggactcgacttacacactattcaatctgattcctgtggggctgcgagtggttgctatacagggcgtccagacaaaactgtacctggccatgaacagtgaaggctacctttacacttccgagctcttcaccccagaatgtaagtttaaagagtctgtttttgagaactattatgtgacatactctagtatgatttataggcaacagcaaagcggcagaggctggtacttggggctgaataaagaaggcgagattatgaaggggaatcacgtgaagaaaaacaagccggccgcacacttcctcccaaagcccctgaaggtggctatgtataaagagccaagcctccacgacttaacagagttttccaggtccgggagtggtacccccacaaaatccaggagtgtctccggcgtgctgaacgggggcaaatccatgtcccacaacgaatccacttag

SEQ ID NO: 52739 - DNA, 600 bp, Artificial Sequence
  derived and/or modified sequence
atgtcaggcaaggtcaccaagccaaaggaggaaaaggatgcgtctaaggaaccacaattgaaggggatcgtgactaaactctattcaaggcagggttaccatttgcagctgcaagccgatggcactatcgatgggactaaagacgaggatagcacttacacactgtttaatctcatcccagtgggacttcgcgtggttgcgatccagggggtacaaacaaaactgtatttagctatgaattcagagggatacctttatacatccgagctttttacgcccgaatgcaaatttaaagagagtgtgtttgaaaactattatgtcacgtactcgtccatgatttacaggcagcaacagtctggacggggttggtacttgggcctcaacaaagagggtgaaatcatgaaaggcaaccatgtgaaaaagaacaaacccgctgcccactttctccccaaacctttaaaggttgccatgtataaagagccaagcctccatgacctcaccgaatttagccgttcagggtccggcacaccaacgaaaagccggtcggtgagcggagtcctcaatggtggcaagagcatgagtcacaacgagagcacatag

SEQ ID NO: 52740 - DNA, 600 bp, Artificial Sequence
  derived and/or modified sequence
atgagtggaaaggtgaccaagcccaaagaggagaaagatgcttctaaggagcctcagcttaagggtatagttaccaagctatacagccgacaaggctaccacttgcagctgcaggcggatggaaccattgatggcaccaaagatgaggacagcacttacactctgtttaacctcatccctgtgggtctgcgagtggtggctatccaaggagttcaaaccaagctgtacttggcaatgaacagtgagggatacttgtacacctcggaacttttcacacctgagtgcaaattcaaagaatcagtgtttgaaaattattatgtgacatattcatcaatgatataccgtcagcagcagtcaggccgagggtggtatctgggtctgaacaaagaaggagagatcatgaaaggcaaccatgtgaagaagaacaagcctgcagctcattttctgcctaaaccactgaaagtggccatgtacaaggagccatcactgcacgatctcacggagttctcccgatctggaagcgggaccccaaccaagagcagaagtgtctctggcgtgctgaacggaggcaaatccatgagccacaatgaatcaacgtag

SEQ ID NO: 52741 - DNA, 2172 bp, Artificial Sequence
  derived and/or modified sequence
gtggctctctaggaccggagagttctttggaaggagagcgcgagcgagggagcgggcgagctccgagggggtgtgggtgtagggagagagagaaagagagcaggcagcggcggcggcggcagcggtggggaaaagcggattccgccccgaaccacaccgaggggagctcgtggtcgagacttgccgccctaagcactctcccaagtccgacccgctcggcgaggacttccgtcttctgagcgaaccttgtcaagcaagctgggatctatgagtggaaaggtgaccaagcccaaagaggagaaagatgcttctaaggagcctcagcttaagggtatagttaccaagctatacagccgacaaggctaccacttgcagctgcaggcggatggaaccattgatggcaccaaagatgaggacagcacttacactctgtttaacctcatccctgtgggtctgcgagtggtggctatccaaggagttcaaaccaagctgtacttggcaatgaacagtgagggatacttgtacacctcggaacttttcacacctgagtgcaaattcaaagaatcagtgtttgaaaattattatgtgacatattcatcaatgatataccgtcagcagcagtcaggccgagggtggtatctgggtctgaacaaagaaggagagatcatgaaaggcaaccatgtgaagaagaacaagcctgcagctcattttctgcctaaaccactgaaagtggccatgtacaaggagccatcactgcacgatctcacggagttctcccgatctggaagcgggaccccaaccaagagcagaagtgtctctggcgtgctgaacggaggcaaatccatgagccacaatgaatcaacgtagccagtgagggcaaaagaagggctctgtaacagaaccttacctccaggtgctgttgaattcttctagcagtccttcacccaaaagttcaaatttgtcagtgacatttaccaaacaaacaggcagagttcactattctatctgccattagaccttcttatcatccatactaaagccccattatttagattgagcttgtgcataagaatgccaagcattttagtgaactaaatctgagagaaggactgccaaattttctcatgatctcacctatactttggggatgataatccaaaagtatttcacagcactaatgctgatcaaaatttgctctcccaccaagaaaatgtaaaagaccacaattgttcttcaaaaacaaacaaaacaaaacaaaacaaaattaactgcttaaatgttttgtcggggcaaacaaaattatgtgaattgtgttgttttcttggcttgatgttttctatctacgcttgattcacatgtactcttttctttggcatagtgcaactttatgatttctgaaattcaatggttctattgactttttgcgtcacttaatccaaatcaaccaaattcagggttgaatctgaattggcttctcaggctcaaggtaacagtgttcttgtggtttgaccaattgtttttctttctttttttttttttttagatttgtggtattctggtcaagttattgtgctgtactttgtgcgtagaaattgagttgtattgtcaaccccagtcagtaaagagaacttcaaaaaattatcctcaagtgtagatttctcttaattccatttgtgtatcatgttaaactattgttgtggcttcttgtgtaaagacaggaactgtggaactgtgatgttgtcttttgtgttgttaaaataagaaatgtcttatctgtatatgtatgagtcttcctgtcattgtatttggcacatgaatattgtgtacaaggaattgttaagactggttttccctcaacaacatatattatacttgctactggaaaagtgtttaagacttagctaggtttccatttagatcttcatatctgttgcatggaagaaagttgggttcttggcatagagttgcatgatatgtaagattttgtgcattcataattgttaaaaatctgtgttccaaaagtggacatagcatgtacaggcagttttctgtcctgtgcacaaaaagtttaaaaaagttgtttaatatttgttgttgtatacccaaatacgcaccgaataaactctttatattcattcaaagaaaaaaaaaaaaaaaaaaaaaaaaaaaaaa

SEQ ID NO: 52742 - DNA, 132 bp, Artificial Sequence
  derived and/or modified sequence
atgctgagacaggacagcatccagagcgccgagctgaagaagaaggagagccccttcagagccaagtgccacgagatcttctgctgccccctgaagcaggtgcaccacaaggagaacaccgagcccgagtag

SEQ ID NO: 52743 - DNA, 681 bp, Artificial Sequence
  derived and/or modified sequence
atgctgagacaggacagcatccagagcgccgagctgaagaagaaggagagccccttcagagccaagtgccacgagatcttctgctgccccctgaagcaggtgcaccacaaggagaacaccgagcccgaggagccccagctgaagggcatcgtgaccaagctgtacagcagacagggctaccacctgcagctgcaggccgacggcaccatcgacggcaccaaggacgaggacagcacctacaccctgttcaacctgatccccgtgggcctgagagtggtggccatccagggcgtgcagaccaagctgtacctggccatgaacagcgagggctacctgtacaccagcgagctgttcacccccgagtgcaagttcaaggagagcgtgttcgagaactactacgtgacctacagcagcatgatctacagacagcagcagagcggcagaggctggtacctgggcctgaacaaggagggcgagatcatgaagggcaaccacgtgaagaagaacaagcccgccgcccacttcctgcccaagcccctgaaggtggccatgtacaaggagcccagcctgcacgacctgaccgagttcagcagaagcggcagcggcacccccaccaagagcagaagcgtgagcggcgtgctgaacggcggcaagagcatgagccacaacgagagcacctag

SEQ ID NO: 52744 - DNA, 132 bp, Artificial Sequence
  derived and/or modified sequence
atgctccgtcaggacagcattcagtcggctgaattgaaaaagaaggaatctcctttccgggccaagtgccacgagatcttttgctgtccactaaaacaggtgcatcacaaagaaaatacagaacctgagtag

SEQ ID NO: 52745 - DNA, 681 bp, Artificial Sequence
  derived and/or modified sequence
atgctgcggcaggattcaatccaaagtgccgagctgaagaagaaagagtcaccttttagagctaagtgccacgaaatcttttgttgtcccctgaaacaggtacaccataaagaaaatacagagcctgaggagcctcagctcaagggaatcgtgacgaaactgtatagtcggcagggataccatttgcagctccaggcagacggcacaatagacgggactaaagatgaagacagcacatatactttgtttaacctgatccccgtaggcttacgcgtggttgcaatccagggtgtccagactaaattgtatctcgcaatgaattctgaaggctacctgtacactagtgagctgtttacacctgaatgtaaatttaaggagtccgtatttgagaattactatgtcacttattcgtctatgatatacagacagcagcagtccgggcgcggctggtatcttggtctgaacaaggagggcgagataatgaaagggaaccacgttaagaagaacaagcccgccgcccatttccttccaaagccactgaaggtggccatgtataaggaaccttctcttcacgacttaacagaattcagtcggagcggcagcggtacaccgaccaaaagcaggagcgtaagtggggtattgaatggaggaaagagcatgagccacaacgaatccacctag

SEQ ID NO: 52746 - DNA, 132 bp, Artificial Sequence
  derived and/or modified sequence
atgctgcggcaggacagcatccagagcgctgagctgaagaagaaggagagccccttccgggccaagtgccacgagatcttctgctgccccctgaagcaggtgcaccacaaggagaacacagagcctgagtag

SEQ ID NO: 52747 - DNA, 681 bp, Artificial Sequence
  derived and/or modified sequence
atgctgcggcaggacagcatccagagcgctgagctgaagaagaaggagagccccttccgggccaagtgccacgagatcttctgctgccccctgaagcaggtgcaccacaaggagaacacagagcctgaggagccccagctgaagggcatcgtgaccaagctgtacagccggcagggctaccacctgcagctgcaggctgatggcaccattgatggcaccaaggatgaggacagcacctacaccctcttcaacctgatccctgtgggcctgcgggtggtggccatccagggcgtgcagaccaagctgtacctggccatgaacagcgagggctacctgtacaccagcgagctgttcaccccagagtgcaagttcaaggagagcgtgtttgagaactactacgtgacctacagctccatgatctaccggcagcagcagagcggccggggctggtacctgggcctgaacaaggagggggagatcatgaagggcaaccacgtgaagaagaacaagccagctgcccacttcctgcccaagcccctgaaggtggccatgtacaaggagcccagcctgcatgacctgacagagttcagccgcagcggcagcggcacccccaccaagagccgctctgtgtctggagtgctgaatggaggcaagtccatgagccacaatgaaagcacctag

SEQ ID NO: 52748 - DNA, 132 bp, Artificial Sequence
  derived and/or modified sequence
atgctgcggcaggacagcatccagagcgccgagctgaagaagaaggaatccccttttcgggcaaaatgccacgagatattttgctgtcctctgaagcaggtccaccataaggagaacactgaacccgagtag

SEQ ID NO: 52749 - DNA, 681 bp, Artificial Sequence
  derived and/or modified sequence
atgctgcggcaggacagcatccagagcgccgagctgaagaagaaggagtcccctttcagggccaagtgccacgagatcttctgttgccctcttaagcaggttcaccataaggaaaatacagagccagaggaaccacaactgaaaggcattgtcactaagctatactcacggcagggatatcatttacagctccaggcagatggcaccattgacggcacgaaggacgaagactctacctacacactgtttaatcttatccctgtcggcctgagggtagtcgccatccagggcgtgcagactaaactttacctcgctatgaacagcgaagggtacttatacacctctgagctttttaccccggagtgcaagtttaaggaatctgtgttcgaaaattactatgttacatattcaagcatgatctacaggcagcagcagtcagggagaggatggtacctcggacttaataaggaaggggagattatgaagggtaatcacgtcaaaaagaacaagcccgccgcacatttcctgcccaaacccctaaaggtggcaatgtacaaggagccctctctgcacgatctgacagagttctctcgatctggatccggtacacctaccaaatcacgctctgtgtccggggtcctcaacggcggtaaaagcatgtcgcataacgagtcaacttag

SEQ ID NO: 52750 - DNA, 132 bp, Artificial Sequence
  derived and/or modified sequence
atgctgaggcaggattctatccagagtgctgaactgaaaaagaaagagagccccttcagagccaaatgccatgagatcttctgctgccctctcaagcaggtccaccacaaagaaaataccgagcctgaatag

SEQ ID NO: 52751 - DNA, 681 bp, Artificial Sequence
  derived and/or modified sequence
atgctgcggcaggactccatccagtcagccgaactgaaaaagaaggagtctcccttccgggctaagtgccatgaaatcttttgttgtccactgaaacaggtccaccacaaggagaacactgagcccgaagagccacagctaaagggcatcgtgactaagctctatagtaggcagggctatcacctccagctgcaggccgatggtacaatcgacgggaccaaagatgaggattctacctatacgctcttcaatctgatccccgttggcttgcgcgtcgtcgcaatacagggagtgcagaccaagttgtatctagcaatgaactctgagggctacctatatacctccgaactgttcactccagagtgtaagtttaaggagtctgtctttgagaactactacgtgacatacagctcgatgatctataggcagcagcagagcggtcggggatggtatctgggtcttaataaagagggggagatcatgaaagggaaccatgtgaagaagaataagcccgcagcccatttcctgcccaagcctctcaaagtggctatgtacaaggaaccaagtctgcatgatctcacagagttcagtaggtcaggttcagggactcctacaaaatcaagaagtgtttctggcgtactgaacggaggcaaatccatgtcacataacgaaagtacttag

SEQ ID NO: 52752 - protein, 284 aa, Artificial Sequence
  derived and/or modified sequence
MAKSLLKTASLSGRTKLLHQTGLSLYSTSHGFYEEEVKKTLQQFPGGSIDLQKEDNGIGILTLNNPSRMNAFSGVMMLQLLEKVIELENWTEGKGLIVRGAKNTFSSGSDLNAVKSLGLQRRLPLISVALVQGWALGGGAEFTTACDFRLMTPESKIRFVHKEMGIIPSWGGTTRLVEIIGSRQALKVLSGALKLDSKNALNIGMVEEVLQSSDETKSLEEAQEWLKQFIQGPPEVIRALKKSVCSGRELYLEEALQNERDLLGTVWGGPANLEAIAKKGKFNK

SEQ ID NO: 52753 - protein, 301 aa, Artificial Sequence
  derived and/or modified sequence
MAKSLLKTASLSGRTKLLHQTGLSLYSTSHGFYEEEVKKTLQQFPGGSIDLQKEDNGIGILTLNNPSRMNAFSGVMMLQLLEKVIELENWTEGKGLIVRGAKNTFSSGSDLNAVKSLGTPEDGMAVCMFMQNTLTRFMRLPLISVALVQGWALGGGAEFTTACDFRLMTPESKIRFVHKEMGIIPSWGGTTRLVEIIGSRQALKVLSGALKLDSKNALNIGMVEEVLQSSDETKSLEEAQEWLKQFIQGPPEVIRALKKSVCSGRELYLEEALQNERDLLGTVWGGPANLEAIAKKGKFNK

SEQ ID NO: 52754 - protein, 226 aa, Artificial Sequence
  derived and/or modified sequence
MMLQLLEKVIELENWTEGKGLIVRGAKNTFSSGSDLNAVKSLGTPEDGMAVCMFMQNTLTRFMRLPLISVALVQGWALGGGAEFTTACDFRLMTPESKIRFVHKEMGIIPSWGGTTRLVEIIGSRQALKVLSGALKLDSKNALNIGMVEEVLQSSDETKSLEEAQEWLKQFIQGPPEVIRALKKSVCSGRELYLEEALQNERDLLGTVWGGPANLEAIAKKGKFNK

SEQ ID NO: 52755 - protein, 307 aa, Artificial Sequence
  derived and/or modified sequence
MALKQEMAKSLLKTASLSGRTKLLHQTGLSLYSTSHGFYEEEVKKTLQQFPGGSIDLQKEDNGIGILTLNNPSRMNAFSGVMMLQLLEKVIELENWTEGKGLIVRGAKNTFSSGSDLNAVKSLGTPEDGMAVCMFMQNTLTRFMRLPLISVALVQGWALGGGAEFTTACDFRLMTPESKIRFVHKEMGIIPSWGGTTRLVEIIGSRQALKVLSGALKLDSKNALNIGMVEEVLQSSDETKSLEEAQEWLKQFIQGPPEVIRALKKSVCSGRELYLEEALQNERDLLGTVWGGPANLEAIAKKGKFNK

SEQ ID NO: 52756 - protein, 151 aa, Artificial Sequence
  derived and/or modified sequence
MAKSLLKTASLSGRTKLLHQTGLSLYSTSHGFYEEEVKKTLQQFPGGSIDLQKEDNGIGILTLNNPSRMNAFSGVMMLQLLEKVIELENWTEGKGLIVRGAKNTFSSGSDLNAVKSLGTPEDGMAVCMFMQNTLTRFMRLPLISVALVQGW

SEQ ID NO: 52757 - DNA, 924 bp, Artificial Sequence
  derived and/or modified sequence
atggccctgaaacaagaaatggccaaatccttgttaaagacagctagcctctccggcaggactaagctcctccatcagacaggcctgtccctgtactctaccagccacggtttctacgaggaggaagtgaagaaaacattacagcagttcccaggagggagcattgacctccagaaagaggataatgggatcgggattttaacactgaacaatcctagtaggatgaatgctttctcaggggtgatgatgctacagttattagagaaagtaattgaactggagaattggaccgaaggtaagggactgattgtgagaggcgcaaagaacacttttagttctgggagcgatctgaacgctgtcaagtcactgggaacccctgaagatggcatggctgtgtgcatgttcatgcaaaataccctcacaagatttatgaggttaccgctcatcagtgtcgcacttgtgcaggggtgggcactcggaggtggcgcagaattcactacagcgtgcgacttccgtttgatgaccccagagtcaaaaatacgttttgtgcacaaagagatggggataattccttcctggggtggcactacccggcttgtcgagattatagggtcacgccaagcccttaaagtactctctggcgctctgaaactggacagtaaaaacgccctgaatatagggatggtggaggaggtcttgcagtccagcgacgagaccaagagccttgaagaagcccaggagtggcttaaacagtttattcaaggaccacccgaggtgattcgggcgctgaaaaaaagcgtatgcagtgggcgagagctgtacttagaagaagcactccagaacgaaagagatttgctcggaacggtttggggcggacccgcgaaccttgaagcaatcgctaaaaaaggcaagttcaataagtag

SEQ ID NO: 52758 - DNA, 924 bp, Artificial Sequence
  derived and/or modified sequence
atggccctgaagcaggagatggccaagagcctgctgaagacagccagcctgagcggccgcaccaagctgctgcaccagacaggcctgagcctgtacagcaccagccacggcttctatgaggaggaggtgaagaagaccctgcagcagtttcctgggggcagcattgacctgcagaaggaggacaatggcatcggcatcctgaccctgaacaaccccagcaggatgaatgccttctctggagtgatgatgctgcagctgctggagaaggtgattgagctggagaactggacagagggcaagggcctgattgtgcggggggccaagaacaccttcagcagcggcagtgacctgaatgctgtgaagagcctgggcaccccagaagatggcatggctgtgtgcatgttcatgcagaacaccctgacccgcttcatgaggctgcccctcatctctgtggccctggtgcagggctgggccctgggcggcggcgctgagttcaccacagcctgtgacttccggctgatgaccccagagagcaagatccgctttgtgcacaaggagatgggcatcatccccagctggggcggcaccacccggctggtggagatcatcggcagccggcaggccctgaaggtgctgagcggggccctgaagctggacagcaagaatgccctgaacatcggcatggtggaggaggtgctgcagagcagtgatgagaccaagagcctggaggaggcccaggagtggctgaagcagttcatccagggccccccagaggtgatccgggccctgaagaagtctgtgtgcagcggccgggagctgtacctggaggaggccctgcagaatgaaagagacctgctgggcaccgtgtggggcggccctgccaacctggaggccatcgccaagaagggcaagttcaacaagtag

SEQ ID NO: 52759 - DNA, 924 bp, Artificial Sequence
  derived and/or modified sequence
atggccctgaagcaggagatggccaagagcctgctgaagaccgcctctttgagcggtcgtacaaaactattacaccagaccggacttagtctatattctacatcccatggtttctacgaggaagaggtgaagaagaccctgcagcaatttcccggcgggtccatcgatttgcaaaaagaagacaatgggatcggcatactgaccctcaataaccccagcaggatgaacgctttcagcggagtcatgatgctccagctcctggaaaaggtgatcgaactagagaactggaccgaagggaagggcctgatcgtgaggggcgctaagaacaccttcagctctggaagtgacctcaatgcagtgaagtccctaggtactcccgaagatggcatggctgtatgtatgttcatgcagaatacgctgacccgattcatgcggctgcctttgattagtgtggcgcttgtccagggctgggctctgggcgggggcgcagagttcactaccgcttgtgactttaggctgatgacaccggaatcgaagattcgctttgtgcataaagaaatgggtatcataccatcttggggcggcaccacacggctcgttgagataattggctccagacaggctcttaaggttctgtctggtgccttgaagctcgactctaagaacgcccttaacatcggaatggtcgaggaggtccttcaaagctctgatgagaccaagagtctcgaggaggctcaggagtggctgaagcaattcattcagggaccacccgaggtgatccgggccctaaaaaagagcgtgtgttctggacgagagctctatctggaagaggcgcttcaaaatgagcgtgatttactagggacggtgtggggaggcccagcaaacctcgaagctattgccaagaaagggaaattcaataagtag

SEQ ID NO: 52760 - DNA, 924 bp, Artificial Sequence
  derived and/or modified sequence
atggcgctgaaacaagaaatggcaaaatctctcctgaaaacagcctccctctcagggcgtactaagctgctgcatcagaccggtctctctctgtactccacctcacatggcttctacgaagaagaggtaaaaaagaccctgcagcagttccccggaggctccatcgacttgcagaaagaagataatggaataggcatcctgaccctgaacaacccttctcggatgaacgctttctcaggcgtgatgatgctgcaattgctagagaaggtgatcgagctggagaactggactgaaggtaaagggctgattgtgaggggagcaaagaacacctttagctctggctccgacctgaacgccgtgaaaagcctgggcactcccgaagacgggatggccgtctgcatgttcatgcagaacaccttgactcgcttcatgcgcctgcctcttatttcagttgctcttgtgcagggctgggcactcggaggaggagctgagttcaccaccgcatgcgacttccggcttatgacccccgagagcaaaatccgctttgtgcataaagagatgggcatcataccaagttggggaggtactacacgtctggttgaaataattgggtcccgccaggcactgaaagtcctcagcggcgctctaaagctggattccaaaaatgccttgaatataggcatggtggaggaggttctgcaatcaagtgatgaaactaaaagccttgaagaagcccaagagtggctaaagcaattcatacaaggaccacccgaggtcattagagctctgaagaaaagtgtttgttcgggtcgggaactttaccttgaagaagctctacagaatgagcgcgacctgttaggcactgtgtggggcggacctgcgaatttggaagccatcgcaaaaaagggcaagtttaataaatag

SEQ ID NO: 52761 - DNA, 924 bp, Artificial Sequence
  derived and/or modified sequence
atggccctgaagcaggagatggccaagagcctgctgaagaccgccagcctgagcggcagaaccaagctgctgcaccagaccggcctgagcctgtacagcaccagccacggcttctacgaggaggaggtgaagaagaccctgcagcagttccccggcggcagcatcgacctgcagaaggaggacaacggcatcggcatcctgaccctgaacaaccccagcagaatgaacgccttcagcggcgtgatgatgctgcagctgctggagaaggtgatcgagctggagaactggaccgagggcaagggcctgatcgtgagaggcgccaagaacaccttcagcagcggcagcgacctgaacgccgtgaagagcctgggcacccccgaggacggcatggccgtgtgcatgttcatgcagaacaccctgaccagattcatgagactgcccctgatcagcgtggccctggtgcagggctgggccctgggcggcggcgccgagttcaccaccgcctgcgacttcagactgatgacccccgagagcaagatcagattcgtgcacaaggagatgggcatcatccccagctggggcggcaccaccagactggtggagatcatcggcagcagacaggccctgaaggtgctgagcggcgccctgaagctggacagcaagaacgccctgaacatcggcatggtggaggaggtgctgcagagcagcgacgagaccaagagcctggaggaggcccaggagtggctgaagcagttcatccagggcccccccgaggtgatcagagccctgaagaagagcgtgtgcagcggcagagagctgtacctggaggaggccctgcagaacgagagagacctgctgggcaccgtgtggggcggccccgccaacctggaggccatcgccaagaagggcaagttcaacaagtag

SEQ ID NO: 52762 - DNA, 1361 bp, Artificial Sequence
  derived and/or modified sequence
gacacgagggagcgcgaagcggagggcgcctcgcggcaggagcgggatttccggggtcacgggaaccggcaggggaacgggataaagttcccggagaaaggaaaggagagcgtgggatagtaaaagagaagacgcggagaagaggagaggacctacaagaacggaggacaggggcgcacgatggtcccggggggagcggaaacaaaggcacgcaaaacggaaaagcgtgtgtaggggagcggaaaaggaagtcaccaccgtggcctgcgacgaaatggcgaaaagtcttttgaagacagcctctctgtctggaaggacaaaattgctacatcaaacaggattgtcactttatagtacatcccatggattttatgaggaagaagtgaaaaaaacacttcagcagtttcctggtggatccattgaccttcagaaggaagacaatggcattggcattcttactctgaacaatccaagtagaatgaatgccttttcaggtgttatgatgctacaacttctggaaaaagtaattgaattggaaaattggacagaggggaaaggcctcattgtccgtggggcaaaaaatactttctcttcaggatctgatctgaatgctgtgaaatcactaggactccagaggagacttcctttaataagtgttgcgctggttcaaggttgggcattgggtggaggagcagaatttactacagcatgtgatttcaggttaatgactccagagagtaagatcagattcgtccacaaagagatgggcataataccaagctggggtggcaccacccggctagttgaaataatcggaagtagacaagctctcaaagtgttgagtggggcccttaaactggattcaaaaaatgctctaaacataggaatggttgaagaggtcttgcagtcttcagatgaaactaaatctctagaagaggcacaagaatggctaaagcaattcatccaagggccaccggaagtaattagagctttgaaaaaatctgtttgttcaggcagagagctatatttggaggaagcattacagaacgaaagagatcttttaggaacagtttggggtgggcctgcaaatttagaggctattgctaagaaaggaaaatttaataaataattggtttttcgtgtggatgtactccaagtaaagctccagtgactaatatgtataaatgttaaatgatattaaatatgaacatcagaattactttgaaggctactattaatatgcagacttacttttaatcatttgaatatctgaactcatttacctcatttcttgccaattactcacttgggtatttactgcgtaatctggaacatttagctaaaatatacacttttggctt

SEQ ID NO: 52763 - DNA, 909 bp, Artificial Sequence
  derived and/or modified sequence
aagtcaccaccgtggcctgcgacggaccctttccagctttttgcctgaaagctttgcagaagaaatggcgaaaagtcttttgaagacagcctctctgtctggaaggacaaaattgctacatcaaacaggattgtcactttatagtacatcccatggattttatgaggaagaagtgaaaaaaacacttcagcagtttcctggtggatccattgaccttcagaaggaagacaatggcattggcattcttactctgaacaatccaagtagaatgaatgccttttcaggtgttatgatgctacaacttctggaaaaagtaattgaattggaaaattggacagaggggaaaggcctcattgtccgtggggcaaaaaatactttctcttcaggatctgatctgaatgctgtgaaatcactaggaactccagagacttcctttaataagtgttgcgctggttcaaggttgggcattgggtggaggagcagaatttactacagcatgtgatttcaggttaatgactccagagagtaagatcagattcgtccacaaagagatgggcataataccaagctggggtggcaccacccggctagttgaaataatcggaagtagacaagctctcaaagtgttgagtggggcccttaaactggattcaaaaaatgctctaaacataggaatggttgaagaggtcttgcagtcttcagatgaaactaaatctctagaagaggcacaagaatggctaaagcaattcatccaagggccaccggaagtaattagagctttgaaaaaatctgtttgttcaggcagagagctatatttggaggaagcattacagaacgaaagagatcttttaggaacagtttggggtgggcctgcaaatttagaggctattgctaagaaaggaaaattta

SEQ ID NO: 52764 - DNA, 2285 bp, Artificial Sequence
  derived and/or modified sequence
gtgacacgagggagcgcgaagcggagggcgcctcgcggcaggagcgggatttccggggtcacgggaaccggcaggggaacgggataaagttcccggagaaaggaaaggagagcgtgggatagtaaaagagaagacgcggagaagaggagaggacctacaagaacggaggacaggggcgcacgatggtcccggggggagcggaaacaaaggcacgcaaaacggaaaagcgtgtgtaggggagcggaaaaggaagtcaccaccgtggcctgcgacgaaatggcgaaaagtcttttgaagacagcctctctgtctggaaggacaaaattgctacatcaaacaggattgtcactttatagtacatcccatggattttatgaggaagaagtgaaaaaaacacttcagcagtttcctggtggatccattgaccttcagaaggaagacaatggcattggcattcttactctgaacaatccaagtagaatgaatgccttttcaggtgttatgatgctacaacttctggaaaaagtaattgaattggaaaattggacagaggggaaaggcctcattgtccgtggggcaaaaaatactttctcttcaggatctgatctgaatgctgtgaaatcactaggaactccagaggaaacttcctttaataagtgttgcgctggttcaaggttgggcattgggtggaggagcagaatttactacagcatgtgatttcaggttaatgactccagagagtaagatcagattcgtccacaaagagatgggcataataccaagctggggtggcaccacccggctagttgaaataatcggaagtagacaagctctcaaagtgttgagtggggcccttaaactggattcaaaaaatgctctaaacataggaatggttgaagaggtcttgcagtcttcagatgaaactaaatctctagaagaggcacaagaatggctaaagcaattcatccaagggccaccggaagtaattagagctttgaaaaaatctgtttgttcaggcagagagctatatttggaggaagcattacagaacgaaagagatcttttaggaacagtttggggtgggcctgcaaatttagaggctattgctaagaaaggaaaatttaataaataattggtttttcgtgtggatgtactccaagtaaagctccagtgactaatatgtataaatgttaaatgatattaaatatgaacatcagaattactttgaaggctactattaatatgcagacttacttttaatcatttgaatatctgaactcatttacctcatttcttgccaattactcacttgggtatttactgcgtaatctggaacatttagctaaaatatacacttttggcttaaaaattattgctgtcaattccaataataattcttagcttataaccaaagagcagtgtttaaaaggagagcttctatacaaaacctattcctggcgttacttttcatacaatttttgttctgttttacctggaaataatttaccaaaataactgagtgttgctgctaaagaacaaaagtggggaggtatcagggaacaagaaaacaagaaagggtatgatcaatcattttcttctgctccaaacagctggagtaaaattcatgggaaatggcccttcatttaaaaaaagatgtacctcactacccactacaaatttggaactttgttcttttcaataattagttttctattgtaaattacctactaaacagtggtagccatgacatggaaagtcaactgattctacaattggacattcatttgtgtgccctggaatttccaactagtaataaacaactactgttgatgtagttttaaaccacttgaagggactcatgaagcatcctgcaacataaatttgcatttttacatcagatttcttttttttcctgaaaaacaactaaccttctaacaactatctttcaaaagtaaatgtaataaaaatgcacaacataaaatgtttatgatcccagcaatacactttttaaaaaatgtgaaagtcaaagaattaagttctagttctgactcatcacaagaggtcaaaagtatttgctactgtaacattcaattcacatttgagaatcatggtaaaaataacttgcatttgccttaccatcatgatcctactgttgagttaggaaaatatggttagacagactcacattactttttttcagaggtaaactctagattactgtgtcaacccaatactatttggccatagatgtaaaaactaccaaataaaagtggattttgtggtct

SEQ ID NO: 52765 - DNA, 1354 bp, Artificial Sequence
  derived and/or modified sequence
ggagcgcgaagcggagggcgcctcgcggcaggagcgggatttccggggtcacgggaaccggcaggggaacgggataaagttcccggagaaaggaaaggagagcgtgggatagtaaaagagaagacgcggagaagaggagaggacctacaagaacggaggacaggggcgcacgatggtcccggggggagcggaaacaaaggcacgcaaaacggaaaagcgtgtgtaggggagcggaaaaggaagtcaccaccgtggcctgcgacgaaatggcgaaaagtcttttgaagacagcctctctgtctggaaggacaaaattgctacatcaaacaggattgtcactttatagtacatcccatggattttatgaggaagaagtgaaaaaaacacttcagcagtttcctggtggatccattgaccttcagaaggaagacaatggcattggcattcttactctgaacaatccaagtagaatgaatgccttttcaggtgttatgatgctacaacttctggaaaaagtaattgaattggaaaattggacagaggggaaaggcctcattgtccgtggggcaaaaaatactttctcttcaggatctgatctgaatgctgtgaaatcactaggaactccagagacttcctttaataagtgttgcgctggttcaaggttgggcattgggtggaggagcagaatttactacagcatgtgatttcaggttaatgactccagagagtaagatcagattcgtccacaaagagatgggcataataccaagctggggtggcaccacccggctagttgaaataatcggaagtagacaagctctcaaagtgttgagtggggcccttaaactggattcaaaaaatgctctaaacataggaatggttgaagaggtcttgcagtcttcagatgaaactaaatctctagaagaggcacaagaatggctaaagcaattcatccaagggccaccggaagtaattagagctttgaaaaaatctgtttgttcaggcagagagctatatttggaggaagcattacagaacgaaagagatcttttaggaacagtttggggtgggcctgcaaatttagaggctattgctaagaaaggaaaatttaataaataattggtttttcgtgtggatgtactccaagtaaagctccagtgactaatatgtataaatgttaaatgatattaaatatgaacatcagaattactttgaaggctactattaatatgcagacttacttttaatcatttgaatatctgaactcatttacctcatttcttgccaattactcacttgggtatttactgcgtaatctggaacatttagctaaaatatacacttttggcttaaa

SEQ ID NO: 52766 - DNA, 2455 bp, Artificial Sequence
  derived and/or modified sequence
gtgacacgagggagcgcgaagcggagggcgcctcgcggcaggagcgggatttccggggtcacgggaaccggcaggggaacgggataaagttcccggagaaaggaaaggagagcgtgggatagtaaaagagaagacgcggagaagaggagaggacctacaagaacggaggacaggggcgcacgatggtcccggggggagcggaaacaaaggcacgcaaaacggaaaagcgtgtgtaggggagcggaaaaggaagtcaccaccgtggcctgcgacgaaatggcgaaaagtcttttgaagacagcctctctgtctggaaggacaaaattgctacatcaaacaggattgtcactttatagtacatcccatggattttatgaggaagaagtgaaaaaaacacttcagcagtttcctggtggatccattgaccttcagaaggaagacaatggcattggcattcttactctgaacaatccaagtagaatgaatgccttttcaggtgttatgatgctacaacttctggaaaaagtaattgaattggaaaattggacagaggggaaaggcctcattgtccgtggggcaaaaaatactttctcttcaggatctgatctgaatgctgtgaaatcactaggaactccagaggaaagttgcagatggaatacagagttcctgtacaccctgcatccagtttccccttttattaacatcttatattcctatggatggaatggccgtatgcatgttcatgcaaaacaccttaacaagatttatgaggtaaagaagcaaagaggaaaaattcttcttggcctatcaagacttcctttaataagtgttgcgctggttcaaggttgggcattgggtggaggagcagaatttactacagcatgtgatttcaggttaatgactccagagagtaagatcagattcgtccacaaagagatgggcataataccaagctggggtggcaccacccggctagttgaaataatcggaagtagacaagctctcaaagtgttgagtggggcccttaaactggattcaaaaaatgctctaaacataggaatggttgaagaggtcttgcagtcttcagatgaaactaaatctctagaagaggcacaagaatggctaaagcaattcatccaagggccaccggaagtaattagagctttgaaaaaatctgtttgttcaggcagagagctatatttggaggaagcattacagaacgaaagagatcttttaggaacagtttggggtgggcctgcaaatttagaggctattgctaagaaaggaaaatttaataaataattggtttttcgtgtggatgtactccaagtaaagctccagtgactaatatgtataaatgttaaatgatattaaatatgaacatcagaattactttgaaggctactattaatatgcagacttacttttaatcatttgaatatctgaactcatttacctcatttcttgccaattactcacttgggtatttactgcgtaatctggaacatttagctaaaatatacacttttggcttaaaaattattgctgtcaattccaataataattcttagcttataaccaaagagcagtgtttaaaaggagagcttctatacaaaacctattcctggcgttacttttcatacaatttttgttctgttttacctggaaataatttaccaaaataactgagtgttgctgctaaagaacaaaagtggggaggtatcagggaacaagaaaacaagaaagggtatgatcaatcattttcttctgctccaaacagctggagtaaaattcatgggaaatggcccttcatttaaaaaaagatgtacctcactacccactacaaatttggaactttgttcttttcaataattagttttctattgtaaattacctactaaacagtggtagccatgacatggaaagtcaactgattctacaattggacattcatttgtgtgccctggaatttccaactagtaataaacaactactgttgatgtagttttaaaccacttgaagggactcatgaagcatcctgcaacataaatttgcatttttacatcagatttcttttttttcctgaaaaacaactaaccttctaacaactatctttcaaaagtaaatgtaataaaaatgcacaacataaaatgtttatgatcccagcaatacactttttaaaaaatgtgaaagtcaaagaattaagttctagttctgactcatcacaagaggtcaaaagtatttgctactgtaacattcaattcacatttgagaatcatggtaaaaataacttgcatttgccttaccatcatgatcctactgttgagttaggaaaatatggttagacagactcacattactttttttcagaggtaaactctagattactgtgtcaacccaatactatttggccatagatgtaaaaactaccaaataaaagtggattttgtggtct

SEQ ID NO: 52767 - DNA, 1009 bp, Artificial Sequence
  derived and/or modified sequence
acgcaaaacggaaaagcgtgtgtaggggagcggaaaaggaagtcaccaccgtggcctgcgacggaccctttccagctttttgcctgaaagctttgcagaagaaatggcgaaaagtcttttgaagacagcctctctgtctggaaggacaaaattgctacatcaaacaggattgtcactttatagtacatcccatggattttatgaggaagaagtgaaaaaaacacttcagcagtttcctggtggatccattgaccttcagaaggaagacaatggcattggcattcttactctgaacaatccaagtagaatgaatgccttttcaggtgttatgatgctacaacttctggaaaaagtaattgaattggaaaattggacagaggggaaaggcctcattgtccgtggggcaaaaaatactttctcttcaggatctgatctgaatgctgtgaaatcactaggaactccagaggatggaatggccgtatgcatgttcatgcaaaacaccttaacaagatttatgagacttcctttaataagtgttgcgctggttcaaggttgggcattgggtggaggagcagaatttactacagcatgtgatttcaggttaatgactccagagagtaagatcagattcgtccacaaagagatgggcataataccaagctggggtggcaccacccggctagttgaaataatcggaagtagacaagctctcaaagtgttgagtggggcccttaaactggattcaaaaaatgctctaaacataggaatggttgaagaggtcttgcagtcttcagatgaaactaaatctctagaagaggcacaagaatggctaaagcaattcatccaagggccaccggaagtaattagagctttgaaaaaatctgtttgttcaggcagagagctatatttggaggaagcattacagaacgaaagagatcttttaggaacagtttggggtgggcctgcaaatttagaggctattgctaagaaaggaaaatttaataaataa

SEQ ID NO: 52768 - DNA, 2341 bp, Artificial Sequence
  derived and/or modified sequence
gtgacacgagggagcgcgaagcggagggcgcctcgcggcaggagcgggatttccggggtcacgggaaccggcaggggaacgggataaagttcccggagaaaggaaaggagagcgtgggatagtaaaagagaagacgcggagaagaggagaggacctacaagaacggaggacaggggcgcacgatggtcccggggggagcggaaacaaaggcacgcaaaacggaaaagcgtgtgtaggggagcggaaaaggaagtcaccaccgtggcctgcgacgaaatggcgaaaagtcttttgaagacagcctctctgtctggaaggacaaaattgctacatcaaacaggattgtcactttatagtacatcccatggattttatgaggaagaagtgaaaaaaacacttcagcagtttcctggtggatccattgaccttcagaaggaagacaatggcattggcattcttactctgaacaatccaagtagaatgaatgccttttcaggtgttatgatgctacaacttctggaaaaagtaattgaattggaaaattggacagaggggaaaggcctcattgtccgtggggcaaaaaatactttctcttcaggatctgatctgaatgctgtgaaatcactaggaactccagaggatggaatggccgtatgcatgttcatgcaaaacaccttaacaagatttatgagacttcctttaataagtgttgcgctggttcaaggttgggcattgggtggaggagcagaatttactacagcatgtgatttcaggttaatgactccagagagtaagatcagattcgtccacaaagagatgggcataataccaagctggggtggcaccacccggctagttgaaataatcggaagtagacaagctctcaaagtgttgagtggggcccttaaactggattcaaaaaatgctctaaacataggaatggttgaagaggtcttgcagtcttcagatgaaactaaatctctagaagaggcacaagaatggctaaagcaattcatccaagggccaccggaagtaattagagctttgaaaaaatctgtttgttcaggcagagagctatatttggaggaagcattacagaacgaaagagatcttttaggaacagtttggggtgggcctgcaaatttagaggctattgctaagaaaggaaaatttaataaataattggtttttcgtgtggatgtactccaagtaaagctccagtgactaatatgtataaatgttaaatgatattaaatatgaacatcagaattactttgaaggctactattaatatgcagacttacttttaatcatttgaatatctgaactcatttacctcatttcttgccaattactcacttgggtatttactgcgtaatctggaacatttagctaaaatatacacttttggcttaaaaattattgctgtcaattccaataataattcttagcttataaccaaagagcagtgtttaaaaggagagcttctatacaaaacctattcctggcgttacttttcatacaatttttgttctgttttacctggaaataatttaccaaaataactgagtgttgctgctaaagaacaaaagtggggaggtatcagggaacaagaaaacaagaaagggtatgatcaatcattttcttctgctccaaacagctggagtaaaattcatgggaaatggcccttcatttaaaaaaagatgtacctcactacccactacaaatttggaactttgttcttttcaataattagttttctattgtaaattacctactaaacagtggtagccatgacatggaaagtcaactgattctacaattggacattcatttgtgtgccctggaatttccaactagtaataaacaactactgttgatgtagttttaaaccacttgaagggactcatgaagcatcctgcaacataaatttgcatttttacatcagatttcttttttttcctgaaaaacaactaaccttctaacaactatctttcaaaagtaaatgtaataaaaatgcacaacataaaatgtttatgatcccagcaatacactttttaaaaaatgtgaaagtcaaagaattaagttctagttctgactcatcacaagaggtcaaaagtatttgctactgtaacattcaattcacatttgagaatcatggtaaaaataacttgcatttgccttaccatcatgatcctactgttgagttaggaaaatatggttagacagactcacattactttttttcagaggtaaactctagattactgtgtcaacccaatactatttggccatagatgtaaaaactaccaaataaaagtggattttgtggtctacaaca

SEQ ID NO: 52769 - DNA, 2443 bp, Artificial Sequence
  derived and/or modified sequence
ggcctgcgacggtaagtggtcgtaagggttggtcttagcgcttcagtttagtgttgtcagtgggagaatcctaaaatgtcgccgtggaatggactgtaccgctcgcttctccaaacgtgtcccagacggcgagcctccccggctccgcggcttgtcccttgcaagcgccgcgcaggcctgccccgcgctggacgtggagacgcggtgccgagcgccacgggccggctgtgcgccggccggggaaagagggcgaggggaagagatgaatcggtcttcccagagcgcgccgcgaggtcgcgagattacactttaaaaagcatgaggaggcttgctttctacatgctgatttaatttcggaatacattcgaggccctgtgctaagttagaaatggcgaaaagtcttttgaagacagcctctctgtctggaaggacaaaattgctacatcaaacaggattgtcactttatagtacatcccatggattttatgaggaagaagtgaaaaaaacacttcagcagtttcctggtggatccattgaccttcagaaggaagacaatggcattggcattcttactctgaacaatccaagtagaatgaatgccttttcaggtgttatgatgctacaacttctggaaaaagtaattgaattggaaaattggacagaggggaaaggcctcattgtccgtggggcaaaaaatactttctcttcaggatctgatctgaatgctgtgaaatcactaggaactccagaggatggaatggccgtatgcatgttcatgcaaaacaccttaacaagatttatgagacttcctttaataagtgttgcgctggttcaaggttgggcattgggtggaggagcagaatttactacagcatgtgatttcaggttaatgactccagagagtaagatcagattcgtccacaaagagatgggcataataccaagctggggtggcaccacccggctagttgaaataatcggaagtagacaagctctcaaagtgttgagtggggcccttaaactggattcaaaaaatgctctaaacataggaatggttgaagaggtcttgcagtcttcagatgaaactaaatctctagaagaggcacaagaatggctaaagcaattcatccaagggccaccggaagtaattagagctttgaaaaaatctgtttgttcaggcagagagctatatttggaggaagcattacagaacgaaagagatcttttaggaacagtttggggtgggcctgcaaatttagaggctattgctaagaaaggaaaatttaataaataattggtttttcgtgtggatgtactccaagtaaagctccagtgactaatatgtataaatgttaaatgatattaaatatgaacatcagaattactttgaaggctactattaatatgcagacttacttttaatcatttgaatatctgaactcatttacctcatttcttgccaattactcacttgggtatttactgcgtaatctggaacatttagctaaaatatacacttttggcttaaaaattattgctgtcaattccaataataattcttagcttataaccaaagagcagtgtttaaaaggagagcttctatacaaaacctattcctggcgttacttttcatacaatttttgttctgttttacctggaaataatttaccaaaataactgagtgttgctgctaaagaacaaaagtggggaggtatcagggaacaagaaaacaagaaagggtatgatcaatcattttcttctgctccaaacagctggagtaaaattcatgggaaatggcccttcatttaaaaaaagatgtacctcactacccactacaaatttggaactttgttcttttcaataattagttttctattgtaaattacctactaaacagtggtagccatgacatggaaagtcaactgattctacaattggacattcatttgtgtgccctggaatttccaactagtaataaacaactactgttgatgtagttttaaaccacttgaagggactcatgaagcatcctgcaacataaatttgcatttttacatcagatttcttttttttcctgaaaaacaactaaccttctaacaactatctttcaaaagtaaatgtaataaaaatgcacaacataaaatgtttatgatcccagcaatacactttttaaaaaatgtgaaagtcaaagaattaagttctagttctgactcatcacaagaggtcaaaagtatttgctactgtaacattcaattcacatttgagaatcatggtaaaaataacttgcatttgccttaccatcatgatcctactgttgagttaggaaaatatggttagacagactcacattactttttttcagaggtaaactctagattactgtgtcaacccaatactatttggccatagatgtaaaaactaccaaataaaagtggattttgtg

SEQ ID NO: 52770 - DNA, 2585 bp, Artificial Sequence
  derived and/or modified sequence
caagaacgaaagatgagcaactcctttctggtagaggttctttcattggagaatttttgagctacaataatccttttaacgctgcgcacacatacagggattacacgtgtaggggattaaaaacacagttaagtttaggttgaaggtgctgttaaggacttcaggcaacattaaatcaacactcagttctttgctctgttccacatctgggctcctgtatagcagttgttgctctaggtgctagaggtatgcagaggaactggacaagggcaaggaaaacaaagggctccttctttagaagagctagcattctcttggaacagacaagcttgtggtgagaagtatatttgtgaaatctacgaggggagggagcagcgcagtaatagaacgggcgatcctttcttgattttttattgggttctggcctgaaaggcgactgtataatcagctgggattcctgcaatgattaacattccaggaagggaagccagcctgtgaagaagcatggcattgaaacaggaaatggcgaaaagtcttttgaagacagcctctctgtctggaaggacaaaattgctacatcaaacaggattgtcactttatagtacatcccatggattttatgaggaagaagtgaaaaaaacacttcagcagtttcctggtggatccattgaccttcagaaggaagacaatggcattggcattcttactctgaacaatccaagtagaatgaatgccttttcaggtgttatgatgctacaacttctggaaaaagtaattgaattggaaaattggacagaggggaaaggcctcattgtccgtggggcaaaaaatactttctcttcaggatctgatctgaatgctgtgaaatcactaggaactccagaggatggaatggccgtatgcatgttcatgcaaaacaccttaacaagatttatgagacttcctttaataagtgttgcgctggttcaaggttgggcattgggtggaggagcagaatttactacagcatgtgatttcaggttaatgactccagagagtaagatcagattcgtccacaaagagatgggcataataccaagctggggtggcaccacccggctagttgaaataatcggaagtagacaagctctcaaagtgttgagtggggcccttaaactggattcaaaaaatgctctaaacataggaatggttgaagaggtcttgcagtcttcagatgaaactaaatctctagaagaggcacaagaatggctaaagcaattcatccaagggccaccggaagtaattagagctttgaaaaaatctgtttgttcaggcagagagctatatttggaggaagcattacagaacgaaagagatcttttaggaacagtttggggtgggcctgcaaatttagaggctattgctaagaaaggaaaatttaataaataattggtttttcgtgtggatgtactccaagtaaagctccagtgactaatatgtataaatgttaaatgatattaaatatgaacatcagaattactttgaaggctactattaatatgcagacttacttttaatcatttgaatatctgaactcatttacctcatttcttgccaattactcacttgggtatttactgcgtaatctggaacatttagctaaaatatacacttttggcttaaaaattattgctgtcaattccaataataattcttagcttataaccaaagagcagtgtttaaaaggagagcttctatacaaaacctattcctggcgttacttttcatacaatttttgttctgttttacctggaaataatttaccaaaataactgagtgttgctgctaaagaacaaaagtggggaggtatcagggaacaagaaaacaagaaagggtatgatcaatcattttcttctgctccaaacagctggagtaaaattcatgggaaatggcccttcatttaaaaaaagatgtacctcactacccactacaaatttggaactttgttcttttcaataattagttttctattgtaaattacctactaaacagtggtagccatgacatggaaagtcaactgattctacaattggacattcatttgtgtgccctggaatttccaactagtaataaacaactactgttgatgtagttttaaaccacttgaagggactcatgaagcatcctgcaacataaatttgcatttttacatcagatttcttttttttcctgaaaaacaactaaccttctaacaactatctttcaaaagtaaatgtaataaaaatgcacaacataaaatgtttatgatcccagcaatacactttttaaaaaatgtgaaagtcaaagaattaagttctagttctgactcatcacaagaggtcaaaagtatttgctactgtaacattcaattcacatttgagaatcatggtaaaaataacttgcatttgccttaccatcatgatcctactgttgagttaggaaaatatggttagacagactcacattactttttttcagaggtaaactctagattactgtgtcaacccaatactatttggccatagatgtaaaaactaccaaataaaagtggattttgtggtctacaa

SEQ ID NO: 52771 - DNA, 577 bp, Artificial Sequence
  derived and/or modified sequence
gtggcctgcgacgtggcttggtagtgagcttgttcagctccactgaatcttctttgtggtggggctgcaagacatcctgcatggaccctttccagctttttgcctgaaagctttgcagaagaaatggcgaaaagtcttttgaagacagcctctctgtctggaaggacaaaattgctacatcaaacaggattgtcactttatagtacatcccatggattttatgaggaagaagtgaaaaaaacacttcagcagtttcctggtggatccattgaccttcagaaggaagacaatggcattggcattcttactctgaacaatccaagtagaatgaatgccttttcaggtgttatgatgctacaacttctggaaaaagtaattgaattggaaaattggacagaggggaaaggcctcattgtccgtggggcaaaaaatactttctcttcaggatctgatctgaatgctgtgaaatcactaggaactccagaggatggaatggccgtatgcatgttcatgcaaaacaccttaacaagatttatgagacttcctttaataagtgttgcgctggttcaaggttggg

SEQ ID NO: 52772 - DNA, 1966 bp, Artificial Sequence
  derived and/or modified sequence
aaatggcgaaaagtcttttgaagacagcctctctgtctggaaggacaaaattgctacatcaaacaggattgtcactttatagtacatcccatggattttatgaggaagaagtgaaaaaaacacttcagcagtttcctggtggatccattgaccttcagaaggaagacaatggcattggcattcttactctgaacaatccaagtagaatgaatgccttttcaggtgttatgatgctacaacttctggaaaaagtaattgaattggaaaattggacagaggggaaaggcctcattgtccgtggggcaaaaaatactttctcttcaggatctgatctgaatgctgtgaaatcactaggaactccagaggcaaacttcctttaataagtgttgcgctggttcaaggttgggcattgggtggaggagcagaatttactacagcatgtgatttcaggttaatgactccagagagtaagatcagattcgtccacaaagagatgggcataataccaagctggggtggcaccacccggctagttgaaataatcggaagtagacaagctctcaaagtgttgagtggggcccttaaactggattcaaaaaatgctctaaacataggaatggttgaagaggtcttgcagtcttcagatgaaactaaatctctagaagaggcacaagaatggctaaagcaattcatccaagggccaccggaagtaattagagctttgaaaaaatctgtttgttcaggcagagagctatatttggaggaagcattacagaacgaaagagatcttttaggaacagtttggggtgggcctgcaaatttagaggctattgctaagaaaggaaaatttaataaataattggtttttcgtgtggatgtactccaagtaaagctccagtgactaatatgtataaatgttaaatgatattaaatatgaacatcagaattactttgaaggctactattaatatgcagacttacttttaatcatttgaatatctgaactcatttacctcatttcttgccaattactcacttgggtatttactgcgtaatctggaacatttagctaaaatatacacttttggcttaaaaattattgctgtcaattccaataataattcttagcttataaccaaagagcagtgtttaaaaggagagcttctatacaaaacctattcctggcgttacttttcatacaatttttgttctgttttacctggaaataatttaccaaaataactgagtgttgctgctaaagaacaaaagtggggaggtatcagggaacaagaaaacaagaaagggtatgatcaatcattttcttctgctccaaacagctggagtaaaattcatgggaaatggcccttcatttaaaaaaagatgtacctcactacccactacaaatttggaactttgttcttttcaataattagttttctattgtaaattacctactaaacagtggtagccatgacatggaaagtcaactgattctacaattggacattcatttgtgtgccctggaatttccaactagtaataaacaactactgttgatgtagttttaaaccacttgaagggactcatgaagcatcctgcaacataaatttgcatttttacatcagatttcttttttttcctgaaaaacaactaaccttctaacaactatctttcaaaagtaaatgtaataaaaatgcacaacataaaatgtttatgatcccagcaatacactttttaaaaaatgtgaaagtcaaagaattaagttctagttctgactcatcacaagaggtcaaaagtatttgctactgtaacattcaattcacatttgagaatcatggtaaaaataacttgcatttgccttaccatcatgatcctactgttgagttaggaaaatatggttagacagactcacattactttttttcagaggtaaactctagattactgtgtcaacccaatactattt

SEQ ID NO: 52773 - DNA, 1449 bp, Artificial Sequence
  derived and/or modified sequence
acgggaaccggcaggggaacgggataaagttcccggagaaaggaaaggagagcgtgggatagtaaaagagaagacgcggagaagaggagaggacctacaagaacggaggacaggggcgcacgatggtcccggggggagcggaaacaaaggcacgcaaaacggaaaagcgtgtgtaggggagcggaaaaggaagtcaccaccgtggcctgcgacggtgttatgatgctacaacttctggaaaaagtaattgaattggaaaattggacagaggggaaaggcctcattgtccgtggggcaaaaaatactttctcttcaggatctgatctgaatgctgtgaaatcactaggaactccagagacttcctttaataagtgttgcgctggttcaaggttgggcattgggtggaggagcagaatttactacagcatgtgatttcaggttaatgactccagagagtaagatcagattcgtccacaaagagatgggcataataccaagctggggtggcaccacccggctagttgaaataatcggaagtagacaagctctcaaagtgttgagtggggcccttaaactggattcaaaaaatgctctaaacataggaatggttgaagaggtcttgcagtcttcagatgaaactaaatctctagaagaggcacaagaatggctaaagcaattcatccaagggccaccggaagtaattagagctttgaaaaaatctgtttgttcaggcagagagctatatttggaggaagcattacagaacgaaagagatcttttaggaacagtttggggtgggcctgcaaatttagaggctattgctaagaaaggaaaatttaataaataattggtttttcgtgtggatgtactccaagtaaagctccagtgactaatatgtataaatgttaaatgatattaaatatgaacatcagaattactttgaaggctactattaatatgcagacttacttttaatcatttgaatatctgaactcatttacctcatttcttgccaattactcacttgggtatttactgcgtaatctggaacatttagctaaaatatacacttttggcttaaaaattattgctgtcaattccaataataattcttagcttataaccaaagagcagtgtttaaaaggagagcttctatacaaaacctattcctggcgttacttttcatacaatttttgttctgttttacctggaaataatttaccaaaataactgagtgttgctgctaaagaacaaaagtggggaggtatcagggaacaagaaaacaagaaagggtatgatcaatcattttcttctgctccaaacagctggagtaaaattcatgggaaatggcccttcatttaaaaaaagatgtacctcactacccactacaaatttggaactttgttcttttcaataattagttttctattgtaaattacctactaaaca

SEQ ID NO: 52774 - protein, 571 aa, Artificial Sequence
  derived and/or modified sequence
MAVSASPVISATSSGAGVPGGLFRAEPLYSTPREPPRLTPNMINSFVVNNHSNSAGGGGRGNTNTNECRMVDMHGMKVASFLMDGQELICLPQVFDLFLKHLVGGLHTVYTKLKRLDISPVVCTVEQVRILRGLGAIQPGVNRCKLITRKDFETLFTDCTNASSRPGRPPKRSLGVLQENARLLTHAVPGLLSPGLITPTGITAAAMAEAMKLQKMKLMAMNTLQGNGSQNGTESEPDDLNSNTGGSESSWDKDKMQSPFAAPGPQHGIAHAALAGQPGIGGAPTLNPLQQNHLLTNRLDLPFMMMPHPLLPVSLPPASVAMAMNQMNHLNTIANMAAAAQIHSPLSRAGTSVIKERIPESPSPAPSLEENHRPGSQTSSHTSSSVSSSPSQMDHHLERMEEVPVQIPIMKSPLDKIQLTPGQALPAGFPGPFIFADSLSSVETLLTNIQGLLKVALDNARIQEKQIQQEKKELRLELYREREIRENLERQLAVELQSRTTMQKRLKKEKKTKRKLQEALEFESKRREQVEQALKQATTSDSGLRMLKDTGIPDIEIENNGTPHDSAAMQA

SEQ ID NO: 52775 - DNA, 1716 bp, Artificial Sequence
  derived and/or modified sequence
atggcggtctctgccagccctgtgatcagcgcgacatcgtctggagctggggtcccaggtggcctctttcgcgcggagcccctgtattccactccaagagagcctccacgactcacgcctaatatgatcaactccttcgtggtcaacaaccattcgaacagcgctgggggtggggggcgcgggaatactaatacaaatgaatgtcgcatggtggacatgcacgggatgaaggtggcaagtttcctgatggatggccaggagcttatctgtctgccgcaagtcttcgacctgtttctgaaacatctggtaggaggccttcatactgtttacacaaagctgaagcgactggatatctcccctgtcgtctgcacagtggagcaagttagaatcctgaggggattaggagccatacaacctggggtgaaccgatgcaaattgatcacgcggaaggatttcgagaccctgtttactgactgtacaaacgcctctagtcgtcctgggcgtccaccgaagcgcagtttgggtgtattgcaagaaaatgctagactgttgacacatgctgtgcctgggctgctgagtccaggtctgatcaccccaacgggaattactgcagctgccatggctgaggccatgaaattgcagaaaatgaagctcatggctatgaacacattgcaagggaacggatcacagaatggaactgagtccgagcccgacgacctcaacagtaacacggggggcagtgagtctagctgggacaaggacaaaatgcagtcaccattcgccgccccgggaccccagcatgggatcgctcacgctgctctggccggacagcctggaatcggaggcgcccctaccttgaacccccttcagcagaatcacctgctcactaatcggctggatctgcccttcatgatgatgccgcacccccttctgccggtgagcctccctccggcgtcagttgccatggctatgaatcagatgaaccacctgaataccattgccaatatggctgccgccgcccagattcatagccctctgtcaagagctggcacaagtgtgattaaagaacgtatccctgagagtcctagtccagctcctagtttggaagaaaatcaccggccggggagtcagacctctagccatacctcttcttctgttagcagttctccctcccaaatggaccatcacctggagcggatggaggaggtgcccgtgcagattcctatcatgaaatcccccctggataagatccagctaactcccggccaagctctgccggctggcttccccggccctttcattttcgcggattctctcagcagtgtcgagaccttgctgacaaatattcaggggctcctgaaagttgcgctcgacaacgcacgcatccaggaaaaacagatacaacaggagaagaaggagctgcggctcgagctttaccgggagcgagagattcgcgaaaatctggagcgacaactggccgttgaactgcagtctaggactaccatgcagaagcggttaaaaaaagagaaaaagacgaaacgtaagctgcaggaggccctggaattcgagtctaagagacgtgaacaggtggagcaggccctcaaacaggctacaactagcgactctggcttgagaatgttgaaggacaccggtattcccgacatcgagatagagaacaacggcaccccccacgacagtgccgcaatgcaggcctag

SEQ ID NO: 52776 - DNA, 1716 bp, Artificial Sequence
  derived and/or modified sequence
atggctgtgtctgccagccctgtgatcagcgccaccagcagcggggccggcgtgcctgggggcctcttccgggcagagcccctgtacagcaccccccgggagcccccccggctgacccccaacatgatcaacagctttgtggtgaacaaccacagcaacagcgctgggggcggcggccggggcaacaccaacaccaatgaatgtaggatggtggacatgcacggcatgaaggtggccagcttcctgatggatggccaggagctgatctgcctgccccaggtgtttgacctcttcctgaagcacctggtgggcggcctgcacacagtgtacaccaagctgaagaggctggacatcagccctgtggtgtgcaccgtggagcaggtgcgcatcctgcggggcctgggcgccatccagcccggggtgaaccgctgcaagctgatcaccaggaaggactttgagaccctcttcacagactgcaccaatgccagcagccggcccggccggccccccaagaggagcctgggcgtgctgcaggagaatgcccggctgctgacccatgctgtgcccggcctgctgagccctggcctcatcacccccaccggcatcacagctgctgccatggccgaggccatgaagctgcagaagatgaagctgatggccatgaacaccctgcagggcaatggcagccagaatggaacagaaagtgagccagatgacctgaacagcaacacaggaggcagcgagagctcctgggacaaggacaagatgcagagcccctttgctgcccctggcccccagcacggcatcgcccacgccgccctggccggccagcccggcatcggcggggcccccaccctgaaccccctgcagcagaaccacctgctgaccaaccggctggacctgcccttcatgatgatgccccaccccctgctgcctgtgtccctgcccccagcctctgtggccatggccatgaaccagatgaaccacctgaacaccatcgccaacatggctgctgctgcccagatccacagccccctgagcagagctggcaccagcgtcatcaaggagcgcatccctgagagccccagccctgcccccagcctggaggagaaccaccggcccggcagccagaccagcagccacaccagcagctctgtgagcagcagccccagccagatggaccaccacctggagaggatggaggaggtgcctgtgcagatccccatcatgaagagccccctggacaagatccagctgaccccaggccaggccctgcctgctggcttccctggccccttcatctttgctgacagcctgagctctgtggagaccctgctgaccaacatccagggcctgctgaaggtggccctggacaatgcccgcatccaggagaagcagatccagcaggagaagaaggagctgcggctggagctgtaccgggagcgggagatccgggagaacctggagcggcagctggccgtggagctgcagagcaggaccaccatgcagaagaggctgaagaaggagaagaagaccaagaggaagctgcaggaggccctggagtttgagagcaagaggcgggagcaggtggagcaggccctgaagcaggccaccaccagtgacagcggcctgaggatgctgaaggacaccggcatcccagacattgaaattgagaacaacggcacccctcatgacagcgctgccatgcaggcctag

SEQ ID NO: 52777 - DNA, 1716 bp, Artificial Sequence
  derived and/or modified sequence
atggccgtgagcgccagccccgtgatcagcgccaccagcagcggcgcaggtgttccaggcgggctgttccgcgcagagcccctgtactcaaccccgcgcgaacccccacgtttgacgcccaatatgattaactcctttgtggttaataaccacagcaattcagcgggcggcggaggacgaggcaataccaacaccaacgagtgccgaatggtggacatgcatggtatgaaggttgcttccttcttaatggacggccaagaactgatctgcctgccccaggtgttcgatttgttcctgaagcacctggtgggaggcctgcacaccgtatacactaagctgaaacgccttgacatttcgcccgtcgtgtgcacagtggagcaagttcgtatcctgcgcgggctaggggccatccagccaggcgtgaaccgctgtaaactgatcaccagaaaagacttcgaaacgctatttaccgactgcacaaacgccagctccagaccaggacgaccacccaaaagaagtctcggagttctccaggaaaatgcacgcctgctgacccacgccgtgcccggactgctctctcctggtttaattacccctactggtatcactgccgccgccatggcagaagcaatgaagcttcagaaaatgaagctcatggcaatgaatactctgcagggtaatggaagccagaacggcaccgaaagcgagccagacgatttaaatagcaacaccggtggcagcgaatcctcttgggacaaggataaaatgcaaagtccattcgctgctcctgggccgcaacacggcattgcccatgccgctttagccggtcagccgggcatcggcggcgccccaaccctgaatcctctccagcaaaaccatttactgaccaaccgccttgacctaccgttcatgatgatgccacaccccctgctgccagtgtcgctgccgccagcctcagtggcgatggcgatgaaccagatgaaccacctcaacaccatcgcaaacatggcagcagcagcccagatacactcgcccctgtctcgggccggcacttccgtcattaaggagcggattccagagtcaccatcccctgcccccagtctggaggagaatcaccgcccagggtcgcaaacatccagtcacacatctagcagtgtatcttccagtccctcccagatggatcaccacttggagagaatggaagaggtgcctgttcagatccctatcatgaaatcccctctggacaagattcagctgacaccaggccaggcgctgcctgcggggtttccaggtccttttatattcgcggattctctgtccagtgttgagaccctgttaacgaacatccagggactgctgaaagtagcactggataatgctcgcatccaggagaagcaaattcagcaggagaagaaggagttgcgcctcgagctttaccgagagagggagattagggagaatctagagaggcagttagccgtggagctgcagagtagaaccactatgcagaagcggttgaagaaggagaaaaaaacaaagcggaaacttcaagaagccctggagtttgaatcaaaaaggagggaacaagtggagcaggctctaaagcaggccacgacttctgactccgggctccggatgttaaaggacactggcatcccagatatagagatagagaataatggtacccctcatgattctgcagctatgcaggcctag

SEQ ID NO: 52778 - DNA, 1716 bp, Artificial Sequence
  derived and/or modified sequence
atggcagtttctgcttctccagtgatttcagcaacatcttccggcgctggagtccctggagggctcttccgagccgagcctctttattcgacacctcgagagcctcctaggctgaccccaaacatgataaactccttcgtggtgaacaaccattcaaattccgccggaggaggcggaaggggtaacaccaataccaatgagtgtcggatggtagatatgcatggcatgaaagtcgccagcttcctgatggatggccaggaacttatctgtttgcctcaggttttcgatttatttctgaagcatctggtgggagggctgcacacagtttatacgaaactcaagaggctggatattagcccagtcgtctgcaccgtagagcaggtgaggatcctgcgcggattgggcgcaattcagccgggagttaacaggtgcaaactgataacgcggaaagatttcgagaccctgtttactgactgcacgaatgcctcctctcggcctgggaggccaccgaaacgtagcctgggcgtgttacaggaaaatgccagactattaactcatgctgttcctgggttgctgtctccagggctaattacgccgaccggaatcaccgctgcagccatggccgaagcaatgaagctgcagaagatgaagctgatggcgatgaacacactgcagggtaacgggagtcagaatggaactgagtctgaaccagacgacctgaactccaataccggtggttctgaatcctcttgggataaagataagatgcaaagtccttttgctgcgccaggcccacagcacggcattgcacatgccgcattggccggtcaaccagggattggaggggcacccacattaaaccctctccagcaaaatcaccttctcacaaatagactggatctcccctttatgatgatgccccaccccctactgccggtttccctccctcctgcgtctgttgctatggcaatgaatcagatgaatcatctgaacactatcgctaacatggccgctgcagcacaaatccactcaccattgagtagggccggaacatccgtaattaaagagaggatacccgaatcacccagcccagccccttcactagaggaaaaccaccgaccaggatctcaaacttccagccacactagcagcagcgtgtcctcctcccccagtcagatggaccaccatctggagagaatggaagaggtgcccgtgcagatcccaatcatgaaatctccactggataaaatccagctgacaccaggccaggccttaccagctggattccctggaccttttatcttcgctgatagccttagttcggtggaaacactgctcaccaatattcaagggttattgaaggtggctctggataatgccaggatccaagagaagcagattcagcaagagaaaaaagagttgagactcgaattataccgggagagggagatcagggaaaacctggagagacagctggcagtagagttgcaatcccggactacgatgcagaagagactaaagaaggaaaagaagacgaagcggaagcttcaggaagccttggaatttgaatccaagagacgtgagcaggtggaacaagccctaaaacaggccaccacatctgattctgggctgcgaatgctgaaggacactggaatcccagatatagaaatcgagaataacgggactccccatgacagcgccgcaatgcaggcctag

SEQ ID NO: 52779 - DNA, 2418 bp, Artificial Sequence
  derived and/or modified sequence
gttgagcttgagcgtgagccggctgctgaagacttgcgaacagttcggagccagcgagagcgcgccagagagagcgagagtgagggagtgagtgcgaggggatctagaggagtcagggcgagaaagcgagggccggaggacccacgatagagacagagtgaccatggctgtctccgcatctccagtgatctctgcaacttccagcggcgccggcgtcccggggggcttattccgggccgaacccctgtactcgactcccagagagccccctcgtcttactcctaatatgatcaatagtttcgtggttaataaccacagcaacagtgccggaggcggcggcaggggcaacaccaacaccaacgagtgccgcatggtcgacatgcacgggatgaaggtggcttcgttcctgatggacggccaggaactgatctgcctgccgcaagtctttgatctttttctcaagcacctggtgggaggcttgcacactgtgtacaccaagctgaagagactggatatatcccccgtggtgtgtactgttgagcaggtccggatcctccgcgggctgggggccatccagcccggggtaaaccgctgcaaactcatcaccaggaaagacttcgaaactttgttcaccgattgcaccaatgccagttcaagacccggcaggccccctaagcgttctttgggagtgttgcaggaaaatgcccgccttctgacccatgcagtcccaggcctcttatcgccaggacttatcactccgacaggtataacagctgcagcgatggctgaggcgatgaaacttcagaagatgaagcttatggctatgaacactcttcagggaaatggaagccaaaatgggaccgaatcagagcctgatgatcttaattctaacacaggtggaagtgaatcctcctgggataaagataagatgcagtctccatttgctgcacctggaccccaacatggaattgctcatgcagccctagctggccagccaggcattgggggtgctccaaccctcaatccactgcagcagaaccacctgctaaccaatagactggatctgccatttatgatgatgcctcatcccctacttccagtcagcttacctcctgcatcagttgccatggcaatgaatcagatgaaccatctcaatactattgccaacatggctgctgcagcacagattcacagtccactctccagagctggtacctctgttataaaggagcggatcccagagagtccttctcctgctccttctctagaagagaatcatcgtcctgggagccagacctcttcccacaccagcagcagtgtgtccagctctccctctcagatggatcatcatttggaaagaatggaagaggtaccagttcaaattccaataatgaagtcacccttggacaagatacagctgactcctgggcaggcattgcccgctggattccctggaccattcatttttgctgatagtctgtcctccgtggagactctgttgaccaacattcagggtctgctgaaagttgctttggataatgctcgcatccaggagaagcagattcaacaagaaaagaaggagctgcgactggagctctatagagagagagaaattagagaaaaccttgaaagacaacttgcagttgagcttcaaagcagaactactatgcaaaagcgcctgaagaaggagaaaaaaaccaagagaaaattgcaggaagccttggaatttgaatcaaagcgccgggagcaagtggagcaggcacttaagcaagccaccactagtgacagtggcctgaggatgttaaaagatactggaattccagatattgaaatagaaaacaatgggactcctcatgatagtgctgctatgcaagcctgaacactgatgccggaactccaactgatcataggcacgaatagggaggtaactattactgtttagaaatggcacaacagttgtattcagcctgaaaggtcctcgctggctttacataaatgaagatgcttgtgattccagtttatctctgaaactattcaacatggagttatttcagttttgtttatcagcaaagctttgtttactgaaggagctatttaatctatgttacattaaaaaagaaacgcgtgtacattttaaaagcaatgatgtaaactttgttcttgcattagactgaccagtttaaaaatatgaactaaaacctaatggctaaagtaacttgaccatatttgatgcttttctatgctcatttcaacttggctttttgtcttttaaatttttaaaaaatgcagtagtgtgttagagactagaaagttatatgtatggtttccctgttctactatacataacgttaaagtacaccttctttgttaaaaatgtacttgctaaacttcagcgtaaataaaaacattttgactttg

SEQ ID NO: 52780 - DNA, 1716 bp, Artificial Sequence
  derived and/or modified sequence
atggccgtgagcgccagccccgtgatcagcgccaccagcagcggcgccggcgtgcccggcggcctgttcagagccgagcccctgtacagcacccccagagagccccccagactgacccccaacatgatcaacagcttcgtggtgaacaaccacagcaacagcgccggcggcggcggcagaggcaacaccaacaccaacgagtgcagaatggtggacatgcacggcatgaaggtggccagcttcctgatggacggccaggagctgatctgcctgccccaggtgttcgacctgttcctgaagcacctggtgggcggcctgcacaccgtgtacaccaagctgaagagactggacatcagccccgtggtgtgcaccgtggagcaggtgagaatcctgagaggcctgggcgccatccagcccggcgtgaacagatgcaagctgatcaccagaaaggacttcgagaccctgttcaccgactgcaccaacgccagcagcagacccggcagaccccccaagagaagcctgggcgtgctgcaggagaacgccagactgctgacccacgccgtgcccggcctgctgagccccggcctgatcacccccaccggcatcaccgccgccgccatggccgaggccatgaagctgcagaagatgaagctgatggccatgaacaccctgcagggcaacggcagccagaacggcaccgagagcgagcccgacgacctgaacagcaacaccggcggcagcgagagcagctgggacaaggacaagatgcagagccccttcgccgcccccggcccccagcacggcatcgcccacgccgccctggccggccagcccggcatcggcggcgcccccaccctgaaccccctgcagcagaaccacctgctgaccaacagactggacctgcccttcatgatgatgccccaccccctgctgcccgtgagcctgccccccgccagcgtggccatggccatgaaccagatgaaccacctgaacaccatcgccaacatggccgccgccgcccagatccacagccccctgagcagagccggcaccagcgtgatcaaggagagaatccccgagagccccagccccgcccccagcctggaggagaaccacagacccggcagccagaccagcagccacaccagcagcagcgtgagcagcagccccagccagatggaccaccacctggagagaatggaggaggtgcccgtgcagatccccatcatgaagagccccctggacaagatccagctgacccccggccaggccctgcccgccggcttccccggccccttcatcttcgccgacagcctgagcagcgtggagaccctgctgaccaacatccagggcctgctgaaggtggccctggacaacgccagaatccaggagaagcagatccagcaggagaagaaggagctgagactggagctgtacagagagagagagatcagagagaacctggagagacagctggccgtggagctgcagagcagaaccaccatgcagaagagactgaagaaggagaagaagaccaagagaaagctgcaggaggccctggagttcgagagcaagagaagagagcaggtggagcaggccctgaagcaggccaccaccagcgacagcggcctgagaatgctgaaggacaccggcatccccgacatcgagatcgagaacaacggcaccccccacgacagcgccgccatgcaggcctag

SEQ ID NO: 52781 - protein, 432 aa, Artificial Sequence
  derived and/or modified sequence
MAQNQFFNSSRPGRPPKRSLGVLQENARLLTHAVPGLLSPGLITPTGITAAAMAEAMKLQKMKLMAMNTLQGNGSQNGTESEPDDLNSNTGGSESSWDKDKMQSPFAAPGPQHGIAHAALAGQPGIGGAPTLNPLQQNHLLTNRLDLPFMMMPHPLLPVSLPPASVAMAMNQMNHLNTIANMAAAAQIHSPLSRAGTSVIKERIPESPSPAPSLEENHRPGSQTSSHTSSSVSSSPSQMDHHLERMEEVPVQIPIMKSPLDKIQLTPGQALPAGFPGPFIFADSLSSVETLLTNIQGLLKVALDNARIQEKQIQQEKKELRLELYREREIRENLERQLAVELQSRTTMQKRLKKEKKTKRKLQEALEFESKRREQVEQALKQATTSDSGLRMLKDTGIPDIEIENNGTPHDSAAMQGGNYYCLEMAQQLYSA

SEQ ID NO: 52782 - protein, 432 aa, Artificial Sequence
  derived and/or modified sequence
MTRKQAVNSSRPGRPPKRSLGVLQENARLLTHAVPGLLSPGLITPTGITAAAMAEAMKLQKMKLMAMNTLQGNGSQNGTESEPDDLNSNTGGSESSWDKDKMQSPFAAPGPQHGIAHAALAGQPGIGGAPTLNPLQQNHLLTNRLDLPFMMMPHPLLPVSLPPASVAMAMNQMNHLNTIANMAAAAQIHSPLSRAGTSVIKERIPESPSPAPSLEENHRPGSQTSSHTSSSVSSSPSQMDHHLERMEEVPVQIPIMKSPLDKIQLTPGQALPAGFPGPFIFADSLSSVETLLTNIQGLLKVALDNARIQEKQIQQEKKELRLELYREREIRENLERQLAVELQSRTTMQKRLKKEKKTKRKLQEALEFESKRREQVEQALKQATTSDSGLRMLKDTGIPDIEIENNGTPHDSAAMQGGNYYCLEMAQQLYSA

SEQ ID NO: 52783 - protein, 380 aa, Artificial Sequence
  derived and/or modified sequence
MAEAMKLQKMKLMAMNTLQGNGSQNGTESEPDDLNSNTGGSESSWDKDKMQSPFAAPGPQHGIAHAALAGQPGIGGAPTLNPLQQNHLLTNRLDLPFMMMPHPLLPVSLPPASVAMAMNQMNHLNTIANMAAAAQIHSPLSRAGTSVIKERIPESPSPAPSLEENHRPGSQTSSHTSSSVSSSPSQMDHHLERMEEVPVQIPIMKSPLDKIQLTPGQALPAGFPGPFIFADSLSSVETLLTNIQGLLKVALDNARIQEKQIQQEKKELRLELYREREIRENLERQLAVELQSRTTMQKRLKKEKKTKRKLQEALEFESKRREQVEQALKQATTSDSGLRMLKDTGIPDIEIENNGTPHDSAAMQGGNYYCLEMAQQLYSA

SEQ ID NO: 52784 - DNA, 1299 bp, Artificial Sequence
  derived and/or modified sequence
atggctcagaaccagtttttcaatagttcccggcccgggcggccccccaaaagatccctgggtgtcctgcaggagaatgcaagactcctcacacacgcggtacccggactgctgagtccaggactgattacccctacgggcatcaccgcggcagccatggctgaggcgatgaaactccaaaaaatgaagcttatggctatgaacacacttcagggaaatggtagccagaacggtactgagagtgagcccgatgatttgaatagcaataccggaggatctgagagtagctgggacaaggataaaatgcagtccccattcgccgcccctggcccgcaacacgggatagcccacgccgcccttgctggtcagcctggaatagggggcgctccaaccctcaaccctcttcagcaaaaccatctgctgacaaaccgactggatctgccattcatgatgatgcctcatcccctgctgccagtgtcactcccccctgccagcgtcgcaatggcaatgaatcagatgaatcatttgaatacaatagcaaatatggctgctgctgcacaaatccattcacctctgtcgagagctggtacatcagtaataaaagaaaggattcccgaatccccctcccccgctccctccctcgaggaaaatcaccggcctgggagtcagacgtcctctcatacctcttccagcgttagctcctccccatctcagatggatcaccacctcgaacgcatggaggaggtgcctgtccaaatccctatcatgaaatcgcctttggataagattcaactgactccagggcaggctctccccgccggatttcccggtccttttatttttgccgacagcctatcatccgttgagaccctacttaccaacatacaaggcctcctgaaggtcgctctggataacgctagaatacaggaaaaacagatacagcaggaaaagaaagaactccgcttggagttatatcgagagagggagattagggaaaacctcgagagacagctggctgtggagcttcagtcacgcacaacaatgcaaaagcgcctgaagaaggagaagaagacgaagcggaagctccaggaggctctggagtttgaatccaaacgcagggagcaggtggagcaggctctgaagcaggctacaacctccgatagtgggctgcgaatgttaaaagatactgggattccagatatcgagatcgagaataacggcacaccacatgactccgccgccatgcagggcggaaattattattgtctcgagatggctcagcaactctactcagcatag

SEQ ID NO: 52785 - DNA, 1299 bp, Artificial Sequence
  derived and/or modified sequence
atgacacgaaaacaggccgtgaacagttctcggccgggtaggcctccgaaacgatccctcggagtactgcaggaaaatgcccggcttctcacccatgcagtgcctgggctgctgtctccagggttgataactccaacagggataacagcagctgccatggccgaggcgatgaaactgcagaaaatgaagctgatggcaatgaatacgctgcagggaaatgggtcacagaacggcacggagtctgagccagatgacctgaacagcaatacaggaggcagcgagtcaagttgggacaaggacaagatgcagtcccccttcgcggcaccagggcctcaacacggaattgcacacgcagcgctcgccggacagcccggtatcggcggagctcccactctgaaccccctgcagcaaaaccacttgcttaccaataggctagatctgccatttatgatgatgccgcacccattactgcccgtgtccctgcccccagccagtgtagccatggccatgaaccaaatgaaccacttgaatactatagctaacatggctgccgccgctcagatccactccccactgtcacgggccggcacctcagtgatcaaggagaggattccggaatccccctctcctgcgccctcgctcgaggagaatcaccgaccaggatcccagacgtctagccatactagttcttctgtgtcttcgtccccttctcaaatggatcaccacctcgagaggatggaagaagttcccgtccagattcccattatgaaatctcccctagacaaaattcagctaacccctggccaggcacttccagctgggttccctggccctttcatcttcgcagatagtctatcctctgttgagaccctgctgacgaacatccagggactgctcaaagttgctctggacaacgcgcgcatacaagaaaagcaaatacaacaggaaaaaaaagaactcagactggagttatatcgagagcgcgagatccgggaaaaccttgaacgccagcttgcagttgagctgcagtccagaactacgatgcaaaaaagactcaagaaggaaaagaaaactaagcgtaagctgcaggaagcgttggagttcgagtctaaacgtcgcgaacaggtggagcaggcgctgaagcaggccacaacctcagatagtgggcttaggatgctcaaggatacgggcatacctgacattgagatcgagaacaatggaactccccatgattccgctgcgatgcaaggcggtaactattactgtctcgagatggcccagcagctctactccgcgtag

SEQ ID NO: 52786 - DNA, 1143 bp, Artificial Sequence
  derived and/or modified sequence
atggccgaagccatgaagttacagaaaatgaaactgatggctatgaacactttgcagggcaatgggtcccagaatggtaccgaatcagaacccgacgacctgaattctaacacgggcggtagtgagagcagttgggataaggacaagatgcagagcccattcgctgcccccggtccacagcacggcatcgctcacgcagccttagccggccagccagggataggcggggcgccgactctcaatcctctgcagcaaaaccatctgttaacgaaccggcttgatttgccgtttatgatgatgcctcatccccttctgcccgtgtccctgccaccagcctctgtcgcaatggcaatgaaccagatgaaccacttgaacacaatcgctaatatggcagcggccgcccagattcatagtccgttgtctagggccggaacatctgtgataaaggaaaggatccctgagtctccatcacctgcccctagcctagaggaaaaccatagaccgggatctcagacgtcctcccatacgtccagcagcgtgtcctcatccccatcacagatggaccaccacctggaacggatggaggaggtgcccgtccagatcccaataatgaaaagccccctggacaagatccagctgacgcctggccaggccttgcctgctggattccctggacctttcattttcgcggattctttaagcagcgtcgagactctgctcactaacatacagggccttctgaaggtagccttggataacgcacggatccaggaaaaacagatccagcaagaaaagaaagaactgaggttagagttgtaccgggaaagagagataagagaaaatctcgaaagacagctggcggtggaactgcagtcaagaacaactatgcagaaacggctgaaaaaagaaaaaaagacgaagaggaagctccaagaggcattggagttcgaatctaaacgcagggaacaggtggaacaggccttgaagcaagctactacttctgatagcgggttgcgaatgcttaaagacacaggaattccagatatcgaaatagaaaacaacggtacaccacacgactccgccgccatgcagggcggtaattactattgcttagaaatggcccaacagctgtactctgcctag

SEQ ID NO: 52787 - DNA, 1299 bp, Artificial Sequence
  derived and/or modified sequence
atggcccagaaccagttcttcaacagcagccggcccggccggccccccaagaggagcctgggcgtgctgcaggagaatgcccggctgctgacccatgctgtgcccggcctgctgagccctggcctcatcacccccaccggcatcacagctgctgccatggccgaggccatgaagctgcagaagatgaagctgatggccatgaacaccctgcagggcaatggcagccagaatggaacagaaagtgagccagatgacctgaacagcaacacaggaggcagcgagagctcctgggacaaggacaagatgcagagcccctttgctgcccctggcccccagcacggcatcgcccacgccgccctggccggccagcccggcatcggcggggcccccaccctgaaccccctgcagcagaaccacctgctgaccaaccggctggacctgcccttcatgatgatgccccaccccctgctgcctgtgtccctgcccccagcctctgtggccatggccatgaaccagatgaaccacctgaacaccatcgccaacatggctgctgctgcccagatccacagccccctgagcagagctggcaccagcgtcatcaaggagcgcatccctgagagccccagccctgcccccagcctggaggagaaccaccggcccggcagccagaccagcagccacaccagcagctctgtgagcagcagccccagccagatggaccaccacctggagaggatggaggaggtgcctgtgcagatccccatcatgaagagccccctggacaagatccagctgaccccaggccaggccctgcctgctggcttccctggccccttcatctttgctgacagcctgagctctgtggagaccctgctgaccaacatccagggcctgctgaaggtggccctggacaatgcccgcatccaggagaagcagatccagcaggagaagaaggagctgcggctggagctgtaccgggagcgggagatccgggagaacctggagcggcagctggccgtggagctgcagagcaggaccaccatgcagaagaggctgaagaaggagaagaagaccaagaggaagctgcaggaggccctggagtttgagagcaagaggcgggagcaggtggagcaggccctgaagcaggccaccaccagtgacagcggcctgaggatgctgaaggacaccggcatcccagacattgaaattgagaacaacggcacccctcatgacagcgctgccatgcagggcggcaactactactgcctggagatggcccagcagctgtacagcgcctag

SEQ ID NO: 52788 - DNA, 1299 bp, Artificial Sequence
  derived and/or modified sequence
atgaccaggaagcaggccgtgaacagcagccggcccggccggccccccaagaggagcctgggcgtgctgcaggagaatgcccggctgctgacccatgctgtgcccggcctgctgagccctggcctcatcacccccaccggcatcacagctgctgccatggccgaggccatgaagctgcagaagatgaagctgatggccatgaacaccctgcagggcaatggcagccagaatggaacagaaagtgagccagatgacctgaacagcaacacaggaggcagcgagagctcctgggacaaggacaagatgcagagcccctttgctgcccctggcccccagcacggcatcgcccacgccgccctggccggccagcccggcatcggcggggcccccaccctgaaccccctgcagcagaaccacctgctgaccaaccggctggacctgcccttcatgatgatgccccaccccctgctgcctgtgtccctgcccccagcctctgtggccatggccatgaaccagatgaaccacctgaacaccatcgccaacatggctgctgctgcccagatccacagccccctgagcagagctggcaccagcgtcatcaaggagcgcatccctgagagccccagccctgcccccagcctggaggagaaccaccggcccggcagccagaccagcagccacaccagcagctctgtgagcagcagccccagccagatggaccaccacctggagaggatggaggaggtgcctgtgcagatccccatcatgaagagccccctggacaagatccagctgaccccaggccaggccctgcctgctggcttccctggccccttcatctttgctgacagcctgagctctgtggagaccctgctgaccaacatccagggcctgctgaaggtggccctggacaatgcccgcatccaggagaagcagatccagcaggagaagaaggagctgcggctggagctgtaccgggagcgggagatccgggagaacctggagcggcagctggccgtggagctgcagagcaggaccaccatgcagaagaggctgaagaaggagaagaagaccaagaggaagctgcaggaggccctggagtttgagagcaagaggcgggagcaggtggagcaggccctgaagcaggccaccaccagtgacagcggcctgaggatgctgaaggacaccggcatcccagacattgaaattgagaacaacggcacccctcatgacagcgctgccatgcagggcggcaactactactgcctggagatggcccagcagctgtacagcgcctag

SEQ ID NO: 52789 - DNA, 1143 bp, Artificial Sequence
  derived and/or modified sequence
atggccgaggccatgaagctgcagaagatgaagctgatggccatgaacaccctgcagggcaatggcagccagaatggaacagaaagtgagccagatgacctgaacagcaacacaggaggcagcgagagctcctgggacaaggacaagatgcagagcccctttgctgcccctggcccccagcacggcatcgcccacgccgccctggccggccagcccggcatcggcggggcccccaccctgaaccccctgcagcagaaccacctgctgaccaaccggctggacctgcccttcatgatgatgccccaccccctgctgcctgtgtccctgcccccagcctctgtggccatggccatgaaccagatgaaccacctgaacaccatcgccaacatggctgctgctgcccagatccacagccccctgagcagagctggcaccagcgtcatcaaggagcgcatccctgagagccccagccctgcccccagcctggaggagaaccaccggcccggcagccagaccagcagccacaccagcagctctgtgagcagcagccccagccagatggaccaccacctggagaggatggaggaggtgcctgtgcagatccccatcatgaagagccccctggacaagatccagctgaccccaggccaggccctgcctgctggcttccctggccccttcatctttgctgacagcctgagctctgtggagaccctgctgaccaacatccagggcctgctgaaggtggccctggacaatgcccgcatccaggagaagcagatccagcaggagaagaaggagctgcggctggagctgtaccgggagcgggagatccgggagaacctggagcggcagctggccgtggagctgcagagcaggaccaccatgcagaagaggctgaagaaggagaagaagaccaagaggaagctgcaggaggccctggagtttgagagcaagaggcgggagcaggtggagcaggccctgaagcaggccaccaccagtgacagcggcctgaggatgctgaaggacaccggcatcccagacattgaaattgagaacaacggcacccctcatgacagcgctgccatgcagggcggcaactactactgcctggagatggcccagcagctgtacagcgcctag

SEQ ID NO: 52790 - DNA, 1299 bp, Artificial Sequence
  derived and/or modified sequence
atggcccagaaccagttcttcaacagcagccggcccggccggccccccaaaagaagcctgggggtcctacaggagaacgctaggctgcttacacacgctgttcctggactgctgagccccggtctaatcacaccgaccggaataaccgcagccgcaatggccgaagctatgaaactgcagaagatgaaactgatggccatgaacaccctgcaaggcaacggaagtcagaacgggacagagagcgagcctgacgacctgaactctaacaccggaggatctgaaagcagctgggacaaggacaagatgcagagcccgtttgccgccccaggtccacagcatggtatcgcgcacgccgcattagccggtcaaccaggaatcggtggcgctcctacgctcaacccactgcagcagaaccatttgctcaccaacaggctcgacctgcctttcatgatgatgccccatcccctcctgccggtcagcttgccccctgcatccgtggctatggcaatgaaccagatgaaccatctaaacacaattgctaatatggcagccgcagcccagatccactctcctttaagcagggccggcaccagtgtaatcaaggaaaggattcccgaaagtccctcaccagctcccagcctggaagagaatcacaggccaggatctcagacctcctctcatacatcatctagcgtaagtagttcccccagtcagatggatcatcatctcgagaggatggaggaagtccccgtgcagatccccataatgaagtccccactggacaaaattcagttgacccctggccaagctctccccgccggctttccaggcccttttatttttgcagattccctctccagtgtggagactcttctaactaacattcaaggtttacttaaggtggctctggacaacgcaaggatacaagagaaacagatccagcaggagaagaaggagctgcggctcgagctgtaccgcgagcgggaaattcgggaaaatctcgaacgccagcttgctgttgagctgcagtcaaggaccaccatgcagaaaagactgaaaaaagagaaaaaaacaaaacgaaagcttcaggaagcattagaatttgaaagcaagcggcgcgagcaggtggaacaagctctgaagcaagcaaccacctccgatagtggtttacgtatgttgaaggatacaggaatacctgacattgaaatcgaaaacaatggcactcctcacgattcagcagccatgcagggcggcaattactactgcctagaaatggcacagcaactgtattcagcatag

SEQ ID NO: 52791 - DNA, 1299 bp, Artificial Sequence
  derived and/or modified sequence
atgacccggaagcaggccgtgaacagcagccggcccggccggccccccaaacgctctctgggggtgctccaggagaacgctaggctgctgactcatgccgtgcccggactgctctcacctggtttgatcaccccgaccggaattacagctgccgcaatggcagaagctatgaagctgcaaaagatgaagctgatggccatgaatacgttgcagggtaacggatcgcaaaatggcactgaatcagagccagatgatctcaattcgaataccgggggtagtgagtcatcctgggacaaggataagatgcagagcccttttgccgcccccggaccgcagcatgggattgcccacgctgcccttgccgggcagcccggtattggaggtgcccccactctcaacccgttgcagcaaaaccacctgctcactaatagactggacctgcccttcatgatgatgccgcaccctttactacccgtgtcccttcctccggcaagcgtggctatggccatgaaccagatgaaccacctgaataccatcgcaaatatggcagcggccgcacaaatacatagccctcttagccgggcaggaacgagtgtgatcaaagagcgaattcccgagtcaccctcccctgcacctagtcttgaggagaaccatagacccgggtctcaaacatcttctcacaccagctcgagcgtgtcatcgtcgccaagtcaaatggaccaccacttggagaggatggaagaagtgcccgtgcagatccccatcatgaagtcccctctggacaagattcagcttacaccgggccaggccctgcccgctgggttcccaggtcctttcatatttgccgattctctgagcagtgttgaaacactcctaactaatatacagggcctcctcaaagttgccctggataacgctcggattcaagagaagcaaatccagcaggagaagaaagaattaaggttggagctttaccgagaacgagagattagggagaacctggaacgacaactggctgtggagctccagagtcgcactacaatgcaaaagcgcctgaagaaagagaaaaaaactaagcggaagctgcaggaggccctggagttcgagagtaaacgccgggagcaagtggaacaggcattgaagcaggccactaccagtgatagcggactgaggatgttaaaagatacgggcatccctgatatcgagatcgaaaataatgggacccctcatgactccgcagcaatgcaggggggcaattattactgtctggagatggcccagcagctctattccgcgtag

SEQ ID NO: 52792 - DNA, 1143 bp, Artificial Sequence
  derived and/or modified sequence
atggccgaggccatgaagctgcagaagatgaagctgatggccatgaatacactacagggtaacggctcacaaaacggcaccgagagtgagcctgatgatctgaactctaacaccggtgggtccgagagttcatgggacaaggataaaatgcaaagtcctttcgcagcgccaggccctcagcacggcattgctcatgcagcactcgccgggcagccaggaatcggaggagcacctaccctgaatcccctccaacaaaaccatcttctgacgaacaggctcgatttgccgtttatgatgatgccccatcctctactgcctgtttcccttcctcccgcatctgtggccatggcgatgaatcagatgaatcatctgaacaccatcgctaacatggcagctgcagcgcaaatccactcaccacttagccgggccgggacaagtgttataaaagaacgcatccctgagagcccttcacctgcaccatctcttgaggagaaccataggcccggtagtcagacatcaagccacacgagcagctctgtgtcatcctcccctagccagatggaccaccatcttgagagaatggaggaggtccctgtccagatccccataatgaagtccccgctggataaaatccaactaacccctggccaggctctcccagccgggtttcctgggcccttcatctttgctgatagcttgagtagtgtggaaacgctgctcactaatattcagggcctcctgaaagtggctctggataacgcaagaatacaagaaaaacagattcaacaggagaagaaagaactgaggcttgagctttacagagagagggagatccgcgagaatctagagcgtcagctggctgtcgagctccagtcccgcactactatgcagaaaagactgaagaaagagaaaaaaacaaagcgcaaactccaagaggcactggagttcgaatccaagcgacgagaacaggttgaacaggccctgaagcaagctacaacctctgattctgggctccgcatgttgaaggacactggaattcctgatattgaaattgaaaataatgggacacctcatgactccgcggccatgcaaggaggaaactactactgcttggaaatggcacagcaactttattcggcatag

SEQ ID NO: 52793 - DNA, 1299 bp, Artificial Sequence
  derived and/or modified sequence
atggcccagaatcagttctttaattcatcgaggccaggacgaccacccaagagaagcttgggagtcctgcaggagaatgctcggctgttaacccacgctgttccaggcctcctctccccaggtctaattacgcctaccggaatcacagcagccgctatggccgaagctatgaaactgcagaaaatgaaacttatggctatgaacacactccaggggaacggatcacagaatggcaccgagtccgaacctgatgatctgaattccaacacaggcggaagcgaatcatcttgggacaaggataaaatgcagtctcccttcgccgcacccggtccacagcacgggatcgcgcatgcggcactcgccggacagcccggaattggaggagcccctaccctgaatccacttcagcagaatcacctgcttaccaacagactggatctcccattcatgatgatgccccaccccctcctgccagtctctctgcctccagcttcggtcgctatggcaatgaatcaaatgaatcacctaaataccatcgcaaatatggccgcagctgcccaaattcattcccccctgtcgagagccggaacctcggtaataaaagaacgaatccccgaaagtccatcccctgccccaagtcttgaagagaatcataggcccggaagccaaacctccagtcatacgtcctcatcagtctcctccagtccttcccagatggatcaccacctcgaaaggatggaagaggtgcctgtacagatcccaatcatgaaatccccacttgacaagattcagcttactcctgggcaagcgttgcctgccggttttccagggccatttatttttgccgacagtctgtcatcagtggagacactactcaccaatattcagggcctcttgaaggtggcacttgacaacgctcgaatccaagagaagcagatccagcaggagaagaaagaactgcgtctcgagctgtacagagagcgggaaatcagggaaaatctagagagacagctcgctgtggagcttcaatctcgtactaccatgcagaagcgactgaagaaagagaagaagacaaagcgaaagctgcaggaggccctggaattcgagagtaagcgcagggaacaggtcgaacaggccctgaaacaggctaccactagtgatagtggactccgaatgctgaaggacaccgggataccggatattgagattgagaacaatggaaccccacatgactcagccgcaatgcaggggggaaactactactgtctggagatggcccagcagttgtacagcgcgtag

SEQ ID NO: 52794 - DNA, 1299 bp, Artificial Sequence
  derived and/or modified sequence
atgaccaggaaacaagctgtgaattctagcaggcctgggcgacctcccaaaaggtctttaggggtcttgcaagagaacgcccgtctgctaacacacgcagttcccggtttactgagtccagggctgatcacacccactggcatcactgccgctgccatggcagaagccatgaagttgcaaaagatgaagcttatggctatgaacaccctgcaagggaatggttcacagaacggtacagagtcagaaccagacgatctgaactccaacacgggtggttccgagtcgtcctgggataaggacaagatgcagtccccatttgccgcaccaggaccccaacacggcatcgcacatgcagcgctggctggccagccagggataggcggagccccaacacttaaccctctgcagcaaaatcacctgctcactaaccggctggatcttccctttatgatgatgccacacccattactgcccgtgtcgctcccaccggcatcagttgctatggctatgaatcaaatgaatcacctcaacacaatcgccaacatggcagccgctgcccagatccactcccctctctcccgtgctgggacttccgtaattaaggagagaattccagaaagcccaagtcccgcaccctcattagaagaaaatcataggcccggtagtcaaaccagcagccataccagctctagcgtgtcgagctccccaagtcagatggatcatcacctggagaggatggaagaagtccccgtgcaaatacctataatgaagtcacccctagacaaaatccaactgacccctggacaagctctgcccgcagggttccccggtccattcatcttcgctgattcactgtctagcgtggagacgcttctcactaatattcaaggactgctcaaagtcgcgctggacaatgccagaattcaagagaagcagatccaacaggagaaaaaggaactcaggctggaactttaccgggagagggagattcgagaaaatctagaacggcaacttgcagtggaacttcagtcccgaacaaccatgcaaaagagactgaagaaggagaagaaaacaaaaaggaagcttcaagaagcccttgagtttgaaagtaaacggagagaacaggtcgagcaagcgctcaagcaggctacaacatctgatagtggactcaggatgctgaaagacacaggcattccagacattgagattgaaaacaacggcactccacacgattctgctgcgatgcaggggggaaattattattgtctcgagatggcccaacagctctattctgcatag

SEQ ID NO: 52795 - DNA, 1143 bp, Artificial Sequence
  derived and/or modified sequence
atggccgaggcaatgaaactgcagaaaatgaagctcatggccatgaatactctacagggcaatggatcacaaaatgggacagagtccgagccagacgatctgaactccaacaccggcggaagcgagagttcctgggataaagacaagatgcagtctcctttcgccgctcctggtccccagcacggtatcgcacatgccgcactagctggacaacctgggattggcggagcccctaccctgaatccacttcagcaaaaccacttactgacaaaccgtcttgacctgcccttcatgatgatgcctcatcctctgttaccagtgtctcttcctcccgctagcgtggctatggcaatgaaccagatgaaccacctaaacacaatcgctaatatggcggctgctgcccagattcacagtcccctgtcccgtgctgggaccagtgttattaaagaacgaattccagaaagcccctcacccgctccctcactcgaagagaaccatcgccctgggagccagactagctcccacacatcttcctctgtgtcctcgagcccatcccagatggatcaccacctggagaggatggaagaagttccagtacagattcccattatgaagtcccctttggataagatccagctgacgccgggacaggctctgcccgcaggcttccctggcccattcatcttcgccgatagcctgtcgagcgtagagaccctgctgaccaatattcagggcctgctcaaagttgcacttgacaacgctcgaatccaggaaaagcagatccagcaggagaaaaaggaactacgcctcgagctgtaccgagaaagggaaataagggaaaatctggaaaggcagctggcagtggaactccagtcccgaacaacaatgcagaagagactaaagaaggagaaaaagaccaaaaggaagctccaggaagccctcgaattcgagagcaagcgcagggagcaggtggagcaggccctgaagcaggcaacgacttctgacagtggactgaggatgctgaaagacacaggaattcctgacatcgagatcgagaataatggcaccccccatgattcggccgcaatgcaaggcggaaactactactgccttgaaatggctcagcagctgtactcagcatag

SEQ ID NO: 52796 - DNA, 1745 bp, Artificial Sequence
  derived and/or modified sequence
atggcccagaatcaatttttcaacagttcaagacccggcaggccccctaagcgttctttgggagtgttgcaggaaaatgcccgccttctgacccatgcagtcccaggcctcttatcgccaggacttatcactccgacaggtataacagctgcagcgatggctgaggcgatgaaacttcagaagatgaagcttatggctatgaacactcttcagggaaatggaagccaaaatgggaccgaatcagagcctgatgatcttaattctaacacaggtggaagtgaatcctcctgggataaagataagatgcagtctccatttgctgcacctggaccccaacatggaattgctcatgcagccctagctggccagccaggcattgggggtgctccaaccctcaatccactgcagcagaaccacctgctaaccaatagactggatctgccatttatgatgatgcctcatcccctacttccagtcagcttacctcctgcatcagttgccatggcaatgaatcagatgaaccatctcaatactattgccaacatggctgctgcagcacagattcacagtccactctccagagctggtacctctgttataaaggagcggatcccagagagtccttctcctgctccttctctagaagagaatcatcgtcctgggagccagacctcttcccacaccagcagcagtgtgtccagctctccctctcagatggatcatcatttggaaagaatggaagaggtaccagttcaaattccaataatgaagtcacccttggacaagatacagctgactcctgggcaggcattgcccgctggattccctggaccattcatttttgctgatagtctgtcctccgtggagactctgttgaccaacattcagggtctgctgaaagttgctttggataatgctcgcatccaggagaagcagattcaacaagaaaagaaggagctgcgactggagctctatagagagagagaaattagagaaaaccttgaaagacaacttgcagttgagcttcaaagcagaactactatgcaaaagcgcctgaagaaggagaaaaaaaccaagagaaaattgcaggaagccttggaatttgaatcaaagcgccgggagcaagtggagcaggcacttaagcaagccaccactagtgacagtggcctgaggatgttaaaagatactggaattccagatattgaaatagaaaacaatgggactcctcatgatagtgctgctatgcaaggaggtaactattactgtttagaaatggcacaacagttgtattcagcctgaaaggtcctcgctggctttacataaatgaagatgcttgtgattccagtttatctctgaaactattcaacatggagttatttcagttttgtttatcagcaaagctttgtttactgaaggagctatttaatctatgttacattaaaaaagaaacgcgtgtacattttaaaagcaatgatgtaaactttgttcttgcattagactgaccagtttaaaaatatgaactaaaacctaatggctaaagtaacttgaccatatttgatgcttttctatgctcatttcaacttggctttttgtcttttaaatttttaaaaaatgcagtagtgtgttagagactagaaagttatatgtatggtttccctgttctactatacataacgttaaagtacaccttctttgttaaaaatgtacttgctaaacttcagcgtaaataaaaacattttgacttt

SEQ ID NO: 52797 - DNA, 1764 bp, Artificial Sequence
  derived and/or modified sequence
atatgcacccaaagcactcttagttgcagccaaagcagtggaagttcaagacccggcaggccccctaagcgttctttgggagtgttgcaggaaaatgcccgccttctgacccatgcagtcccaggcctcttatcgccaggacttatcactccgacaggtataacagctgcagcgatggctgaggcgatgaaacttcagaagatgaagcttatggctatgaacactcttcagggaaatggaagccaaaatgggaccgaatcagagcctgatgatcttaattctaacacaggtggaagtgaatcctcctgggataaagataagatgcagtctccatttgctgcacctggaccccaacatggaattgctcatgcagccctagctggccagccaggcattgggggtgctccaaccctcaatccactgcagcagaaccacctgctaaccaatagactggatctgccatttatgatgatgcctcatcccctacttccagtcagcttacctcctgcatcagttgccatggcaatgaatcagatgaaccatctcaatactattgccaacatggctgctgcagcacagattcacagtccactctccagagctggtacctctgttataaaggagcggatcccagagagtccttctcctgctccttctctagaagagaatcatcgtcctgggagccagacctcttcccacaccagcagcagtgtgtccagctctccctctcagatggatcatcatttggaaagaatggaagaggtaccagttcaaattccaataatgaagtcacccttggacaagatacagctgactcctgggcaggcattgcccgctggattccctggaccattcatttttgctgatagtctgtcctccgtggagactctgttgaccaacattcagggtctgctgaaagttgctttggataatgctcgcatccaggagaagcagattcaacaagaaaagaaggagctgcgactggagctctatagagagagagaaattagagaaaaccttgaaagacaacttgcagttgagcttcaaagcagaactactatgcaaaagcgcctgaagaaggagaaaaaaaccaagagaaaattgcaggaagccttggaatttgaatcaaagcgccgggagcaagtggagcaggcacttaagcaagccaccactagtgacagtggcctgaggatgttaaaagatactggaattccagatattgaaatagaaaacaatgggactcctcatgatagtgctgctatgcaaggaggtaactattactgtttagaaatggcacaacagttgtattcagcctgaaaggtcctcgctggctttacataaatgaagatgcttgtgattccagtttatctctgaaactattcaacatggagttatttcagttttgtttatcagcaaagctttgtttactgaaggagctatttaatctatgttacattaaaaaagaaacgcgtgtacattttaaaagcaatgatgtaaactttgttcttgcattagactgaccagtttaaaaatatgaactaaaacctaatggctaaagtaacttgaccatatttgatgcttttctatgctcatttcaacttggctttttgtcttttaaatttttaaaaaatgcagtagtgtgttagagactagaaagttatatgtatggtttccctgttctactatacataacgttaaagtacaccttctttgttaaaaatgtacttgctaaacttcagcgtaaataaaaacattttgactttg

SEQ ID NO: 52798 - DNA, 1299 bp, Artificial Sequence
  derived and/or modified sequence
atggcccagaaccagttcttcaacagcagcagacccggcagaccccccaagagaagcctgggcgtgctgcaggagaacgccagactgctgacccacgccgtgcccggcctgctgagccccggcctgatcacccccaccggcatcaccgccgccgccatggccgaggccatgaagctgcagaagatgaagctgatggccatgaacaccctgcagggcaacggcagccagaacggcaccgagagcgagcccgacgacctgaacagcaacaccggcggcagcgagagcagctgggacaaggacaagatgcagagccccttcgccgcccccggcccccagcacggcatcgcccacgccgccctggccggccagcccggcatcggcggcgcccccaccctgaaccccctgcagcagaaccacctgctgaccaacagactggacctgcccttcatgatgatgccccaccccctgctgcccgtgagcctgccccccgccagcgtggccatggccatgaaccagatgaaccacctgaacaccatcgccaacatggccgccgccgcccagatccacagccccctgagcagagccggcaccagcgtgatcaaggagagaatccccgagagccccagccccgcccccagcctggaggagaaccacagacccggcagccagaccagcagccacaccagcagcagcgtgagcagcagccccagccagatggaccaccacctggagagaatggaggaggtgcccgtgcagatccccatcatgaagagccccctggacaagatccagctgacccccggccaggccctgcccgccggcttccccggccccttcatcttcgccgacagcctgagcagcgtggagaccctgctgaccaacatccagggcctgctgaaggtggccctggacaacgccagaatccaggagaagcagatccagcaggagaagaaggagctgagactggagctgtacagagagagagagatcagagagaacctggagagacagctggccgtggagctgcagagcagaaccaccatgcagaagagactgaagaaggagaagaagaccaagagaaagctgcaggaggccctggagttcgagagcaagagaagagagcaggtggagcaggccctgaagcaggccaccaccagcgacagcggcctgagaatgctgaaggacaccggcatccccgacatcgagatcgagaacaacggcaccccccacgacagcgccgccatgcagggcggcaactactactgcctggagatggcccagcagctgtacagcgcctag

SEQ ID NO: 52799 - DNA, 1299 bp, Artificial Sequence
  derived and/or modified sequence
atgaccagaaagcaggccgtgaacagcagcagacccggcagaccccccaagagaagcctgggcgtgctgcaggagaacgccagactgctgacccacgccgtgcccggcctgctgagccccggcctgatcacccccaccggcatcaccgccgccgccatggccgaggccatgaagctgcagaagatgaagctgatggccatgaacaccctgcagggcaacggcagccagaacggcaccgagagcgagcccgacgacctgaacagcaacaccggcggcagcgagagcagctgggacaaggacaagatgcagagccccttcgccgcccccggcccccagcacggcatcgcccacgccgccctggccggccagcccggcatcggcggcgcccccaccctgaaccccctgcagcagaaccacctgctgaccaacagactggacctgcccttcatgatgatgccccaccccctgctgcccgtgagcctgccccccgccagcgtggccatggccatgaaccagatgaaccacctgaacaccatcgccaacatggccgccgccgcccagatccacagccccctgagcagagccggcaccagcgtgatcaaggagagaatccccgagagccccagccccgcccccagcctggaggagaaccacagacccggcagccagaccagcagccacaccagcagcagcgtgagcagcagccccagccagatggaccaccacctggagagaatggaggaggtgcccgtgcagatccccatcatgaagagccccctggacaagatccagctgacccccggccaggccctgcccgccggcttccccggccccttcatcttcgccgacagcctgagcagcgtggagaccctgctgaccaacatccagggcctgctgaaggtggccctggacaacgccagaatccaggagaagcagatccagcaggagaagaaggagctgagactggagctgtacagagagagagagatcagagagaacctggagagacagctggccgtggagctgcagagcagaaccaccatgcagaagagactgaagaaggagaagaagaccaagagaaagctgcaggaggccctggagttcgagagcaagagaagagagcaggtggagcaggccctgaagcaggccaccaccagcgacagcggcctgagaatgctgaaggacaccggcatccccgacatcgagatcgagaacaacggcaccccccacgacagcgccgccatgcagggcggcaactactactgcctggagatggcccagcagctgtacagcgcctag

SEQ ID NO: 52800 - DNA, 1143 bp, Artificial Sequence
  derived and/or modified sequence
atggccgaggccatgaagctgcagaagatgaagctgatggccatgaacaccctgcagggcaacggcagccagaacggcaccgagagcgagcccgacgacctgaacagcaacaccggcggcagcgagagcagctgggacaaggacaagatgcagagccccttcgccgcccccggcccccagcacggcatcgcccacgccgccctggccggccagcccggcatcggcggcgcccccaccctgaaccccctgcagcagaaccacctgctgaccaacagactggacctgcccttcatgatgatgccccaccccctgctgcccgtgagcctgccccccgccagcgtggccatggccatgaaccagatgaaccacctgaacaccatcgccaacatggccgccgccgcccagatccacagccccctgagcagagccggcaccagcgtgatcaaggagagaatccccgagagccccagccccgcccccagcctggaggagaaccacagacccggcagccagaccagcagccacaccagcagcagcgtgagcagcagccccagccagatggaccaccacctggagagaatggaggaggtgcccgtgcagatccccatcatgaagagccccctggacaagatccagctgacccccggccaggccctgcccgccggcttccccggccccttcatcttcgccgacagcctgagcagcgtggagaccctgctgaccaacatccagggcctgctgaaggtggccctggacaacgccagaatccaggagaagcagatccagcaggagaagaaggagctgagactggagctgtacagagagagagagatcagagagaacctggagagacagctggccgtggagctgcagagcagaaccaccatgcagaagagactgaagaaggagaagaagaccaagagaaagctgcaggaggccctggagttcgagagcaagagaagagagcaggtggagcaggccctgaagcaggccaccaccagcgacagcggcctgagaatgctgaaggacaccggcatccccgacatcgagatcgagaacaacggcaccccccacgacagcgccgccatgcagggcggcaactactactgcctggagatggcccagcagctgtacagcgcctag

SEQ ID NO: 52801 - protein, 302 aa, Artificial Sequence
  derived and/or modified sequence
MQSTPFCGFCSLGKMITAKPGKTPIQVLHEYGMKTKNIPVYECERSDVQIHVPTFTFRVTVGDITCTGEGTSKKLAKHRAAEAAINILKANASICFAVPDPLMPDPSKQPKNQLNPIGSLQELAIHHGWRLPEYTLSQEGGPAHKREYTTICRLESFMETGKGASKKQAKRNAAEKFLAKFSNISPENHISLTNVVGHSLGCTWHSLRNSPGEKINLLKRSLLSIPNTDYIQLLSEIAKEQGFNITYLDIDELSANGQYQCLAELSTSPITVCHGSGISCGNAQSDAAHNALQYLKIIAERK

SEQ ID NO: 52802 - DNA, 909 bp, Artificial Sequence
  derived and/or modified sequence
atgcaatctaccccattctgtggtttctgttcactgggaaaaatgatcacagctaagcccggcaagacgcctatccaggtgctccacgaatacggaatgaaaacgaagaacatacccgtttacgaatgcgagcgttctgacgttcagattcacgtcccgacttttacatttcgagtgaccgtgggagacataacgtgcactggcgagggcacttccaaaaagcttgcgaaacaccgggcggcagaagcagccatcaacatactgaaggcaaatgcctccatatgcttcgccgtgcctgaccccttgatgcccgatccatcaaaacagcctaaaaaccagcttaatcccataggatctctacaggagctggcaattcaccacggatggagacttcccgaatacacactatctcaggaaggcggaccagctcataagcgggagtatacaactatttgccgactcgagagctttatggagacaggaaaaggggcctcaaagaagcaggccaaaaggaatgccgccgagaaatttctagcaaaattcagtaatatcagtccggagaaccacatatccttgaccaatgtggtcggacactcacttgggtgcacttggcattctcttcggaatagccccggcgagaagatcaatcttcttaaaagatcccttctgtccattcccaatacggactatattcagcttttaagcgaaattgccaaggagcagggttttaacattacatatcttgatattgacgagctctccgcaaacggccagtatcagtgtctcgctgaactgtctacctctcccatcacggtttgccatggcagcggaataagctgcgggaacgcacagagcgatgctgcccacaacgccctacagtatttgaagattattgccgaacgcaagtag

SEQ ID NO: 52803 - DNA, 909 bp, Artificial Sequence
  derived and/or modified sequence
atgcagagcacccccttctgtggcttctgcagcctgggcaagatgatcacagccaagccaggcaagacccccatccaggtgctgcatgaatatggcatgaagaccaagaacatccctgtgtatgaatgtgagaggagtgatgtgcagatccacgtgcccaccttcaccttccgggtgacagtgggggacatcacctgcacaggagagggcaccagcaagaagctggccaagcacagagctgctgaggccgccatcaacatcctgaaggccaatgccagcatctgctttgctgtgcctgaccccctgatgccagaccccagcaagcagcccaagaaccagctgaaccccatcggcagcctgcaggagctggccatccaccacggctggaggctgcctgagtacaccctgagccaggagggcggccctgcccacaagcgggagtacaccaccatctgccgcctggagagcttcatggagaccgggaagggggccagcaagaagcaggccaagagaaatgctgctgagaagttcctggccaagttcagcaacatcagccctgagaaccacatcagcctgaccaacgtggtgggccacagcctgggctgcacctggcacagcctgaggaacagccctggagagaagatcaacctgctgaagaggagcctgctgagcatccccaacacagactacatccagctgctgtctgaaattgccaaggagcagggcttcaacatcacctacctggacattgatgagctgagcgccaacggccagtaccagtgcctggccgagctgagcaccagccccatcaccgtgtgccacggcagcggcatcagctgtggaaatgcccagagtgatgctgcccacaatgccctgcagtacctgaagatcatcgccgagaggaagtag

SEQ ID NO: 52804 - DNA, 909 bp, Artificial Sequence
  derived and/or modified sequence
atgcagagcacccccttctgcggcttctgcagcctgggcaagatgatcactgccaagccaggtaagacacctatccaggtgctccatgaatatggcatgaagacaaagaacatccctgtatatgagtgcgagcggagtgatgttcagattcatgtgcctacattcactttcagggtgactgttggcgatataacatgcaccggagaaggcacatcaaagaaacttgcaaaacacagagcagccgaggccgcgatcaacatcctgaaggctaacgcctccatatgtttcgcagtgccggacccgttaatgccagacccttcaaagcagcccaagaatcaacttaatcccattgggtcgcttcaggaactggccattcaccacggctggcgcttaccagaatacaccctcagccaggaaggaggaccagctcataaacgcgagtatactactatatgtcggctggaatcttttatggagacaggcaagggagcatctaagaagcaagctaagaggaatgccgccgaaaagtttctggcaaagttttctaacatcagtccggagaaccacattagcctgaccaatgttgtgggtcacagcttgggctgtacgtggcactccctgcgaaatagccccggggagaagatcaacctgttaaagcgctcactgctcagtattccaaacactgactatatacagctcctgagtgagattgctaaggaacaaggctttaacataacgtatctggatatcgatgagctgagcgcaaacggtcaatatcagtgcttagccgaacttagcacctctccaatcactgtgtgtcacggctcaggaatttcttgcggaaacgctcagtccgatgccgctcataacgccctgcaatatttaaagattatcgctgaacgcaagtag

SEQ ID NO: 52805 - DNA, 909 bp, Artificial Sequence
  derived and/or modified sequence
atgcagtccactcccttctgtggcttctgttccctcgggaagatgatcactgctaagccaggtaagacacccatccaggtgcttcacgagtacggcatgaaaaccaaaaatattccagtatacgaatgtgagagatcagacgtccagattcatgttccaacctttacctttagagttaccgtaggagatatcacctgtacaggcgaaggcacatccaagaaattggccaaacaccgggcagcagaagctgccatcaacatactgaaagccaacgcgtctatatgcttcgcagtgcctgaccctcttatgccagacccttctaaacagcctaagaaccagctgaaccccattgggtcactccaggaattggctatacaccacggctggcggctgcctgagtacacgctgagccaggaaggcggacccgcacataagagggaatatacgacgatctgtcggctggagtcctttatggagactgggaaaggcgcttccaagaagcaggccaaaaggaacgccgctgagaaattcctggccaagttctctaatatatctcctgagaaccacatttccctaacaaacgtggtgggacactccctgggttgcacgtggcattcccttagaaatagtccaggagaaaagatcaatctcttaaaaagaagcctgctgtctatccccaataccgactatattcagctgctcagtgagatagctaaggagcaggggttcaacattacatacttagatatcgacgagctgagcgccaatgggcaatatcagtgcctggctgagctgtcaacctcaccaatcacggtgtgtcacgggagcggcatttcctgtggcaacgcccagtccgacgcggctcataacgcccttcaatatctgaagattatcgccgaacgaaagtag

SEQ ID NO: 52806 - DNA, 1344 bp, Artificial Sequence
  derived and/or modified sequence
gcggggcgggcggaggtgacgctcggtcggcgcgcccgggaagggatcgtcaggttttccctgagaggctgcggcgctgctgccagccctgttctgttgagaatctctcctacccgcattcaagtgctctctctaaagacctcgctcaccccgcctgctcctgcggagtgactgccgcagcggggccggaagacaggtgcgccccagcctcgccagctctggccctggcctccggggaactcggcgcctccctcgtcaccgtcggtggcggttaaaactggcctctacgcttctgcttcaatctccaatttggcatgcaaagcacacctttttgtggtttttgcagtttggggaagatgataacagctaagccagggaaaacaccgattcaggtattacacgaatacggcatgaagaccaagaacatcccagtttatgaatgtgaaagatctgatgtgcaaatacacgtgcccactttcaccttcagagtaaccgttggtgacataacctgcacaggtgaaggtacaagtaagaagctggcgaaacatagagctgcagaggctgccataaacattttgaaagccaatgcaagtatttgctttgcagttcctgaccccttaatgcctgacccttccaagcaaccaaagaaccagcttaatcctattggttcattacaggaattggctattcatcatggctggagacttcctgaatataccctttcccaggagggaggacctgctcataagagagaatatactacaatttgcaggctagagtcatttatggaaactggaaagggggcatcaaaaaagcaagccaaaaggaatgctgctgagaaatttcttgccaaatttagtaatatttctccagagaaccacatttctttaacaaatgtagtaggacattctttaggatgtacttggcattccttgaggaattctcctggtgaaaagatcaacttactgaaaagaagcctccttagtattccaaatacagattacatccagctgcttagtgaaattgccaaggaacaaggttttaatataacatatttggatatagatgaactgagcgccaatggacaatatcaatgtcttgctgaactgtccaccagccccatcacagtctgtcatggctccggtatctcctgtggcaatgcacaaagtgatgcagctcacaatgctttgcagtatttaaagataatagcagaaagaaagtaaatctggagcaacttaaaaaatctttcagtagcacataaaaagttcccctctggccccttcccaagtaaaacttttaccgtagtgtttatgtcttgtttctaaatctcttcatagattccat

SEQ ID NO: 52807 - DNA, 1211 bp, Artificial Sequence
  derived and/or modified sequence
gcggcgcgcggggcgggcggaggtgacgctcggtcggcgcgcccgggaagggatcgtcaggttttccctgagaggctgcggcgctgctgccagccctgttctgttgagaatctctcctacccgcattcaagtgctctctctaaagacctcgctcaccccgcctgctcctgcggagtgactgccgcagcggggccggaagacagtttggggaagatgataacagctaagccagggaaaacaccgattcaggtattacacgaatacggcatgaagaccaagaacatcccagtttatgaatgtgaaagatctgatgtgcaaatacacgtgcccactttcaccttcagagtaaccgttggtgacataacctgcacaggtgaaggtacaagtaagaagctggcgaaacatagagctgcagaggctgccataaacattttgaaagccaatgcaagtatttgctttgcagttcctgaccccttaatgcctgacccttccaagcaaccaaagaaccagcttaatcctattggttcattacaggaattggctattcatcatggctggagacttcctgaatataccctttcccaggagggaggacctgctcataagagagaatatactacaatttgcaggctagagtcatttatggaaactggaaagggggcatcaaaaaagcaagccaaaaggaatgctgctgagaaatttcttgccaaatttagtaatatttctccagagaaccacatttctttaacaaatgtagtaggacattctttaggatgtacttggcattccttgaggaattctcctggtgaaaagatcaacttactgaaaagaagcctccttagtattccaaatacagattacatccagctgcttagtgaaattgccaaggaacaaggttttaatataacatatttggatatagatgaactgagcgccaatggacaatatcaatgtcttgctgaactgtccaccagccccatcacagtctgtcatggctccggtatctcctgtggcaatgcacaaagtgatgcagctcacaatgctttgcagtatttaaagataatagcagaaagaaagtaaatctggagcaacttaaaaaatctttcagtagcacataaaaagttcccctctggccccttcccaagtaaaacttttaccgtagtgtttatgtcttgtttctaaatctcttcatagattccatcaacactcca

SEQ ID NO: 52808 - DNA, 909 bp, Artificial Sequence
  derived and/or modified sequence
atgcagagcacccccttctgcggcttctgcagcctgggcaagatgatcaccgccaagcccggcaagacccccatccaggtgctgcacgagtacggcatgaagaccaagaacatccccgtgtacgagtgcgagagaagcgacgtgcagatccacgtgcccaccttcaccttcagagtgaccgtgggcgacatcacctgcaccggcgagggcaccagcaagaagctggccaagcacagagccgccgaggccgccatcaacatcctgaaggccaacgccagcatctgcttcgccgtgcccgaccccctgatgcccgaccccagcaagcagcccaagaaccagctgaaccccatcggcagcctgcaggagctggccatccaccacggctggagactgcccgagtacaccctgagccaggagggcggccccgcccacaagagagagtacaccaccatctgcagactggagagcttcatggagaccggcaagggcgccagcaagaagcaggccaagagaaacgccgccgagaagttcctggccaagttcagcaacatcagccccgagaaccacatcagcctgaccaacgtggtgggccacagcctgggctgcacctggcacagcctgagaaacagccccggcgagaagatcaacctgctgaagagaagcctgctgagcatccccaacaccgactacatccagctgctgagcgagatcgccaaggagcagggcttcaacatcacctacctggacatcgacgagctgagcgccaacggccagtaccagtgcctggccgagctgagcaccagccccatcaccgtgtgccacggcagcggcatcagctgcggcaacgcccagagcgacgccgcccacaacgccctgcagtacctgaagatcatcgccgagagaaagtag

SEQ ID NO: 52809 - DNA, 867 bp, Artificial Sequence
  derived and/or modified sequence
atgattaccgctaagcccggcaagaccccaatacaggtgctccatgaatatggaatgaaaacaaagaatattcccgtttacgaatgtgaaagatcggatgtccagattcatgtcccaacatttacgtttcgagtaacagtgggtgacattacttgtactggtgagggcacatccaaaaagctggccaagcaccgggctgctgaagctgccatcaatatcctgaaggccaacgcctcaatttgctttgctgtccctgatcccctgatgccggatccgagcaaacagcctaaaaaccagttgaaccccattggtagcctgcaggaacttgctatccaccatggttggcgattgcccgagtataccttgtcccaggaaggaggacccgcgcataaaagagagtacaccaccatctgtcgtttggaatcgtttatggagactggcaaaggcgcttctaagaaacaggcaaagcgtaacgcagctgagaagtttctggccaagttcagcaacattagccccgaaaatcacatctccctgaccaacgtcgttggtcactccctcggttgcacttggcactctcttagaaattcgccgggtgaaaaaatcaacttactcaagaggtcactgttgagcatcccgaacactgattatatacagctgctctcagagatagcaaaggagcagggttttaatattacctacctagacatagacgaattatccgccaacggccaataccaatgcttggcagaactcagtacgagcccaattacggtttgccatgggagcgggattagttgtggcaatgcccagagcgacgccgcacacaatgccctgcagtatctcaagatcatcgccgagcgcaaatag

SEQ ID NO: 52810 - DNA, 867 bp, Artificial Sequence
  derived and/or modified sequence
atgatcacagccaagccaggcaagacccccatccaggtgctgcatgaatatggcatgaagaccaagaacatccctgtgtatgaatgtgagaggagtgatgtgcagatccacgtgcccaccttcaccttccgggtgacagtgggggacatcacctgcacaggagagggcaccagcaagaagctggccaagcacagagctgctgaggccgccatcaacatcctgaaggccaatgccagcatctgctttgctgtgcctgaccccctgatgccagaccccagcaagcagcccaagaaccagctgaaccccatcggcagcctgcaggagctggccatccaccacggctggaggctgcctgagtacaccctgagccaggagggcggccctgcccacaagcgggagtacaccaccatctgccgcctggagagcttcatggagaccgggaagggggccagcaagaagcaggccaagagaaatgctgctgagaagttcctggccaagttcagcaacatcagccctgagaaccacatcagcctgaccaacgtggtgggccacagcctgggctgcacctggcacagcctgaggaacagccctggagagaagatcaacctgctgaagaggagcctgctgagcatccccaacacagactacatccagctgctgtctgaaattgccaaggagcagggcttcaacatcacctacctggacattgatgagctgagcgccaacggccagtaccagtgcctggccgagctgagcaccagccccatcaccgtgtgccacggcagcggcatcagctgtggaaatgcccagagtgatgctgcccacaatgccctgcagtacctgaagatcatcgccgagaggaagtag

SEQ ID NO: 52811 - DNA, 867 bp, Artificial Sequence
  derived and/or modified sequence
atgatcaccgccaagcccggcaagacccccatccaggtgctgcacgagtatggcatgaaaaccaagaatattcctgtatatgaatgcgaaagatcagatgtgcagatccacgtcccgacattcactttccgggtgactgtaggagacatcacctgtactggcgagggaacctctaaaaaactggctaaacatagggccgctgaagccgcgataaacattctgaaggccaatgcctccatctgctttgcagtacccgaccccctcatgcctgatccttccaaacagccaaagaatcagttgaatccaataggctcgcttcaagagttggccattcaccatggatggagactgcctgagtatacactctctcaagagggcggaccggcccacaaacgagagtacactacaatatgtaggttggagtcgttcatggagaccggcaagggcgcctctaaaaagcaggctaagcggaatgccgctgagaagttcctggcaaaattcagtaatattagtccagagaatcacataagtctcaccaatgtggtgggccactccctcgggtgtacctggcatagccttaggaactcacctggtgagaaaattaacctcctaaagcggagtttgcttagtatccctaacactgattacattcagttattgagcgaaatcgcaaaggaacaggggtttaacatcacatatctagatattgatgagctttccgccaatggccagtatcagtgcttagccgaattgtccaccagccccattacagtgtgtcatggatccggcattagctgtgggaatgcccagagcgatgccgcacacaatgctttgcagtacttaaaaattattgccgagcgtaaatag

SEQ ID NO: 52812 - DNA, 867 bp, Artificial Sequence
  derived and/or modified sequence
atgataactgccaaacctggcaaaactcccatccaagtgctgcacgaatatggcatgaaaaccaaaaatatccctgtgtacgaatgtgaaagatccgacgtgcagattcatgtgcctacatttacctttcgcgtgacagtcggcgatataacctgtactggagaaggaacctctaagaagctggccaaacatagagctgcagaggcagctatcaatattctgaaggctaacgcctctatctgctttgccgtgcccgacccgctaatgccagacccttcaaaacagcctaaaaatcaattgaatcctattggatcccttcaggaactggctatccatcatggatggagacttccagagtacacattaagtcaggagggcggacctgctcacaagagagagtacactaccatctgtaggctggagagctttatggaaactggcaaaggagcctccaagaagcaggccaaaaggaatgccgctgagaaattcctggcaaaattttctaatatctccccggaaaatcacatttctctgaccaacgtcgtcggtcacagtttagggtgtacatggcattctctcagaaatagccccggagagaaaattaatctccttaagcgctctctactttccatcccgaacactgactatatccagctgctgtctgaaattgctaaagagcagggttttaacatcacgtacctggacatcgatgagctctccgccaatgggcagtaccagtgtttagcggaattgagcaccagccctataacagtctgtcatggatctggtatttcttgcggaaacgctcagtctgacgcggcacataatgctctgcagtacctgaagatcatagcggagagaaagtag

SEQ ID NO: 52813 - DNA, 867 bp, Artificial Sequence
  derived and/or modified sequence
atgatcaccgccaagcccggcaagacccccatccaggtgctgcacgagtacggcatgaagaccaagaacatccccgtgtacgagtgcgagagaagcgacgtgcagatccacgtgcccaccttcaccttcagagtgaccgtgggcgacatcacctgcaccggcgagggcaccagcaagaagctggccaagcacagagccgccgaggccgccatcaacatcctgaaggccaacgccagcatctgcttcgccgtgcccgaccccctgatgcccgaccccagcaagcagcccaagaaccagctgaaccccatcggcagcctgcaggagctggccatccaccacggctggagactgcccgagtacaccctgagccaggagggcggccccgcccacaagagagagtacaccaccatctgcagactggagagcttcatggagaccggcaagggcgccagcaagaagcaggccaagagaaacgccgccgagaagttcctggccaagttcagcaacatcagccccgagaaccacatcagcctgaccaacgtggtgggccacagcctgggctgcacctggcacagcctgagaaacagccccggcgagaagatcaacctgctgaagagaagcctgctgagcatccccaacaccgactacatccagctgctgagcgagatcgccaaggagcagggcttcaacatcacctacctggacatcgacgagctgagcgccaacggccagtaccagtgcctggccgagctgagcaccagccccatcaccgtgtgccacggcagcggcatcagctgcggcaacgcccagagcgacgccgcccacaacgccctgcagtacctgaagatcatcgccgagagaaagtag

SEQ ID NO: 52814 - protein, 191 aa, Artificial Sequence
  derived and/or modified sequence
MGTWILFACLLGAAFAMPLPPHPGHPGYINFSYEVLTPLKWYQSIRPPYPSYGYEPMGGWLHHQIIPVLSQQHPPTHTLQPHHHIPVVPAQQPVIPQQPMMPVPGQHSMTPIQHHQPNLPPPAQQPYQPQPVQPQPHQPMQPQPPVHPMQPLPPQPPLPPMFPMQPLPPMLPDLTLEAWPSTDKTKREEVD

SEQ ID NO: 52815 - DNA, 576 bp, Artificial Sequence
  derived and/or modified sequence
atgggcacctggatcctgttcgcctgcctgctgggcgccgccttcgccatgcccctgcccccccaccccggccaccccggctacatcaacttcagctacgaggtgctgacccccctgaagtggtaccagagcatcagacccccctaccccagctacggctacgagcccatgggcggctggctgcaccaccagatcatccccgtgctgagccagcagcacccccccacccacaccctgcagccccaccaccacatccccgtggtgcccgcccagcagcccgtgatcccccagcagcccatgatgcccgtgcccggccagcacagcatgacccccatccagcaccaccagcccaacctgcccccccccgcccagcagccctaccagccccagcccgtgcagccccagccccaccagcccatgcagccccagccccccgtgcaccccatgcagcccctgcccccccagccccccctgccccccatgttccccatgcagcccctgccccccatgctgcccgacctgaccctggaggcctggcccagcaccgacaagaccaagagagaggaggtggactag

SEQ ID NO: 52816 - DNA, 793 bp, Artificial Sequence
  derived and/or modified sequence
aaaggatcaagcatccctgagtttcaaacagaaacttgcactgaatacattcaaagaaccatcaagaaatggggacctggattttatttgcctgcctcctgggagcagcttttgccatgcctctaccacctcatcctgggcaccctggttatatcaacttcagctatgaggtgcttacccctttgaagtggtaccagagcataaggccaccgtacccttcctatggttacgagcccatgggtggatggctgcaccaccaaatcatccccgtgctgtcccaacagcaccccccgactcacaccctgcagcctcatcaccacatcccagtggtgccagctcagcagcccgtgatcccccagcaaccaatgatgcccgttcctggccaacactccatgactccaatccaacaccaccagccaaacctccctccgcccgcccagcagccctaccagccccagcctgttcagccacagcctcaccagcccatgcagccccagccacctgtgcaccccatgcagcccctgccgccacagccacctctgcctccgatgttccccatgcagcccctgcctcccatgcttcctgatctgactctggaagcttggccatcaacagacaagaccaagcgggaggaagtggattaaaagatcagaagatgagaggggaatgaatacttcagatgctttcaggagtgacacaagaacacaatgatttttgcttataatcactttacttagcaaattctgtaactaaaaaagtaccattagcagacaataaaatgcattaaaaatca

SEQ ID NO: 52817 - DNA, 576 bp, Artificial Sequence
  derived and/or modified sequence
atggggacatggattctttttgcctgcctgttgggcgccgcattcgcaatgccactccccccccatcccggccatcccggctacatcaacttttcctatgaggtgttgaccccgctgaaatggtatcagtccattcggccaccatatccgagctatgggtacgaacctatgggcggctggcttcaccaccagatcatcccggtcctgtcgcaacagcacccccctactcacacccttcagccacaccatcatattcctgtggtgccagcccaacagcctgttatcccacagcagcccatgatgcctgtccctggacaacactccatgacccccattcagcaccaccagccaaacctcccaccgcccgcccagcagccatatcagcctcagcctgtgcagccgcagccgcatcaacccatgcagccacagcctcccgtgcatcccatgcagcccttgccgccccaaccgccgttgccacccatgttccctatgcagcctttaccccccatgttgcctgatctgacactggaagcctggcccagtaccgataaaaccaagagggaagaggtcgattag

SEQ ID NO: 52818 - DNA, 576 bp, Artificial Sequence
  derived and/or modified sequence
atgggcacctggatcctgtttgcctgcctgctgggcgccgcctttgccatgcccctgcccccccaccctggccaccctggctacatcaacttctcctatgaggtgctgacccccctgaagtggtaccagagcatccggcccccctaccccagctatggctatgagcccatgggcggctggctgcaccaccagatcatccctgtgctgagccagcagcacccccccacccacaccctgcagccccaccaccacatccctgtggtgcctgcccagcagcctgtgatcccccagcagcccatgatgcctgtgcccggccagcacagcatgacccccatccagcaccaccagcccaacctgcccccaccagcccagcagccctaccagccccagcctgtgcagccccagccccaccagcccatgcagccccagccccctgtgcaccccatgcagcccctgcccccccagccccccctgccccccatgttccccatgcagcccctgccccccatgctgcctgacctgaccctggaggcctggcccagcacagacaagaccaagcgggaggaggtggactag

SEQ ID NO: 52819 - DNA, 576 bp, Artificial Sequence
  derived and/or modified sequence
atgggcacctggatcctgttcgcctgcctgctgggcgccgccttcgccatgccactgcctcctcatccgggccatcccggctacattaacttttcttacgaggtgctgaccccattgaaatggtatcagtctatacgccccccgtacccatcatatggctatgaacccatgggcggatggctccatcaccagattattcctgtgctgtcacaacagcatcctcctacgcacacgctccagccacatcatcatatcccggtcgtgcccgcccagcagcctgtgattccccagcagcctatgatgccagtgccgggtcagcatagcatgacgccaatccagcatcatcagcccaatttacctcctcctgcccaacagccttaccaaccgcagcccgtacagccacagccgcaccagcccatgcaaccccagccccccgtccaccctatgcagcctctcccgccacagccaccgctcccacctatgtttcccatgcagccgttacctcccatgctgcccgacctcactctggaggcatggcccagcacagacaagacaaagagagaagaagtcgactag

SEQ ID NO: 52820 - DNA, 576 bp, Artificial Sequence
  derived and/or modified sequence
atgggcacatggatcctgttcgcatgtctgctgggggcagccttcgccatgcctctgcccccacaccccggacaccctgggtacattaatttttcttacgaagtgctcacccccctgaaatggtatcagagcatccgtcccccatatcccagttacggctacgagcctatgggcggatggctccaccatcagatcattccggtcttatctcagcagcatccacccacacacaccttgcagcctcatcaccatatacccgttgttccggcacaacagcccgtaatcccccagcaacctatgatgccagtgccaggtcagcactctatgaccccgattcagcatcatcagccaaacttacctcccccagcacagcagccgtatcagccccagcccgtgcagccccagccacaccagccgatgcagccccaacctccagtgcatcccatgcagccactccccccacaacctccactgcctcccatgttccctatgcagccactgccccctatgttgcccgacctcactctcgaggcttggccgtctactgataaaacaaaaagagaggaggtagactag

SEQ ID NO: 52821 - DNA, 576 bp, Artificial Sequence
  derived and/or modified sequence
atgggcacttggatcttgttcgcctgtctccttggagccgcctttgccatgccccttcccccccaccccggtcatcccgggtacataaattttagctacgaagtacttacaccattaaaatggtaccaaagcatccgccccccctatccttcctacgggtatgaacccatgggtggatggctccatcaccagatcattcctgtgctctcacagcagcacccacctacccatacactgcaaccacatcatcatatacctgtcgttcccgcacagcagccagttataccacagcagcctatgatgcccgtccctggccaacatagcatgactccaatacaacatcatcagcctaacctccctcccccggcccaacagccttatcagccccaacctgtgcaaccgcagcctcatcagccaatgcaaccgcagcctcccgtgcatccaatgcaaccccttcctccacagcctcctctgcctccaatgtttcccatgcagccccttccacccatgctacccgacctgactctggaagcctggccctcaacagataagaccaagagggaagaagtggattag

SEQ ID NO: 52822 - DNA, 576 bp, Artificial Sequence
  derived and/or modified sequence
atgggaacttggatcctgttcgcatgtctcctcggcgctgctttcgcaatgcctttgccccctcacccaggccatcctggatatataaattttagctacgaagttcttactcctctcaagtggtatcagtctataagacccccctatccatcatatggatatgagcctatgggaggatggttgcaccatcaaatcatcccagtcctatctcagcaacaccctccaacccataccctccagccccaccaccacatccctgtcgtgcccgcccagcagcctgtaataccacagcaacctatgatgcccgtaccaggccaacactccatgaccccaattcaacaccaccagcctaacctgcctccacccgcccaacaaccttatcaaccccagcccgtccagcctcaaccacaccagccgatgcagccccaaccacctgtacatccaatgcagcctctgccgcctcaacccccactcccacctatgttcccaatgcaacctctgccccctatgctgccagatctaaccctcgaagcctggccatcgaccgataaaaccaagagagaggaggtagactag

SEQ ID NO: 52823 - RNA, 576 nt, Artificial Sequence
  derived and/or modified sequence
augggcacuuggaucuuguucgccugucuccuuggagccgccuuugccaugccccuucccccccaccccggucaucccggguacauaaauuuuagcuacgaaguacuuacaccauuaaaaugguaccaaagcauccgcccccccuauccuuccuacggguaugaacccauggguggauggcuccaucaccagaucauuccugugcucucacagcagcacccaccuacccauacacugcaaccacaucaucauauaccugucguucccgcacagcagccaguuauaccacagcagccuaugaugcccgucccuggccaacauagcaugacuccaauacaacaucaucagccuaaccucccucccccggcccaacagccuuaucagccccaaccugugcaaccgcagccucaucagccaaugcaaccgcagccucccgugcauccaaugcaaccccuuccuccacagccuccucugccuccaauguuucccaugcagccccuuccacccaugcuacccgaccugacucuggaagccuggcccucaacagauaagaccaagagggaagaaguggauuag

SEQ ID NO: 52824 - RNA, 576 nt, Artificial Sequence
  derived and/or modified sequence
augggaacuuggauccuguucgcaugucuccucggcgcugcuuucgcaaugccuuugcccccucacccaggccauccuggauauauaaauuuuagcuacgaaguucuuacuccucucaagugguaucagucuauaagaccccccuauccaucauauggauaugagccuaugggaggaugguugcaccaucaaaucaucccaguccuaucucagcaacacccuccaacccauacccuccagccccaccaccacaucccugucgugcccgcccagcagccuguaauaccacagcaaccuaugaugcccguaccaggccaacacuccaugaccccaauucaacaccaccagccuaaccugccuccacccgcccaacaaccuuaucaaccccagcccguccagccucaaccacaccagccgaugcagccccaaccaccuguacauccaaugcagccucugccgccucaacccccacucccaccuauguucccaaugcaaccucugcccccuaugcugccagaucuaacccucgaagccuggccaucgaccgauaaaaccaagagagaggagguagacuag

SEQ ID NO: 52825 - protein, 192 aa, Artificial Sequence
  derived and/or modified sequence
MGTWILFACLVGAAFAMPLPPHPGHPGYINFSYEVLTPLKWYQSMIRPPYSSYGYEPMGGWLHHQIIPVVSQQHPLTHTLQSHHHIPVVPAQQPRVRQQALMPVPGQQSMTPTQHHQPNLPLPAQQPFQPQPVQPQPHQPMQPQPPVQPMQPLLPQPPLPPMFPLRPLPPILPDLHLEAWPATDKTKQEEVD

SEQ ID NO: 52826 - DNA, 802 bp, Artificial Sequence
  derived and/or modified sequence
agaggaccaagcctccctgtgtagcacaaagaaagtttctctgaatatatttaaagaaccatcaagaaatggggacctggattttgtttgcctgccttgtgggagcagcttttgccatgcctctaccacctcatcctgggcaccctggttatatcaacttcagctatgaggtgctcacccctttgaagtggtaccagagcatgataagaccaccatactcttcctatggttacgagcccatgggtggatggctgcaccaccaaatcatccccgtggtgtcccaacagcaccccctgactcacaccctgcagtctcatcaccacatcccagtggtgccagctcagcagcccagggtccgccagcaagcactgatgcctgttcctggccagcaatccatgactccaacccaacaccatcagccaaacctccctctgcctgcccagcagcccttccagccccagcctgttcagccacagcctcaccagcccatgcagccccagccacctgtgcaacccatgcagcccctgctgccacagccacctctgcctccaatgttccccctgcggcccctgccccccatacttcctgatctgcatctggaagcttggccagcaacagacaagaccaagcaggaggaagtggattaaaagaccagaatatgagacaggaactgaagtaaacactttagttgctttcagggatgacacaagcacacaatgatttttgcttacaatcacttaacttagcaaattctgtaactaaaaatgtaccaatagtagacaataaaatgttttaaaaatca

SEQ ID NO: 52827 - DNA, 579 bp, Artificial Sequence
  derived and/or modified sequence
atgggcacctggatcctgttcgcctgcctggtgggcgccgccttcgccatgcccctgcccccccaccccggccaccccggctacatcaacttcagctacgaggtgctgacccccctgaagtggtaccagagcatgatcagacccccctacagcagctacggctacgagcccatgggcggctggctgcaccaccagatcatccccgtggtgagccagcagcaccccctgacccacaccctgcagagccaccaccacatccccgtggtgcccgcccagcagcccagagtgagacagcaggccctgatgcccgtgcccggccagcagagcatgacccccacccagcaccaccagcccaacctgcccctgcccgcccagcagcccttccagccccagcccgtgcagccccagccccaccagcccatgcagccccagccccccgtgcagcccatgcagcccctgctgccccagccccccctgccccccatgttccccctgagacccctgccccccatcctgcccgacctgcacctggaggcctggcccgccaccgacaagaccaagcaggaggaggtggactag

SEQ ID NO: 52828 - DNA, 579 bp, Artificial Sequence
  derived and/or modified sequence
atgggcacctggattctgttcgcatgcctggtgggggcggctttcgccatgcctctcccaccccaccctggtcatccagggtacataaactttagctatgaggtcctgaccccattaaagtggtatcagagcatgattagacctccatactcaagttacggctatgagcctatgggtggctggctccaccaccagatcattcccgttgtgtctcagcagcatcctctgacacataccctgcagtcacaccaccatatccccgtggtgccagcccaacagccccgggtaagacagcaggcactcatgcctgtccctggtcagcagtcaatgacgcctacgcagcatcaccagcctaacctgcccctccctgcccagcaaccgttccagccacagccggttcaaccccagccacaccagcccatgcagccccagccccctgtgcaacctatgcaacctttactgcctcaaccgcccctgccgccgatgtttcctctgaggccccttccaccaatcctccccgaccttcaccttgaagcttggcccgcaacagataagacaaaacaagaagaggttgattag

SEQ ID NO: 52829 - DNA, 579 bp, Artificial Sequence
  derived and/or modified sequence
atgggcacctggatcctgtttgcctgcctggtgggcgccgcctttgccatgcccctgcccccccaccctggccaccctggctacatcaacttctcctatgaggtgctgacccccctgaagtggtaccagagcatgatccggcccccctacagcagctatggctatgagcccatgggcggctggctgcaccaccagatcatccctgtggtgtcccagcagcaccccctgacccacaccctgcagagccaccaccacatccctgtggtgcctgcccagcagccccgggtgcggcagcaggccctgatgcctgtgcccggccagcagagcatgacccccacccagcaccaccagcccaacctgcccctgcctgcccagcagcccttccagccccagcctgtgcagccccagccccaccagcccatgcagccccagccccctgtgcagcccatgcagcccctgctgccccagccccccctgccccccatgttccccctgcggcccctgccccccatcctgcctgacctgcacctggaggcctggccagccacagacaagaccaagcaggaggaggtggactag

SEQ ID NO: 52830 - DNA, 579 bp, Artificial Sequence
  derived and/or modified sequence
atgggcacctggatcctgttcgcctgcctggtgggcgccgccttcgccatgccgcttcccccgcaccccggacaccccggatacataaacttcagctacgaagtgctcaccccactgaagtggtatcagagcatgatccgaccaccctactcctcttacggctatgagccgatgggagggtggctgcaccatcagatcatcccagtggtgagccagcaacaccctcttactcacactctccagagtcatcaccatatccccgtcgtgcccgctcagcagccgagggtgcgccagcaggccctgatgccagttccaggtcagcaaagtatgactcctactcagcaccatcagcccaacttgccgttgccggcacagcagccttttcaacctcagccggtgcagccacagccgcaccagccaatgcagccccagccacctgtccagcccatgcagccactccttcctcagccccctctgcctccgatgtttccactgcggccgctgccccctatcttgcctgatcttcacctggaagcctggcccgccactgacaaaaccaaacaggaggaggttgattag

SEQ ID NO: 52831 - DNA, 579 bp, Artificial Sequence
  derived and/or modified sequence
atgggcacgtggatcctgtttgcatgtctcgtgggcgcagcttttgcgatgcccctccccccacatccgggtcaccctggttatatcaacttttcatacgaagttctgactccactgaagtggtaccaatcgatgattcgacccccatattcctcttacgggtacgagccaatgggcggatggctgcaccaccagatcattccagtcgtatctcagcagcaccctctgacacacactctgcagagccaccatcatatccctgtggtcccagctcaacagccgagagtacgccaacaggcactgatgcctgtccccggtcaacagagtatgacccccacacagcaccaccaaccaaatttgcccctcccagcgcagcaacctttccaaccacagccagtgcagcctcagccacaccaacctatgcagccccagcctcctgttcagcccatgcagccactgttgcctcagcctccacttcctcctatgttcccactgagacccctcccgcctattctccccgacctgcacctagaagcctggcctgccacagacaaaacaaagcaggaggaggttgattag

SEQ ID NO: 52832 - protein, 1335 aa, Artificial Sequence
  derived and/or modified sequence
MLSPTFVLWEVGYPLYIYGSIFIVIVIIWQVKRSHHELSSEPKRSCCRCHQKVRQRARDAASTARRRSREEAEKPQKLLSIIKSQGWLPLERSVRRILCADPCCQICNSVALEIQQLLVGENNQISLTLSGPLQGSSCLEMLSTSSMSLDQSLEFHSWHTRELSLSSVTPTLSQLTDQKSLTQSAAQSTYADGIQDYWADHLQLGQEFQVPDVLRGPNTIASSRIEKPRAPLNQEEMTQSNPSLVQGNQGQHHLNSQVSLLSLNPETLNRMHPMALHMVLPAHLPFLSPEVLRLLEVHVKKWMHFQRWGLPRRVEESLRQLMPNPPLYYQPGNDQPVSFNLKNTPQVSLHRFETISLQTWCSCVAGQPIQTFWVSEWSTMNPEQRHHCQQTPNPMALALPSPALKALSGPHPQSGGQDNDSGSDLQQKYSQLFCGLPSLHSESLVATFMGSQGLPKIENVPKPPLKDPFLFNELSFPQLLPKTSPQSAPPSSPLSPNWMSPSDHQRAQINVPFLTLAEYEALEWHLLQRQLQLQWGWPAALQRSQHTQCLMQHEPCGKAQSPETTTASQTGKSISVLTRELLFFPEHARKLLEFHIQKQLIRHRWGLPQKIQQSIQLLLTSTDQQTVSSSSTALANVSIPQPVALEANGACDVLSPIAAPVSIPRPHLLTQVKAILQSHIDSKCGQIHQGKIPACVHRSWDCRISGVLAVAPFPCIPESQFLELQTASDPDLHHKVMPWMPTALDQQQQALPGTVTEHPKLLRVLSVEAIEKLETTLRHKHLAFLSGLPALYYVALPRALAPAVTSQSVITEMEPSPVEIPAEPLIQMVSFEEQCISLGPCPQGNNESCTDVAKEFQPAVPVKGTMETLPLESQTHPTSPHSLQTHILTKLNFHLRKKVLEIQWGIPIRARKSREQTVAAPENISTQKSLESLNHQGETLLQELPIPPDTLPAPNPEGVHLKEQLANDLKAVQQNQKQSNSKAVPQGSAHSVSKISQPSGDMTEAHMPCVQVEANVNKPSLEEPCGPEPQSPSKSKDPAHVPMLAGNREDPEETKAARDHREGDAGFGRSSTREERRPAEDQRPAGMLPNKTPRGSWRWSRSFHLADPCQHSPQHHPQLKLPQLPPRVPGEKESEKDLQDSQTKLTVILEPATIPENAQTVLPQASQGQPFLSQPTQAKPLQGQTLQGQVLHGLVMPVHAQKKPSLTESSFRNKIKCFLQHINPKTKGKGHEDSMFSAAAKVAKTRKENVAKSLAPAKSPVGRSKTEKPTGCSKAQSRPAQKLVGPAFLDGPQSLDDKLRLHSRQPGSASALGYPRHCPRHCPREACANKPGHPT

SEQ ID NO: 52833 - protein, 138 aa, Artificial Sequence
  derived and/or modified sequence
MLSPTFVLWDVGYPLYTYGSIFIVIVIIWQVKRSHHELNLEVERSCCWRHQKVRQRARDAASTARRLSQEEDQKPQELFSVMKRAGFPQREVCGESYVQIPVAKFAMLWLWRFSSCWRMRMTRSPQLCRGVHHRSPLA

SEQ ID NO: 52834 - protein, 556 aa, Artificial Sequence
  derived and/or modified sequence
MHPMALHMVLPAHLPFLSPEVLRLLEVHVKKWMHFQRWGLPRRVEESLRQLMPNPPLYYQPGNDQPVSFNLNNTSQVSLHRSETISLQTWCSCVAGQPIQTFWVSEWSTMNPEQRHHCQQTPNPMALALPSPALKALSGPHPQSGGQDNDSGSDLQQKYSQLFCGLPSLHSESLVATFMGSQGLPKIENVPKPPLKDPFLFNDLSFPQLLPKTSPQSAPPSSPLSPNWVSPSDHQRAQINVPFLTLAEYEALEWHLLQRQLQLQWGWPAALQRSQHTQCLMQHEPCGKAQSPETTTASQTGKSISVLTRELLFFPEHARKLLEFHIQKQSIRHRWGLPQKIQQSIQLLLTSTDQQTVSSSSTALANVSIPQPVALEANGACDVLSPIAAPVSIPRPHLLTQVKAILQSHIDSKCGQIHQGKIPACVHRSWDCRISGVLAVAPFPCIPESQFLVLQTASDPDLHHKVMPWMPTALDQQQQALPGTVTEHPKLLRVLSVEAIEKLETTLRHKHLAFLSGLPALYYVALPRALAPAVTSQSVITEMEPSPVEIPAEPLI

SEQ ID NO: 52835 - DNA, 4008 bp, Artificial Sequence
  derived and/or modified sequence
atgctgagccccaccttcgtgctgtgggaggtgggctaccccctgtacatctacggcagcatcttcatcgtgatcgtgatcatctggcaggtgaagagaagccaccacgagctgagcagcgagcccaagagaagctgctgcagatgccaccagaaggtgagacagagagccagagacgccgccagcaccgccagaagaagaagcagagaggaggccgagaagccccagaagctgctgagcatcatcaagagccagggctggctgcccctggagagaagcgtgagaagaatcctgtgcgccgacccctgctgccagatctgcaacagcgtggccctggagatccagcagctgctggtgggcgagaacaaccagatcagcctgaccctgagcggccccctgcagggcagcagctgcctggagatgctgagcaccagcagcatgagcctggaccagagcctggagttccacagctggcacaccagagagctgagcctgagcagcgtgacccccaccctgagccagctgaccgaccagaagagcctgacccagagcgccgcccagagcacctacgccgacggcatccaggactactgggccgaccacctgcagctgggccaggagttccaggtgcccgacgtgctgagaggccccaacaccatcgccagcagcagaatcgagaagcccagagcccccctgaaccaggaggagatgacccagagcaaccccagcctggtgcagggcaaccagggccagcaccacctgaacagccaggtgagcctgctgagcctgaaccccgagaccctgaacagaatgcaccccatggccctgcacatggtgctgcccgcccacctgcccttcctgagccccgaggtgctgagactgctggaggtgcacgtgaagaagtggatgcacttccagagatggggcctgcccagaagagtggaggagagcctgagacagctgatgcccaacccccccctgtactaccagcccggcaacgaccagcccgtgagcttcaacctgaagaacaccccccaggtgagcctgcacagattcgagaccatcagcctgcagacctggtgcagctgcgtggccggccagcccatccagaccttctgggtgagcgagtggagcaccatgaaccccgagcagagacaccactgccagcagacccccaaccccatggccctggccctgcccagccccgccctgaaggccctgagcggcccccacccccagagcggcggccaggacaacgacagcggcagcgacctgcagcagaagtacagccagctgttctgcggcctgcccagcctgcacagcgagagcctggtggccaccttcatgggcagccagggcctgcccaagatcgagaacgtgcccaagccccccctgaaggaccccttcctgttcaacgagctgagcttcccccagctgctgcccaagaccagcccccagagcgccccccccagcagccccctgagccccaactggatgagccccagcgaccaccagagagcccagatcaacgtgcccttcctgaccctggccgagtacgaggccctggagtggcacctgctgcagagacagctgcagctgcagtggggctggcccgccgccctgcagagaagccagcacacccagtgcctgatgcagcacgagccctgcggcaaggcccagagccccgagaccaccaccgccagccagaccggcaagagcatcagcgtgctgaccagagagctgctgttcttccccgagcacgccagaaagctgctggagttccacatccagaagcagctgatcagacacagatggggcctgccccagaagatccagcagagcatccagctgctgctgaccagcaccgaccagcagaccgtgagcagcagcagcaccgccctggccaacgtgagcatcccccagcccgtggccctggaggccaacggcgcctgcgacgtgctgagccccatcgccgcccccgtgagcatccccagaccccacctgctgacccaggtgaaggccatcctgcagagccacatcgacagcaagtgcggccagatccaccagggcaagatccccgcctgcgtgcacagaagctgggactgcagaatcagcggcgtgctggccgtggcccccttcccctgcatccccgagagccagttcctggagctgcagaccgccagcgaccccgacctgcaccacaaggtgatgccctggatgcccaccgccctggaccagcagcagcaggccctgcccggcaccgtgaccgagcaccccaagctgctgagagtgctgagcgtggaggccatcgagaagctggagaccaccctgagacacaagcacctggccttcctgagcggcctgcccgccctgtactacgtggccctgcccagagccctggcccccgccgtgaccagccagagcgtgatcaccgagatggagcccagccccgtggagatccccgccgagcccctgatccagatggtgagcttcgaggagcagtgcatcagcctgggcccctgcccccagggcaacaacgagagctgcaccgacgtggccaaggagttccagcccgccgtgcccgtgaagggcaccatggagaccctgcccctggagagccagacccaccccaccagcccccacagcctgcagacccacatcctgaccaagctgaacttccacctgagaaagaaggtgctggagatccagtggggcatccccatcagagccagaaagagcagagagcagaccgtggccgcccccgagaacatcagcacccagaagagcctggagagcctgaaccaccagggcgagaccctgctgcaggagctgcccatcccccccgacaccctgcccgcccccaaccccgagggcgtgcacctgaaggagcagctggccaacgacctgaaggccgtgcagcagaaccagaagcagagcaacagcaaggccgtgccccagggcagcgcccacagcgtgagcaagatcagccagcccagcggcgacatgaccgaggcccacatgccctgcgtgcaggtggaggccaacgtgaacaagcccagcctggaggagccctgcggccccgagccccagagccccagcaagagcaaggaccccgcccacgtgcccatgctggccggcaacagagaggaccccgaggagaccaaggccgccagagaccacagagagggcgacgccggcttcggcagaagcagcaccagagaggagagaagacccgccgaggaccagagacccgccggcatgctgcccaacaagacccccagaggcagctggagatggagcagaagcttccacctggccgacccctgccagcacagcccccagcaccacccccagctgaagctgccccagctgccccccagagtgcccggcgagaaggagagcgagaaggacctgcaggacagccagaccaagctgaccgtgatcctggagcccgccaccatccccgagaacgcccagaccgtgctgccccaggccagccagggccagcccttcctgagccagcccacccaggccaagcccctgcagggccagaccctgcagggccaggtgctgcacggcctggtgatgcccgtgcacgcccagaagaagcccagcctgaccgagagcagcttcagaaacaagatcaagtgcttcctgcagcacatcaaccccaagaccaagggcaagggccacgaggacagcatgttcagcgccgccgccaaggtggccaagaccagaaaggagaacgtggccaagagcctggcccccgccaagagccccgtgggcagaagcaagaccgagaagcccaccggctgcagcaaggcccagagcagacccgcccagaagctggtgggccccgccttcctggacggcccccagagcctggacgacaagctgagactgcacagcagacagcccggcagcgccagcgccctgggctaccccagacactgccccagacactgccccagagaggcctgcgccaacaagcccggccaccccacctag

SEQ ID NO: 52836 - DNA, 4225 bp, Artificial Sequence
  derived and/or modified sequence
atagagggatggttgatctcatgctaatgaagtttagaccatgttgagccctacttttgttctgtgggaagttggatatcccttatacatctatggctccatcttcatcgttattgtaattatctggcaagtgaaaaggagccaccatgaattgagttcagaacctaaaaggagctgctgccggtgtcaccaaaaagtcaggcaaagagctagagatgcagcatcaacagctaggagacgttcccgggaagaagctgagaagccacagaagctgctctccatcattaaaagccagggctggcttcctctggagagaagtgtgcggcgaatcctgtgtgcagatccctgctgccaaatctgcaattctgtggctctggagattcagcaattgctggtgggtgagaacaaccagatctccctgactttatcggggccattgcagggctcctcttgcctagagatgctgtctacgtctagtatgtctttagatcagagtctggagtttcattcctggcacaccagagagctttcactgtcatctgtaaccccaacactgtcacaattaacagatcagaaatctttaacccagtcagctgcccagtcaacgtatgcagatggcatacaagattactgggctgatcacctccagctagggcaggaatttcaagtgccagatgtgctccggggcccaaacaccatagcttcttcaaggattgagaagccaagggctccactgaaccaggaggagatgacgcagagcaaccccagccttgtccagggaaaccaaggccagcatcacttgaattcccaggtctccttgctgtccctgaacccagaaaccctgaaccggatgcatccaatggccttgcatatggtcctccctgcccacctgccatttctcagtcctgaagtgctgaggcttcttgaggtacatgttaaaaaatggatgcatttccagaggtgggggctcccaagacgtgtggaggagtccctgaggcagcttatgccaaacccaccattgtattaccaacctggaaatgaccagccagtttctttcaacctgaagaatactcctcaggtctctcttcatagatttgagaccatttccctccagacctggtgttcatgtgtggctggccagcccatccagaccttctgggtttctgaatggtccacaatgaacccagaacaaagacaccactgtcagcaaactccaaaccctatggctctagccttgccctctccagcccttaaagccctaagtggcccccatccacagtctgggggacaagataatgactcagggagtgatctccagcagaaatacagccagctattctgtgggctcccttctctgcacagtgagtccctggttgccactttcatgggatctcaaggcctccccaagattgaaaatgtgcccaagccccccttgaaggatccttttctcttcaatgagctctccttcccccaactgctccctaaaacttcaccccagtcagccccaccctcttccccactttccccaaactggatgtctccatctgaccatcaacgagctcagatcaatgtcccatttctgactctggctgagtatgaagccttggagtggcacctgctacagaggcaactccagcttcagtggggctggccagctgccctccagaggtctcagcacacccagtgcctcatgcagcatgagccctgtggcaaagctcagtctcctgagaccacgacagcttcccagacagggaagtccatctcagtgctcaccagggaactactcttcttcccggagcatgcccggaagctgctggaattccacatccagaaacagttgattcgccatcgctggggcctgcctcagaagatccagcagtccatccagttgctccttacctccactgatcagcagactgtgtccagcagcagcacagccctagccaacgtgagcatcccccagcctgtagccctagaggccaacggggcttgcgatgtgctgtcacccattgcggccccagtgtccatccccaggccacacttgttaactcaggtcaaggcaatactgcagagccacatcgactccaaatgtggacaaatccaccagggcaagatccccgcctgtgtacacaggtcctgggactgcagaatttctggggtcctggcagtggctccttttccctgcattccagaaagccagttcctggaactgcagacagcaagtgacccggacctgcatcacaaagttatgccctggatgccaacggcccttgatcagcagcaacaggctttaccaggtactgtcactgaacaccctaagctgctccgagtcttgtctgtggaagccattgagaaactggagacaactttacggcacaagcatctggccttcctgtcggggctgcctgctctgtattatgtggcgctccccagggccctggccccggcagtcactagccaatctgtcatcacagagatggagcctagtcccgtggaaatcccagcagagcctctgattcagatggtttcatttgaagaacagtgtataagtcttgggccatgccctcaaggcaacaatgagagttgtacagacgttgcaaaagagttccagcctgcagtgccagtaaaaggaacaatggagacgctgcctctagaaagccagacgcatcctactagcccccactcactccagacacatatcttgaccaaactaaacttccacctgagaaaaaaggtcctagagatacaatggggaattcccattagggcaaggaagtccagggaacaaactgttgcagcaccagagaacatatccacacagaagtctcttgaaagtctaaaccaccaaggggagacattgctccaggaactgcccatcccaccagacactcttcctgcccctaatccagaaggggttcaccttaaagaacagctggccaatgacttgaaggcagtgcagcagaaccaaaagcaatccaattccaaagctgtaccccagggttctgcccactcggtctccaagatctcacagcccagtggggacatgacagaggcccacatgccttgtgttcaggtagaggccaatgtgaacaaacccagcctggaggaaccctgtggccctgagcctcaaagccctagcaagagcaaggacccagcccatgtccccatgctagcaggaaacagagaggacccagaggaaaccaaagcagccagggaccacagagaaggggatgcggggtttgggcgctcctcaaccagagaagagagacgccctgctgaagaccagaggccagcagggatgcttccaaacaagacaccccgagggtcctggcgatggagccgtagctttcatcttgctgatccctgtcaacacagcccccagcatcaccctcagcttaagctcccacagctacctccacgagtccctggggagaaagagtctgagaaggacctgcaagacagtcaaaccaagctaactgtcatccttgaaccagcgacaattcctgagaatgcccagactgtgttgccccaggcttcacagggtcagcctttcctgagccaaccaactcaggctaagcctttgcagggccaaactttgcaaggccaagttttgcatgggctggtgatgccagtccatgctcaaaagaagcccagccttacagagtctagcttcagaaataaaattaaatgttttctgcagcatattaaccccaagacaaaaggcaaagggcatgaggactccatgttctcagccgctgcgaaggtggccaaaaccagaaaagaaaatgttgcaaagagcctggctccagccaagagccctgtggggagaagtaagacggagaagccgacagggtgctccaaggcccaatctcgtcctgctcagaagctggtgggcccagccttcttggatggtccccaatccctagacgataagctccggctacactccagacaacctggctctgcctcagccctgggctacccccgccactgccctcgtcactgtcctcgagaggcttgtgccaacaaaccagggcacccaacctagctcctgaccctcacctcagatagaaacattggtccgctcaaggagaacatgcagagccatgaaaaagagtttataggctccccaactgctgcagccctccagaggaccagtattgtcatttccataaatgtgcaggtgggacagatgccactagaaatacactctatatttctcagc

SEQ ID NO: 52837 - DNA, 4008 bp, Artificial Sequence
  derived and/or modified sequence
atgctgagccctacgttcgtcttatgggaagtcggataccccctatacatttacgggagcatctttatagtgattgttataatttggcaagtgaaacggtcccaccatgagctatcatccgaacccaaacgcagctgttgtcggtgccatcagaaggtcagacagcgcgctagagatgccgcatctactgccagaaggcgatctcgggaagaggcggaaaagccacagaaactgctgtctatcattaagtctcaggggtggctccctctcgaacgctcggtaagacgcatcctgtgcgccgacccttgttgtcagatatgcaattccgtagcacttgagatccagcagctcctggttggcgagaataatcaaatcagcctgacattgtcagggcctctgcagggatcctcatgcctggaaatgctgagcacgagttccatgtctctcgatcagtcgctcgaatttcactcttggcacacgcgggagttgtcactgtctagcgtcacccctaccttgtcgcagttaaccgatcagaagagcttgacacagagcgccgcacagtccacctatgccgacggaattcaggattattgggccgaccatctgcaactaggacaggagtttcaggtccctgacgttctgcgggggccgaacacgattgcaagttcacgcattgaaaaacctcgcgcacctctgaatcaggaggagatgacacagtcaaacccaagtctggtacaaggcaatcaggggcagcatcatttaaatagccaggtttccttattgtctttgaatcccgaaaccctaaaccggatgcaccccatggctctgcacatggtcctgcctgctcaccttccattcctgtcgccagaggtgcttcgcctcctagaagttcatgtgaaaaaatggatgcactttcaaaggtgggggctgcctagaagagtggaagagtccctgagacagttgatgccaaatcctccactgtactaccagcctggcaatgatcagccagtgagcttcaacttaaaaaacacaccccaagtgtcattgcaccgcttcgagacgatatccttgcagacctggtgctcctgcgtagccggacagcctattcagaccttttgggtcagcgaatggagcaccatgaaccccgagcaacggcaccactgccagcagacacccaaccctatggctctggctctgcccagccccgcattaaaagcactcagtggccctcacccccagagcggcggacaggataacgactcaggatccgatctacaacaaaagtattcccagctcttctgtggtttgccatcattgcattcagaatcactggtggccacctttatgggctctcaagggctcccaaagattgagaatgtgcccaagcctccccttaaggatccattcctttttaatgaactgagtttccctcagctgttacctaagacctctcctcaatctgcgcccccatctagcccactctcccctaactggatgagcccaagcgatcaccagcgcgcccagataaatgttccctttctgactctggccgagtatgaggcacttgaatggcatctattacaaaggcagctacagcttcagtggggttggcctgcagcactccaacggagccaacacacgcagtgccttatgcagcacgagccctgtgggaaagcacaatcccccgaaaccactacagcttcccagaccggaaaatctattagcgtgctgactagagagctactcttcttcccagagcacgcgcggaagctgctcgagttccatatccaaaaacaactgatacgccaccgatggggtctcccacagaagattcagcaatcaatacagctgttactcacttctaccgatcaacagactgtttcgtcctccagcacagctctggccaacgtgtctatacctcagccggtcgctcttgaagcgaacggtgcatgcgacgtgctgagcccgattgccgcacccgtctctataccaagaccacatctgctaacccaggtcaaggctattctacagtcccatatagatagtaaatgtggacaaatccaccagggcaagattcccgcctgtgttcatcggtcttgggactgcagaatttccggcgttctcgccgttgctccgttcccctgtatacctgagagtcagtttctcgagctgcaaacagccagtgatcctgatcttcatcacaaagtaatgccttggatgcctacagccttagatcagcagcagcaggctctgccaggcaccgtgacagaacacccgaagctgctgagagtgctctctgtggaagctattgaaaagctggagactactctgcgccataagcatctagcctttctgagtggcctgcctgctctttactacgtggcactgccccgagctctcgcacccgccgttacatcccagtcagttataaccgagatggaaccctcaccagtagagatcccagccgaaccactgatccagatggtgtctttcgaggagcagtgcattagtttgggaccttgtccccagggcaataacgaatcctgtacagacgtggctaaagaattccagcctgccgttcctgtgaagggaaccatggagaccttgcctctggaaagccagactcatcccacgagcccacacagcctgcaaacacacattctaacaaaactgaactttcacctgcgtaaaaaggtgctggagatccagtggggcattcccatccgagcacgaaagagccgggaacaaacagtagcggccccagagaacatctcaacccagaaatccctggagtccctgaatcaccagggggagaccttactccaagagttgcctatacctcccgacactctgcctgcacccaacccggaaggcgttcatctgaaggagcaattggcgaatgacttgaaggcagttcagcagaaccaaaaacagagtaattctaaagccgtgcctcagggttccgcccactcagtgtccaagatctcccagcccagtggggatatgacagaggcccacatgccgtgcgtacaggtcgaggccaacgtaaataagcctagcctggaagagccttgtgggccagaaccccaatccccatcaaaatcaaaagacccagcccacgtgcccatgctcgctggtaaccgggaggaccccgaggaaaccaaggctgccagggaccaccgcgagggtgacgcaggatttggaaggagcagcactagggaagaacgccggcctgccgaagaccagcgaccagcagggatgctgcctaacaagacccccaggggcagttggcggtggtcacgctcctttcacttggcagacccctgtcaacattcccctcagcaccacccccaactgaaactcccacagctcccgccacgggtccctggagagaaggaaagcgaaaaggatctccaggatagccagacaaagttgacagtcatcctcgaacctgccactataccagaaaacgctcagaccgtgctgccacaggctagccaagggcagcccttcctgtcccagccaacacaggcgaagcccctgcaaggccagacactccaggggcaggttttgcatggcttggtgatgccagtgcacgcgcagaaaaagcccagtctaacggagtcctcatttcgaaataagatcaagtgttttctgcagcatataaaccctaagacaaagggaaaagggcatgaggacagcatgttctccgcggcagctaaagtggctaagactcgtaaagaaaatgtggccaagagcctcgcccccgcgaagtcgccagtggggcggtctaaaactgaaaaaccgacaggctgttccaaggctcaatcgaggcccgcccagaagctcgtcgggcccgcctttttagacggacctcaaagcctggacgacaaactgagactgcactcccggcagccaggaagcgccagcgccctcgggtatccacggcattgcccccggcactgcccacgggaggcttgtgcaaataagccaggacaccccacatag

SEQ ID NO: 52838 - DNA, 4008 bp, Artificial Sequence
  derived and/or modified sequence
atgctgagccccacctttgtgctgtgggaggtgggctaccccctgtacatctacggcagcatcttcatcgtgattgtcatcatctggcaggtgaagaggagccaccacgagctgagcagcgagcccaagaggagctgctgccgctgccaccagaaggtgcggcagagggccagagatgctgccagcacagcccggcggcgcagccgggaggaggccgagaagccccagaagctgctgagcatcatcaagagccagggctggctgcccctggagaggtctgtgcggcgcatcctgtgtgccgacccctgctgccagatctgcaacagcgtggccctggagatccagcagctgctggtgggggagaacaaccagatcagcctgaccctgagcggccccctgcagggcagcagctgcctggagatgctgagcaccagctccatgagcctggaccagagcctggagttccacagctggcacacccgggagctgagcctgagctctgtgacccccaccctgagccagctgacagaccagaagagcctgacccagagcgctgcccagagcacctatgcagatggcatccaggactactgggccgaccacctgcagctgggccaggagttccaggtgcctgatgtgctgcggggccccaacaccatcgccagcagcagaattgagaagccccgggcccccctgaaccaggaggagatgacccagagcaaccccagcctggtgcagggcaaccagggccagcaccacctgaacagccaggtgtccctgctgagcctgaaccctgagaccctgaacaggatgcaccccatggccctgcacatggtgctgcctgcccacctgcccttcctgagccctgaggtgctgcggctgctggaggtgcacgtgaagaagtggatgcacttccagcgctggggcctgccccggcgggtggaggagagcctgcggcagctgatgcccaacccccccctgtactaccagcctggaaatgaccagcctgtgtccttcaacctgaagaacaccccccaggtgtccctgcacagatttgagaccatcagcctgcagacctggtgcagctgtgtggccggccagcccatccagaccttctgggtgtctgagtggagcaccatgaaccctgagcagaggcaccactgccagcagacccccaaccccatggccctggccctgcccagccctgccctgaaggccctgagcggcccccacccccagagcggcggccaggacaatgattctggcagtgacctgcagcagaagtacagccagctgttctgtggcctgcccagcctgcacagcgagagcctggtggccaccttcatgggcagccagggcctgcccaagattgaaaatgtgcccaagccacccctgaaggaccccttcctgttcaatgagctgtccttcccccagctgctgcccaagaccagcccccagagcgccccacccagcagccccctgagccccaactggatgagccccagcgaccaccagagggcccagatcaacgtgcccttcctgaccctggccgagtatgaggccctggagtggcacctgctgcagaggcagctgcagctgcagtggggctggccagctgccctgcagaggagccagcacacccagtgcctgatgcagcacgagccctgtgggaaggcccagagccctgagaccaccacagccagccagacaggcaagagcatctctgtgctgacccgggagctgctcttcttccctgagcacgccaggaagctgctggagttccacatccagaagcagctgatccgccaccgctggggcctgccccagaagatccagcagagcatccagctgctgctgaccagcacagaccagcagacagtgagcagcagcagcacagccctggccaacgtgtccatcccccagcctgtggccctggaggccaacggggcctgtgatgtgctgagccccatcgccgcccctgtgtccatcccccggccccacctgctgacccaggtgaaggccatcctgcagagccacatcgacagcaaatgtggccagatccaccagggcaagatcccagcctgtgtgcaccgctcctgggactgccgcatctctggagtgctggccgtggcccccttcccctgcatccctgagagccagttcctggagctgcagacagccagtgaccctgacctgcaccacaaggtgatgccctggatgcccacagccctggaccagcagcagcaggccctgcccggcaccgtgacagagcaccccaagctgctgcgggtgctgtctgtggaggccatcgagaagctggagaccaccctgcggcacaagcacctggccttcctgagcggcctgcctgccctgtactacgtggccctgccccgggccctggccccagctgtgaccagccagagcgtcatcacagagatggagcccagccctgtggagatcccagctgagcccctcatccagatggtgtcctttgaggagcagtgcatcagcctgggcccctgcccccagggcaacaatgaaagctgcacagatgtggccaaggagttccagcctgctgtgcctgtgaagggcaccatggagaccctgcccctggagagccagacccaccccaccagcccccacagcctgcagacccacatcctgaccaagctgaacttccacctgaggaagaaggtgctggagatccagtggggcatccccatccgggccaggaagagccgggagcagacagtggccgcccctgagaacatcagcacccagaagagcctggagagcctgaaccaccagggcgagaccctgctgcaggagctgcccatccccccagacaccctgcctgcccccaaccctgagggcgtgcacctgaaggagcagctggccaatgacctgaaggctgtgcagcagaaccagaagcagagcaacagcaaggctgtgccccagggcagcgcccacagcgtgtccaagatcagccagcccagcggggacatgacagaggcccacatgccctgtgtgcaggtggaggccaacgtgaacaagcccagcctggaggagccctgtggccctgagccccagagccccagcaagagcaaggaccctgcccacgtgcccatgctggccggcaacagagaagatcctgaggagaccaaggccgcccgggaccaccgggagggagatgctggcttcggccgcagcagcacccgggaggagcggcggcctgctgaggaccagaggcctgctggcatgctgcccaacaagaccccccggggctcctggcgctggagccgctccttccacctggccgacccctgccagcacagcccccagcaccacccccagctgaagctgccccagctgcccccccgggtgcctggagagaaggagagcgagaaggacctgcaggacagccagaccaagctgaccgtcatcctggagcccgccaccatcccagaaaatgcccagacagtgctgccccaggccagccagggccagcccttcctgagccagcccacccaggccaagcccctgcagggccagaccctgcagggccaggtgctgcacggcctggtgatgcctgtgcacgcccagaagaagcccagcctgacagagagcagcttcaggaacaagatcaagtgcttcctgcagcacatcaaccccaagaccaagggcaaaggacatgaggacagcatgttttctgctgctgccaaggtggccaagaccaggaaagaaaatgtggccaagagcctggccccagccaagagccctgtgggccgcagcaagacagagaagcccaccggctgcagcaaggcccagagcaggcctgcccagaagctggtgggccctgccttcctggatggcccccagagcctggatgacaagctgcggctgcacagccggcagcccggcagcgccagcgccctgggctaccccaggcactgccccaggcactgcccccgggaggcctgtgccaacaagccaggccaccccacctag

SEQ ID NO: 52839 - DNA, 4008 bp, Artificial Sequence
  derived and/or modified sequence
atgctgagccccaccttcgtgctgtgggaggtgggctaccccctgtatatttatgggtccatattcatcgtgattgtgatcatctggcaggtgaaacgcagtcaccacgaacttagttctgagccgaaaagatcttgctgccggtgccaccagaaggtgagacagagagcacgtgacgccgcttctaccgctcgtagaaggtcacgcgaagaggcggagaaacctcagaagctcctgtccattataaaatcccaggggtggctaccactcgagaggagtgtgcgccggatcttatgtgctgatccctgttgccaaatttgtaacagtgttgctctagagattcagcagctgctagtgggcgaaaataatcagatctccctgacgcttagtggacccctccagggcagtagctgcctggaaatgttatccacatcctctatgagccttgatcagagcttagagtttcactcttggcacaccagggaactttcactgagttccgtgaccccaacactctcccagttgacagatcagaagagtcttacacagtccgcagcacagtccacctacgccgacggtattcaggactactgggctgaccatttgcagctgggacaagagtttcaagtgcctgacgtgttgcgcggcccaaatactatcgcctcctcacgcattgagaagcccagagcaccgctcaaccaagaggagatgacccagtctaacccaagtcttgtccagggcaaccagggccaacatcaccttaactcccaagtatcattgctgtctcttaatccagagacattaaacagaatgcaccccatggcccttcacatggtactgccagcccacttacctttcctgagcccggaagtgttgcgcctgctggaggtccacgtcaagaagtggatgcattttcagcgctggggacttccacggcgggtggaggaaagtctgcgccaactcatgccaaatccccctctgtactatcagcccggtaatgaccaaccggttagttttaatctcaaaaatactccgcaggtctctttacacagattcgagacaattagccttcagacctggtgttcctgtgtggcaggacaacctatccaaaccttttgggtgtcggagtggtcgaccatgaaccccgagcagaggcaccactgtcaacagacaccaaacccaatggctctagccttaccatcacctgcactgaaggcactctctggcccgcatccccagagtggcggccaggacaatgactctggatccgatttacagcagaaatatagccagctgttctgtggcctcccctctctacatagcgaaagcctggtggctacattcatgggatcacagggtttacctaagatcgagaatgtaccgaagcctcccctgaaggacccctttctcttcaatgagctctcgttccctcaactcctgcctaaaacgtcgccccagtcggctccaccttcttcccctctgagccctaactggatgagtccatccgaccatcagagggcccagattaatgtaccttttctcacattagcggaatacgaagccctggaatggcacttactccaaagacaacttcaactccagtggggctggcccgccgcgctgcaaaggagccagcatactcagtgcctgatgcagcacgagccatgcggaaaagcccagtcccctgagaccaccaccgcttctcagaccggcaaatcgatttcagtgctgactcgcgagctgctattctttccagagcacgctaggaagctgctggaatttcacattcagaaacagttaattcggcaccggtggggccttccccagaagatccaacagtctatccagctcctccttacatccacagaccaacagaccgtgtcctcttcctccactgcgttggctaatgtcagcataccccaacctgtggctttggaagcgaatggtgcctgcgacgttctaagtcctattgctgcccctgtgtcaatcccccgtccacatctgctgacccaagttaaggccatcctccagtcacacatcgacagtaaatgcggccagatccaccagggcaagatcccggcctgcgtccaccgttcctgggactgtcgtatcagcggtgtgctggcagtggccccctttccttgcatccccgaaagccaattcttggagctgcagacggcatcagaccccgacctccaccacaaagtgatgccctggatgcccaccgctctggatcagcaacagcaggccctgccaggaaccgtgacagaacatcccaaacttctgcgggttctgtcagtcgaagccatcgagaagctggaaacaaccctaaggcacaagcatcttgcctttctgtctggcctaccggcgttgtactatgtggcactgcccagagctctggcccccgccgttacatctcagagcgtgatcaccgagatggagccctcacctgtggagatcccagcagaacctctgatacagatggtgtcattcgaggagcaatgcatctccctcggaccctgtcctcaggggaataacgagagctgcaccgatgtggcgaaagaattccagcccgccgttccagtcaagggcacaatggaaacgcttcctctggagagtcagactcaccccacatccccccactcccttcagactcatatactgacaaagctgaacttccatttgagaaagaaagtgctcgaaatccaatggggaattccaatcagagctcggaagagtagggaacagacggttgctgccccagagaacatttccacccagaagtcgctcgaatccttgaaccaccaaggggagaccctgttacaagaactccctatcccaccagacactctcccagctccaaacccagaaggggttcatctgaaagagcaactggccaacgatctgaaagcagtgcagcagaaccagaaacagagcaatagcaaagccgtccctcagggaagcgctcactctgtctctaagatctctcagccttccggtgatatgaccgaggcccatatgccttgcgtccaggttgaggcgaatgtcaacaaaccctcgctggaggagccttgtgggcctgaaccccaaagcccgtctaaatctaaagatcctgcccatgtccccatgctggccgggaaccgagaagatcccgaggaaacaaaggccgccagggaccacagggagggcgatgcaggatttggacgcagcagcacccgggaggagcgtagaccagcagaggatcagcggccagctggcatgcttcctaataagacccctcgtggatcatggaggtggtccagaagctttcaccttgccgacccctgccagcactcgccccaacaccatcctcagctcaaactgcctcagctcccccccagagttccaggggagaaggaatctgagaaagaccttcaggatagtcagacaaagcttacagtaatcctggaacctgctactatcccagagaatgctcaaacggtgcttccccaggcctcgcaaggccagccctttctgtcccagccgacccaggcgaaaccactccaaggccagaccctacaggggcaagtgctgcacgggctggtaatgcctgttcatgcacagaagaaacccagcttgaccgagtcatcattcagaaacaagattaagtgttttctgcagcacattaaccccaaaacaaaagggaaaggccatgaggactccatgttctcagctgctgctaaggtggccaagacacgaaaggagaatgtggcaaagagcctggcgcccgccaaatctcctgtcggccgctccaaaactgagaagccgaccgggtgttctaaagcacagagccggcctgcccaaaaactggtcggtcctgcattcctggatggtccccagagccttgatgacaaactccgtttgcatagtcggcagcccggatccgccagtgcactcgggtaccctagacactgccctagacattgcccacgcgaggcttgtgctaacaagcctgggcatcctacctag

SEQ ID NO: 52840 - DNA, 4008 bp, Artificial Sequence
  derived and/or modified sequence
atgctgtcacctacattcgtattgtgggaagtgggctatcccctgtatatatacggcagcatctttattgtcatcgtgattatttggcaggttaagcggagtcatcacgaattgagttccgaaccaaagcgaagctgctgccgttgtcaccagaaagttaggcagagggcacgcgacgctgcatcgaccgccagaagacggagccgagaggaagctgagaaaccccagaagctgctgtccattattaagtctcaaggttggctgccactagaacgttcagtcaggcgaatcttatgcgccgatccgtgttgtcagatttgtaatagcgtggctctggagatccaacagctgctcgtaggcgaaaataaccagatctcattaacattgagcggcccattgcagggctctagttgcctcgagatgctgtctacttcgtcgatgagcctcgatcagtctttggaattccattcctggcatacaagggagctatctctatcaagcgtcaccccaactcttagccaactgactgaccagaaatccctgacccagtcagccgctcagtccacttatgctgacggaatacaggactactgggccgaccacctgcagttgggtcaggagttccaggtacccgacgtgctccgcggaccaaacaccattgcgagctcgcgtatagagaaacctcgggctccgctgaatcaagaggagatgacccagagcaatccatctctcgtacagggtaaccagggccagcaccaccttaacagccaggtctccctcctgtccctgaaccccgagacattgaatagaatgcaccccatggccttgcacatggtcttaccagcccacctccccttcctgtctcccgaggtgttgcgtcttctcgaagtgcacgtcaaaaagtggatgcacttccagagatggggcttgcccagacgggtagaagagtctctgaggcagcttatgcccaacccccctctttattaccaacccggaaacgatcagcctgtcagcttcaacctgaaaaatacacctcaagtgtccctccatcgtttcgagactatctccctgcagacatggtgcagttgcgtcgccggacagccaattcagaccttctgggtgtccgagtggtccactatgaaccccgaacaaaggcaccactgccaacaaacgcctaatccaatggccctggccctgccatcaccagcactaaaggcgctgtcagggcctcatccccagtccggcggtcaggataacgattcaggatctgacttgcagcagaagtactctcaactcttctgtggcctccccagtctgcatagcgagtctctggttgcgacgttcatgggtagtcaggggctgcctaaaattgaaaatgttcccaagccacccttgaaagacccatttctctttaatgaactttcattccctcaactgctccccaaaacctctccacagagtgcacccccatccagtccccttagtccaaactggatgtctcccagcgatcatcagcgtgcgcaaataaacgtcccgttcctgaccctggctgagtatgaagcactggagtggcacttactccagcgccagctccagctccagtggggctggcccgctgccctccagcgtagccaacatacacagtgcctcatgcagcacgaaccctgcgggaaggcacaatcacccgagacaaccaccgcgtcacagacaggcaagtctatcagtgtgctcactcgggaacttctattcttccccgaacacgcccgaaagctccttgaattccatattcagaagcaactcatccgacacagatggggattgccccagaaaatccaacagtcaattcaattactcttaactagcactgaccagcagacagtctcgagctcatccacagctctagccaatgtgagtatcccgcaacctgtcgccctggaggctaacggagcctgcgacgtactatccccaatcgccgctcccgtgtcgatcccaaggccacacctcttgacccaggttaaggctatcctgcagagccatattgacagtaagtgcggccaaatacatcagggcaaaattcctgcatgcgtacacagatcatgggactgccgaatctcaggagtgctcgccgtggccccatttccctgtatcccagaatcacagttccttgaacttcaaactgcgtctgatcctgacctgcatcataaggtgatgccatggatgcctaccgccttggatcagcagcagcaggctctccccggaacagtcacagagcatccaaagctgctcagagtgctgagtgtggaagccatcgaaaaactggagacgaccctccggcacaaacacctggcctttctgagcggtctccccgcactctattatgtcgcgctgcccagagcattggcaccagccgtgaccagtcagtctgtgatcactgagatggaaccatctccggtagagattcctgccgagcctttgattcagatggtctccttcgaggagcagtgtatctcccttgggccttgccctcaagggaataacgaatcatgcacagatgtggccaaagaattccagccagcagtgccagtgaaggggaccatggagactttaccactcgaatctcagacacatcccaccagtccacacagcctccagactcacatccttaccaagctgaacttccaccttcgtaagaaggtactggaaatccaatggggaattcctatccgggcaaggaagagtagagagcagaccgtggcggctcctgagaatataagtactcagaagagcctggagagtctcaaccaccagggggagaccctccttcaggagctcccaataccccctgacactctgcctgcccctaacccagagggggtgcatttaaaagaacagctggctaatgatctaaaggccgtacagcagaaccaaaagcagtccaactccaaggctgtgccacagggatctgcccactccgtgagtaagataagccagccttcgggcgatatgaccgaggcacatatgccatgcgtgcaagtggaggcaaacgtgaacaagccatctctggaggagccatgcggccctgagccgcagtcaccgagtaagagtaaggaccctgcacacgtgcctatgctagcagggaacagggaagaccctgaggagaccaaagctgccagggaccacagggaaggcgacgccggtttcggccgatccagtacccgtgaggagcgcagacctgccgaggatcagagacctgcagggatgcttccaaacaagaccccacgcggatcttggcggtggagccggtcttttcatcttgccgatccttgccaacactcccctcagcaccacccacagctaaaactgccccaactgccacctagagtccccggtgaaaaggaatctgagaaggacctccaggacagccaaacaaaactcacggtgatcttggaacctgccacaattcccgagaacgctcagaccgtactcccgcaggcttcccagggacagccttttctaagccagcctacccaagctaagccgcttcagggtcagacgctgcagggacaagttcttcacgggcttgtgatgccagttcacgcacaaaaaaaaccctctctcaccgaatccagttttcgaaataaaatcaaatgcttcctgcagcatatcaatccgaagactaagggcaaagggcacgaggatagtatgttttccgctgccgctaaagtcgctaaaaccaggaaggaaaacgtggccaagtcattggccccagctaagtcccccgtgggtcgctcaaagaccgagaaacccaccggctgctctaaggctcagtctcgcccagcccaaaagctggtcggtcccgctttcctggacggtcctcagagcttggatgacaaactacgactgcactctcggcagcccggatcagcttccgccttagggtatccaaggcattgcccgagacattgtccacgggaagcatgtgccaacaagccaggccacccaacatag

SEQ ID NO: 52841 - DNA, 417 bp, Artificial Sequence
  derived and/or modified sequence
atgctgagccccaccttcgtgctgtgggacgtgggctaccccctgtacacctacggcagcatcttcatcgtgatcgtgatcatctggcaggtgaagagaagccaccacgagctgaacctggaggtggagagaagctgctgctggagacaccagaaggtgagacagagagccagagacgccgccagcaccgccagaagactgagccaggaggaggaccagaagccccaggagctgttcagcgtgatgaagagagccggcttcccccagagagaggtgtgcggcgagagctacgtgcagatccccgtggccaagttcgccatgctgtggctgtggagattcagcagctgctggagaatgagaatgaccagaagcccccagctgtgcagaggcgtgcaccacagaagccccctggcctag

SEQ ID NO: 52842 - DNA, 1671 bp, Artificial Sequence
  derived and/or modified sequence
atgcaccccatggccctgcacatggtgctgcccgcccacctgcccttcctgagccccgaggtgctgagactgctggaggtgcacgtgaagaagtggatgcacttccagagatggggcctgcccagaagagtggaggagagcctgagacagctgatgcccaacccccccctgtactaccagcccggcaacgaccagcccgtgagcttcaacctgaacaacaccagccaggtgagcctgcacagaagcgagaccatcagcctgcagacctggtgcagctgcgtggccggccagcccatccagaccttctgggtgagcgagtggagcaccatgaaccccgagcagagacaccactgccagcagacccccaaccccatggccctggccctgcccagccccgccctgaaggccctgagcggcccccacccccagagcggcggccaggacaacgacagcggcagcgacctgcagcagaagtacagccagctgttctgcggcctgcccagcctgcacagcgagagcctggtggccaccttcatgggcagccagggcctgcccaagatcgagaacgtgcccaagccccccctgaaggaccccttcctgttcaacgacctgagcttcccccagctgctgcccaagaccagcccccagagcgccccccccagcagccccctgagccccaactgggtgagccccagcgaccaccagagagcccagatcaacgtgcccttcctgaccctggccgagtacgaggccctggagtggcacctgctgcagagacagctgcagctgcagtggggctggcccgccgccctgcagagaagccagcacacccagtgcctgatgcagcacgagccctgcggcaaggcccagagccccgagaccaccaccgccagccagaccggcaagagcatcagcgtgctgaccagagagctgctgttcttccccgagcacgccagaaagctgctggagttccacatccagaagcagagcatcagacacagatggggcctgccccagaagatccagcagagcatccagctgctgctgaccagcaccgaccagcagaccgtgagcagcagcagcaccgccctggccaacgtgagcatcccccagcccgtggccctggaggccaacggcgcctgcgacgtgctgagccccatcgccgcccccgtgagcatccccagaccccacctgctgacccaggtgaaggccatcctgcagagccacatcgacagcaagtgcggccagatccaccagggcaagatccccgcctgcgtgcacagaagctgggactgcagaatcagcggcgtgctggccgtggcccccttcccctgcatccccgagagccagttcctggtgctgcagaccgccagcgaccccgacctgcaccacaaggtgatgccctggatgcccaccgccctggaccagcagcagcaggccctgcccggcaccgtgaccgagcaccccaagctgctgagagtgctgagcgtggaggccatcgagaagctggagaccaccctgagacacaagcacctggccttcctgagcggcctgcccgccctgtactacgtggccctgcccagagccctggcccccgccgtgaccagccagagcgtgatcaccgagatggagcccagccccgtggagatccccgccgagcccctgatctag

SEQ ID NO: 52843 - DNA, 417 bp, Artificial Sequence
  derived and/or modified sequence
atgctatcgccaacctttgtgttgtgggacgtcggctaccccctttacacatatggaagtatttttatcgtgattgtcatcatttggcaggtcaaacgcagtcaccatgagctcaatctcgaagtcgagcgatcttgttgctggcgacaccagaaagtcagacagcgcgcgcgtgacgccgcttctaccgcaagaaggttgtcacaggaagaagaccagaaaccccaagaactgttctcagtaatgaagagagcagggttcccacaacgggaggtgtgcggcgagagctatgtgcagattccggtggccaagttcgctatgctgtggctgtggagattctcctcttgctggaggatgagaatgacacgctcccctcagctatgtcgtggggttcatcaccgaagccccctggcctag

SEQ ID NO: 52844 - DNA, 1671 bp, Artificial Sequence
  derived and/or modified sequence
atgcaccctatggcccttcacatggtgctgccagcacatctgccttttctctccccggaagttctccggcttctggaggtacacgtgaaaaagtggatgcactttcagcggtggggattgccccgcagagtggaagagtctttacggcagttaatgccgaaccctcctctgtactaccagcccggcaacgaccagcctgtgtccttcaacctcaataatacgtctcaggtctccctgcaccgctccgaaacaatatcactccagacctggtgtagttgtgtcgctggccagcccatccagactttctgggtctctgagtggtccacaatgaatcctgaacagaggcatcattgccagcagactcctaatcccatggccctggcactgccaagtcccgcactgaaagccctctcaggaccacatccacaaagtgggggccaggataacgattctggttctgatctccagcaaaagtatagccaattattctgcggactcccaagcctacattccgagtccctggtagccacctttatgggttcccaggggctgcctaaaatcgagaacgttcctaaaccacccctaaaagatcctttcttattcaacgatctctcatttcctcagctgctgcccaaaacatcccctcaatccgctccaccgagctccccactgagcccgaactgggtcagcccttcagaccaccaacgggctcaaataaacgttccatttctgaccctggctgaatacgaggccctggaatggcacctgcttcagaggcagctgcagctgcagtggggctggccagcagcattgcagcggagccagcatacccagtgcttgatgcagcatgaaccttgcggcaaggcccagtctccggagacaacgacggcaagtcaaacaggcaagtctataagcgtcctgactcgcgaattactcttcttccccgagcatgctcgaaagttgctagaatttcacatccaaaagcaatcgatccggcatagatggggactgccccagaagatacagcagtcaatacagctgctactcacgtctaccgaccaacagaccgtttcctcctccagtaccgccctggccaacgtgtccataccacagcccgtggccttggaggcaaacggagcctgtgacgtactgagtcccatcgctgcgccggtgagtattccgcggccacaccttctgactcaggtcaaggccatcctccagtcccacatcgactctaaatgtgggcagatccaccaggggaagatacccgcctgcgtgcatagatcatgggattgccggatttcaggcgtgctggccgttgcaccgtttccttgtatacctgaatcccaatttctagtgcttcagacagcatccgaccctgacctgcatcataaagtgatgccatggatgcctacagcacttgatcagcagcagcaagctctgcctggtaccgttaccgagcatcccaaactgcttagagtcctgtcagtcgaggcgattgagaaactcgaaacaacacttcggcacaagcatctggcctttttgtctggcttacctgcactatattacgtggctctgccaagggcactcgctcccgctgtgacaagccagagcgtcatcaccgagatggaaccatctcctgttgaaatcccagccgagccactgatatag

SEQ ID NO: 52845 - DNA, 5400 bp, Artificial Sequence
  derived and/or modified sequence
gaccatgttgagccctacttttgttctgtgggatgttggatatcccttatacacctatggctccatcttcatcgttattgtaattatctggcaagtgaaaaggagccaccatgaattgaacttggaagttgaaaggagctgctgctggcgtcaccaaaaagtcaggcaaagagctagagatgcagcatcaacagctaggagactttctcaggaagaagatcagaagccacaagagctgttctctgtcatgaaaagggctggcttcccccagagggaagtgtgcggcgaatcctatgtacagatccctgttgccaaatttgcaatgctatggctctggagattcagcagttgctggcggatgagaatgactagatctccccaactttgtcgaggagtccatcacaggtctcctcttgcctagagatcttgtctctgtctagtgtatcctttgagcagagtatagagctccattccagaaatatcagagagctttcactggcatctataaacccaacactgtcacaattaacagatcagaaatctttaacccagtcagctgcccagtcaacgtatgcagatggcatacaagattactgggctgatcacctccagctagggccggaatttcaagtgccagctgtgctccggggcccaaacaccatagcttcttcaaggcttgacaagccaagggctccactgaaccaggaggagatgagcagagcaaccccagccttgtccagggaaaccaaggccagcatcacttgaatttccaggtctccttgctgtccctgaacccagaaaccctgaaccggatgcatccgatggccttgcatatggtcctccctgcccacctgccatttctcagtcctgaagtgctgaggcttcttgaggtacatgttaaaaaatggatgcatttccagaggtgggggctcccaagacgtgtggaggagtccctgaggcagcttatgccaaacccaccattgtattaccaacctggaaatgaccagccagtttctttcaacctgaataatacttctcaggtctctcttcacagatctgagaccatttccctccagacctggtgttcatgtgtggctggccagcccatccagaccttctgggtttctgaatggtccacaatgaacccagaacaaagacaccactgtcagcaaactccaaaccctatggctctagccttgccctctccagcccttaaagccctaagtggcccccatccacagtctgggggacaagataatgactcagggagtgatctccagcagaaatacagccagctattctgtgggctcccttctctgcacagtgagtccctggttgccactttcatgggatctcaaggccttcccaagattgaaaatgtgcccaagccccccttgaaggatccttttctcttcaatgatctctccttcccccaactgctccctaaaacttcaccccagtcagccccaccctcttccccactttcgccaaattgggtgtctccatctgaccatcaacgagctcagatcaatgtcccatttctgactctggctgagtatgaagccttggagtggcacctgctacagaggcaactccagcttcagtggggctggccagctgccctccagaggtctcagcacacccagtgcctcatgcagcatgagccctgtggcaaagctcagtctcctgagaccacgacagcttcccagacagggaagtccatctcagtgctcaccagggaactactcttcttcccggagcatgcccggaagctgctggaattccacatccagaaacagtcgattcgccatcgctggggcctgcctcagaagatccagcagtccatccagttgctccttacctccactgaccagcagactgtgtccagcagcagcacagccctagccaacgtgagcatcccccagcctgtagccctagaggccaacggggcttgcgatgtgctgtcacccattgcggccccagtgtccatccccaggccacacttgttaactcaggtcaaggcaatactgcagagccacatcgactccaaatgtggacaaatccaccagggcaagatccccgcctgtgtacacaggtcctgggactgcagaatttctggggtcctggcagtggctccttttccctgcattccagaaagccagttcctggtactgcagacagcaagtgacccagacctacatcacaaagttatgccctggatgccaacggcccttgatcagcagcaacaggccttaccaggtactgtcactgaacaccctaagctgctccgagtcttgtctgtggaagccattgagaaactggagacaactttacggcacaagcatctggccttcctgtcggggctgcctgctctgtattatgtggcgctccccagggccctggccccggcagtcactagccaatctgtcatcacagagatggagcctagtcccgtggaaatcccagcagagcctctgatttagatggtttcatttgaagaacagtgtataagtcttgggccatgccctcaaggcaacaatgagagttgtacagacgttgcaaaagagttccagcctgcagtgccagtaaaaggaacaatggagacgctgcctctagaaagccagacgcatcctactagcccccactcactccagacacatatcttgaccaaactaaacttccacctgagaaaaaaggtcctagagatacaatggggaattcccattagggcaaggaagtccagggaacaaactgctgcagcaccagagaacatatccacacagaagtctcttgaaagtctaaaccaccaaggggagacattgctccaggaactgcccatcccaccagacactcttcctgcccctaatccagaaggggttcaccttaaagaacagctggccaatgacttgaaggcagtgcagcagaaccaaaagcaatccaattccaaagcagtaccccagggttctgcccactcggtctccaagatctcacaacccagtggggacatgacagaggcccacatgccttgtgttcaggtagaggccagtgtgaacaaccccagcctggaggaaccctgtggccctgagcctcaaagccctagcaagagcaaggacccagcccatgtccccatgctagcaggaaacagagaggacccagaggaaaccaaagcagccagggactacagagaaggggatgcggggtttgggcgctcctcaaccagagaagagagacgccctgctgaagaccagaggccagcagggatgcttccaaacaagacaccccgagggtcctggcgatggagccgtagctttcatcttgctgatccctgtcaacacagcccccagcatcaccctcagtttaagctcccacagctacctccacgagtccctggggagaaagagtctgagaaggacctgcaagacagtcaaaccaagctaactgtcatccttgaaccagcaacaattcctgagaatacccagactgtggtgccccagcttcacagggtcagcctttcctgagccaaccaactcaggctaagcctttgcagggccaaactttgcaatgccaagttttacatgggctggtgatgccagcccatactcaaaagaagcccagccttacagagtctagcttcagaaataaaattaaatgttttctggagtgtattaaccccaagacaaaaggcaaagggcacaaggattccatgttctctgccactgtgaaggtggccaaaaccagaaaagaaaatgttgcaaagagcctggctccagccaagagccctgtggggagaagtaagacagagaagccgacagggtgctccaaggcccaatctcatcgtgctcagaagctgatgggcccagctttcttggatggtccccagtccctagacaataagcttcggttacactccagacaacctggctctgcctcaaccccaggccacccccaccactgtcctcgtcactgtccttgagtggcttgtgccccccaaccagggcacccaccctagctcctaaccctcagttcagatagaaacattggtctgctcaaggagaacacacagagccatgaaaaagagtttataggctccccaactgctgcagccctccagaggaccagtattttcatttccataaatatgctggtggggcagggtgccactagaaatgcactctatatgtttcagcaatacgttgcccatctgctccttatctccactgtattgtgttaagggaaggtgtgagggaggctaaaaagaccttcctgtctagggaaggagctttaacccacaattcagatggttcattttagaggagtgccacagtattccctccttgaggaggtgcttttgtgtttatcaaaacacaatatctaataagacagatgtcagatccagatgatagactctcctctgacttctccctgtttatactgggaagatctttctagaaaatccatcttggagcctgctgtaatcctgctgcctgtttactgcctccactgcctctcagttgcatgaaatgaaagcctcctggaatgagatgacagtagaaaatggagaagggcctgtcccacaggcccagggattggtagggagcagggtcacgtagttggaggtcagagtacctgtgacaaaagttgattctcatgcctgaccaggacatgagaatagagaaaagacagtttgcttggtgctaaaatgagcctagagccaggaggcaaacccaaggcccaagtgctttgggagggatcactgagcttagttctgcttgcccttagtgtgatgaagggcagggtgttgagcactgaagtttctgggaaagaaccacaaatataagaggttttctaaacatatgtgagcctgtcaagttactgccagcagcttgtacccaggcctactgtttctataccacctgtgcctggagcccttctccaccactctccttgccatgatccttactccttaaatttatcttcacagtaactaatggtgggcacccagtcagctgaatcccctcccaggatctacctggtgccttttcctcaggggatgactcctacactttttcctgccaaggacggcaccacagaagcctggcagctccagcccttggttcctgtcacccttctacatctcttcattgtgtcccactgcatttctgaaaacactgaagccaatcaccttggctgtcaaaagaagacaaggcttttggaaagtgtcctattaacacagaaagtgaccacaaatctacaatttaatgccacacatgagtctaacaatgagatcagctgctcataactgaggtggtgggactctggcccttttgcctctctctgggaatgtccaatattttgctattcagggaaatacatagttattattaattgaaatactatgtg

SEQ ID NO: 52846 - DNA, 417 bp, Artificial Sequence
  derived and/or modified sequence
atgctgagccccacctttgtgctgtgggatgtgggctaccccctgtacacctacggcagcatcttcatcgtgattgtcatcatctggcaggtgaagaggagccaccacgagctgaacctggaggtggagaggagctgctgctggaggcaccagaaggtgcggcagagggccagagatgctgccagcacagcccggcggctgagccaggaggaggaccagaagccccaggagctgttctctgtgatgaagagagctggcttcccccagcgggaggtgtgtggggagagctatgtgcagatccctgtggccaagtttgccatgctgtggctgtggaggttcagcagctgctggaggatgaggatgaccaggagcccccagctgtgccggggcgtgcaccacaggagccccctggcctag

SEQ ID NO: 52847 - DNA, 1671 bp, Artificial Sequence
  derived and/or modified sequence
atgcaccccatggccctgcacatggtgctgcctgcccacctgcccttcctgagccctgaggtgctgcggctgctggaggtgcacgtgaagaagtggatgcacttccagcgctggggcctgccccggcgggtggaggagagcctgcggcagctgatgcccaacccccccctgtactaccagcctggaaatgaccagcctgtgtccttcaacctgaacaacaccagccaggtgtccctgcacaggtctgagaccatcagcctgcagacctggtgcagctgtgtggccggccagcccatccagaccttctgggtgtctgagtggagcaccatgaaccctgagcagaggcaccactgccagcagacccccaaccccatggccctggccctgcccagccctgccctgaaggccctgagcggcccccacccccagagcggcggccaggacaatgattctggcagtgacctgcagcagaagtacagccagctgttctgtggcctgcccagcctgcacagcgagagcctggtggccaccttcatgggcagccagggcctgcccaagattgaaaatgtgcccaagccacccctgaaggaccccttcctgttcaatgacctgtccttcccccagctgctgcccaagaccagcccccagagcgccccacccagcagccccctgagccccaactgggtgagccccagcgaccaccagagggcccagatcaacgtgcccttcctgaccctggccgagtatgaggccctggagtggcacctgctgcagaggcagctgcagctgcagtggggctggccagctgccctgcagaggagccagcacacccagtgcctgatgcagcacgagccctgtgggaaggcccagagccctgagaccaccacagccagccagacaggcaagagcatctctgtgctgacccgggagctgctcttcttccctgagcacgccaggaagctgctggagttccacatccagaagcagagcatccgccaccgctggggcctgccccagaagatccagcagagcatccagctgctgctgaccagcacagaccagcagacagtgagcagcagcagcacagccctggccaacgtgtccatcccccagcctgtggccctggaggccaacggggcctgtgatgtgctgagccccatcgccgcccctgtgtccatcccccggccccacctgctgacccaggtgaaggccatcctgcagagccacatcgacagcaaatgtggccagatccaccagggcaagatcccagcctgtgtgcaccgctcctgggactgccgcatctctggagtgctggccgtggcccccttcccctgcatccctgagagccagttcctggtgctgcagacagccagtgaccctgacctgcaccacaaggtgatgccctggatgcccacagccctggaccagcagcagcaggccctgcccggcaccgtgacagagcaccccaagctgctgcgggtgctgtctgtggaggccatcgagaagctggagaccaccctgcggcacaagcacctggccttcctgagcggcctgcctgccctgtactacgtggccctgccccgggccctggccccagctgtgaccagccagagcgtcatcacagagatggagcccagccctgtggagatcccagctgagcccctcatctag

SEQ ID NO: 52848 - DNA, 417 bp, Artificial Sequence
  derived and/or modified sequence
atgctgagccccaccttcgtgctgtgggacgtgggctaccccctgtacacttatggctccatcttcattgtcatcgtaattatatggcaggttaaacgcagtcaccacgagctgaacctggaggtcgagagatcttgctgttggcgccatcagaaggtcaggcaaagggcccgcgacgctgctagtacggcgcggcgactgtctcaggaggaggatcagaaaccacaggagctgttttccgttatgaaaagagcaggtttcccacagcgggaagtatgcggcgaatcctacgtgcagatccctgtcgcaaaattcgcgatgctatggctgtggaggtttagctcctgctggcggatgaggatgacgcggagccctcagctctgccgtggcgtgcaccaccgtagtccactcgcatag

SEQ ID NO: 52849 - DNA, 1671 bp, Artificial Sequence
  derived and/or modified sequence
atgcaccccatggccctgcacatggtgctgcccgcccacctgcccttcctgtcgcccgaagttttaagactgttggaggtacacgtcaaaaaatggatgcatttccagcgctggggcttgccacgtcgggttgaagaatccctcagacaattgatgcctaaccctccactttactaccagccaggcaacgaccaacccgtctcattcaatctaaataacaccagccaggtttcattgcataggagcgagaccatctcactgcaaacctggtgcagttgcgtcgccggccagccaattcagactttttgggtgagcgaatggagcactatgaacccagaacagcgacatcattgtcagcaaacacccaatccaatggctctcgccttaccgtcccctgctcttaaggctctaagtgggccgcaccctcagtctggaggacaggataacgattccgggtctgacctgcagcagaagtactcacaactgttttgtgggctcccgtcattgcactctgaaagcctcgtggccacctttatgggctcccaggggctgcctaaaatcgaaaacgtgccgaagcccccccttaaggacccatttctgtttaacgatctgagctttccacagctgcttcctaagacaagcccacagtccgcccccccgtctagccccctgtcccctaattgggtgagccccagtgaccatcagagagcccaaatcaacgtgccgtttctgactcttgctgagtatgaagcattagagtggcatctcctgcaacggcagttgcagctccagtggggatggccagcggcactgcaaagatctcagcatactcaatgtctcatgcagcacgagccctgtggtaaagctcagtctcccgagaccacgacagccagccagacaggcaagtctatctccgtattgacccgtgagttactgtttttcccagaacatgcccggaagctgctggagttccacattcagaagcagtcaatcaggcaccggtggggactcccacaaaagatacagcagtctattcaactcctgctcaccagtactgatcagcagacagtaagctcgagcagcacagccctggctaacgtgtccatcccacaacctgtggccctcgaagcgaacggggcgtgcgatgtcctttctccaatcgctgcacccgtaagtatcccacgcccccacctcctcacgcaggtcaaggcaatacttcagagtcatattgattctaagtgtggacaaattcatcagggcaagattcccgcctgcgtgcatcgctcctgggactgcaggatcagcggcgtcctggcagtggccccgttcccatgcattcccgagtctcagttcctggtcctgcagacagcatcagaccctgaccttcaccataaggtgatgccgtggatgcccactgcgctggatcagcaacagcaggcactccccgggacggttactgagcacccaaaacttctgagggtgctctctgtcgaagcaatcgagaagctggagaccaccctccgccacaagcatctggccttcttgtcaggccttcctgccctttactacgtagcgttacctcgagcccttgctcccgcagtgacctctcagtcggtgatcaccgagatggaaccttctcccgtggagatacctgccgagccacttatctag

SEQ ID NO: 52850 - DNA, 417 bp, Artificial Sequence
  derived and/or modified sequence
atgctctcaccaaccttcgtcctctgggatgtgggttaccccttgtatacatatggtagcatattcatcgtgatagtgatcatctggcaggtgaaacggtcccaccatgagttaaatctcgaagtggagagaagctgttgctggagacatcagaaagtgaggcaacgcgcacgcgacgcggcttccacagcccgtcgcctgtcccaggaggaggatcagaaaccacaagaactgttctcggtcatgaagcgggctggatttccccaaagagaggtgtgtggcgaaagctatgtgcagatccccgtggccaagtttgcaatgttgtggttgtggcggttcagtagctgctggcgcatgaggatgaccaggagccctcaactgtgccgaggggtccaccatcggtcgcctctggcctag

SEQ ID NO: 52851 - DNA, 1671 bp, Artificial Sequence
  derived and/or modified sequence
atgcacccgatggcactccacatggtgctccccgctcacttgccttttctctcaccagaggtcctacggttactggaagtgcacgttaaaaaatggatgcactttcagaggtgggggttacccagacgcgtggaagaatcgctacggcagctgatgccgaatccaccgctgtactatcagccaggcaatgaccagccagtttctttcaacttgaataatacgagccaggtctctctccataggagcgagaccattagtttgcagacttggtgcagttgtgtggccggacagcctattcaaacgttctgggtgagtgagtggtctactatgaatccagagcagcggcatcactgtcagcagacaccaaaccccatggcccttgctctgccctcccctgcacttaaggcactatcaggcccacatccccagagcggcggacaggacaatgactcaggtagtgacctgcagcagaagtactcacaattgttttgcggcctgccgtctctccattctgaatctctggtcgccacatttatgggaagccagggtctgcctaaaattgaaaacgtgcccaagcccccattgaaggatccgttcctctttaacgacctgagctttccacagctgctccccaaaacatcaccacaatctgcaccacccagctccccgctgtccccaaactgggtgtccccctccgaccaccaacgcgcacaaattaacgtgccctttttgacacttgctgagtacgaggccctcgaatggcacctgctccaaaggcaactgcaacttcagtggggttggcctgctgccttacagcggtcccagcatacccagtgtctcatgcaacatgaaccttgtgggaaagcccaatcccctgagactacgacagcctcacagacagggaagtccataagcgtcctgacccgagagctgttatttttccctgaacacgcaagaaagctgttggagttccacattcagaagcagagtatacgccatcgctggggtctgccacaaaagattcagcagtcaatccagttgctgctgacctccaccgaccagcaaacagttagtagcagctccaccgctctggccaacgtgtccattcctcagccagtggccctggaggcaaacggcgcatgtgacgttctgtcccccatagccgctcctgtaagcatcccccgtccgcatctcttgacgcaggttaaggccattttgcagagtcacattgattccaaatgcggacagatccaccaggggaaaataccagcctgtgtacatagatcatgggattgtaggatttccggggtgctggcagtcgccccatttccatgcatcccagagagccaatttctcgtgctgcagaccgcttcagatcccgatctccaccacaaggtcatgccttggatgccaacagcgctggaccaacagcagcaggccctgcctggcacagtgacagagcacccaaagctcctcagagttctctcagtcgaagccattgaaaagctggaaacgacattgaggcacaagcacctcgcctttctcagcgggctcccagctctttattatgtggccctaccccgtgctctggctccagccgtgacctcacagtctgtgataactgaaatggagccaagcccagtcgagatacccgcagagcccctaatatag

SEQ ID NO: 52852 - DNA, 3752 bp, Artificial Sequence
  derived and/or modified sequence
atgacaaggcctagcactgggagtcattaggcaccagaaccctgaatgccgagatagagggatggctgatctcatgctaatgaggtttagaccatgttgagccctacttttgttctgtgggatgttggatatcccttatacacctatggctccatcttcatcgttattgtaattatctggcaagtgaaaaggagccaccatgaattgaacttggaagttgaaaggagctgctgctggcgtcaccaaaaagtcaggcaaagagctagagatgcagcatcaacagctaggagactttctcaggaagaagatcagaagccacaagagctgttctctgtcatgaaaagccagggctggcttcccccagagggaagtgtgcggcgaatcctatgtacagatccctgttgccaaatttgcaatgctatggctctggagattcagcagttgctggcggatgagaatgactagatctccccaactttgtcgaggagtccatcacaggtctcctcttgcctagagatcttgtctctgtctagtgtatcctttgagcagagtatagagctccattccagaaatatcagagagctttcactggcatctataaacccaacactgtcacaattaacagatcagaaatctttaacccagtcagctgcccagtcaacgtatgcagatggcatacaagattactgggctgatcacctccagctagggccggaatttcaagtgccagctgtgctccggggcccaaacaccatagcttcttcaaggcttgacaagccaagggctccactgaaccaggaggagatgagcagagcaaccccagccttgtccagggaaaccaaggccagcatcacttgaatttccaggtctccttgctgtccctgaacccagaaaccctgaaccggatgcatccgatggccttgcatatggtcctccctgcccacctgccatttctcagtcctgaagtgctgaggcttcttgaggtacatgttaaaaaatggatgcatttccagaggtgggggctcccaagacgtgtggaggagtccctgaggcagcttatgccaaacccaccattgtattaccaacctggaaatgaccagccagtttctttcaacctgaataatacttctcaggtctctcttcacagatctgagaccatttccctccagacctggtgttcatgtgtggctggccagcccatccagaccttctgggtttctgaatggtccacaatgaacccagaacaaagacaccactgtcagcaaactccaaaccctatggctctagccttgccctctccagcccttaaagccctaagtggcccccatccacagtctgggggacaagataatgactcagggagtgatctccagcagaaatacagccagctattctgtgggctcccttctctgcacagtgagtccctggttgccactttcatgggatctcaaggccttcccaagattgaaaatgtgcccaagccccccttgaaggatccttttctcttcaatgatctctccttcccccaactgctccctaaaacttcaccccagtcagccccaccctcttccccactttcgccaaattgggtgtctccatctgaccatcaacgagctcagatcaatgtcccatttctgactctggctgagtatgaagccttggagtggcacctgctacagaggcaactccagcttcagtggggctggccagctgccctccagaggtctcagcacacccagtgcctcatgcagcatgagccctgtggcaaagctcagtctcctgagaccacgacagcttcccagacagggaagtccatctcagtgctcaccagggaactactcttcttcccggagcatgcccggaagctgctggaattccacatccagaaacagtcgattcgccatcgctggggcctgcctcagaagatccagcagtccatccagttgctccttacctccactgaccagcagactgtgtccagcagcagcacagccctagccaacgtgagcatcccccagcctgtagccctagaggccaacggggcttgcgatgtgctgtcacccattgcggccccagtgtccatccccaggccacacttgttaactcaggtcaaggcaatactgcagagccacatcgactccaaatgtggacaaatccaccagggcaagatccccgcctgtgtacacaggtcctgggactgcagaatttctggggtcctggcagtggctccttttccctgcattccagaaagccagttcctggtactgcagacagcaagtgacccagacctacatcacaaagttatgccctggatgccaacggcccttgatcagcagcaacaggccttaccaggtactgtcactgaacaccctaagctgctccgagtcttgtctgtggaagccattgagaaactggagacaactttacggcacaagcatctggccttcctgtcggggctgcctgctctgtattatgtggcgctccccagggccctggccccggcagtcactagccaatctgtcatcacagagatggagcctagtcccgtggaaatcccagcagagcctctgatttagatggtttcatttgaagaacagtgtataagtcttgggccatgccctcaaggcaacaatgagagttgtacagacgttgcaaaagagttccagcctgcagtgccagtaaaaggaacaatggagacgctgcctctagaaagccagacgcatcctactagcccccactcactccagacacatatcttgaccaaactaaacttccacctgagaaaaaaggtcctagagatacaatggggaattcccattagggcaaggaagtccagggaacaaactgctgcagcaccagagaacatatccacacagaagtctcttgaaagtctaaaccaccaaggggagacattgctccaggaactgcccatcccaccagacactcttcctgcccctaatccagaaggggttcaccttaaagaacagctggccaatgacttgaaggcagtgcagcagaaccaaaagcaatccaattccaaagcagtaccccagggttctgcccactcggtctccaagatctcacaacccagtggggacatgacagaggcccacatgccttgtgttcaggtagaggccagtgtgaacaaccccagcctggaggaaccctgtggccctgagcctcaaagccctagcaagagcaaggacccagcccatgtccccatgctagcaggaaacagagaggacccagaggaaaccaaagcagccagggactacagagaaggggatgcggggtttgggcgctcctcaaccagagaagagagacgccctgctgaagaccagaggccagcagggatgcttccaaacaagacaccccgagggtcctggcgatggagccgtagctttcatcttgctgatccctgtcaacacagcccccagcatcaccctcagtttaagctcccacagctacctccacgagtccctggggagaaagagtctgagaaggacctgcaagacagtcaaaccaagctaactgtcatccttgaaccagcaacaattcctgagaatacccagactgtggtgccccagcttcacagggtcagcctttcctgagccaaccaactcaggctaagcctttgcagggccaaactttgcaatgccaagttttacatgggctggtgatgccagcccatactcaaaagaagcccagccttacagagtctagcttcagaaataaaattaaatgttttctgg

SEQ ID NO: 52853 - protein, 195 aa, Artificial Sequence
  derived and/or modified sequence
MESWWGLPCLAFLCFLMHARGQRDFDLADALDDPEPTKKPNSDIYPKPKPPYYPQPENPDSGGNIYPRPKPRPQPQPGNSGNSGGYFNDVDRDDGRYPPRPRPRPPAGGGGGGYSSYGNSDNTHGRGGYRLNSRYGNTYGGDHHSTYGNPEGNMVAKIVSPIVSVVVVTLLGAAASYFKLNNRRNCFRTHEPENV

SEQ ID NO: 52854 - protein, 42 aa, Artificial Sequence
  derived and/or modified sequence
MVAKIVSPIVSVVVVTLLGAAASYFKLNNRRNCFRTHEPENV

SEQ ID NO: 52855 - DNA, 588 bp, Artificial Sequence
  derived and/or modified sequence
atggagagctggtggggcctgccctgcctggccttcctgtgcttcctgatgcacgccagaggccagagagacttcgacctggccgacgccctggacgaccccgagcccaccaagaagcccaacagcgacatctaccccaagcccaagcccccctactacccccagcccgagaaccccgacagcggcggcaacatctaccccagacccaagcccagaccccagccccagcccggcaacagcggcaacagcggcggctacttcaacgacgtggacagagacgacggcagatacccccccagacccagacccagaccccccgccggcggcggcggcggcggctacagcagctacggcaacagcgacaacacccacggcagaggcggctacagactgaacagcagatacggcaacacctacggcggcgaccaccacagcacctacggcaaccccgagggcaacatggtggccaagatcgtgagccccatcgtgagcgtggtggtggtgaccctgctgggcgccgccgccagctacttcaagctgaacaacagaagaaactgcttcagaacccacgagcccgagaacgtgtag

SEQ ID NO: 52856 - DNA, 588 bp, Artificial Sequence
  derived and/or modified sequence
atggaatcctggtgggggctgccttgcctcgcctttctgtgctttctgatgcacgctcgaggccagcgcgattttgatctcgctgacgcactggatgaccccgagcctactaagaagcccaacagcgacatctacccaaagccaaaacccccatattacccgcaaccagagaatccagactccgggggaaacatctatccgcggccaaaaccaagaccacagccgcagccaggtaatagtggaaactccggtggatatttcaacgacgtagaccgagacgacggtcgctaccctccgcgtcccaggccccgaccaccagcaggcggggggggtggtgggtattccagctatggtaatagcgacaacacacatggccgggggggctaccgtctgaattcgagatacggaaatacttacggtggtgatcaccactctacatatggcaatcccgagggaaatatggtggccaaaatcgtgagtcccatcgtgtccgtagtagtggttacactgctgggtgctgccgcgtcctacttcaaattaaataataggagaaactgttttcgaactcacgagccagagaatgtttag

SEQ ID NO: 52857 - DNA, 588 bp, Artificial Sequence
  derived and/or modified sequence
atggagagctggtggggcctgccctgcctggccttcctgtgcttcctgatgcacgcccggggccagagggactttgacctggctgatgccctggatgatcctgagcccaccaagaagcccaacagcgacatctaccccaagcccaagccaccctactacccccagccagaaaatccagattctgggggcaacatctacccccggcccaagccccggccccagccccagcccggcaacagcggcaacagcggcggctacttcaatgatgtggacagagatgatggccgctacccaccccggccccggcccaggcctcctgctgggggcggcggcggcggctacagcagctatggcaacagcgacaacacccacggccggggcggctaccgcctgaacagccgctatggcaacacctatggaggagaccaccacagcacctacggcaaccctgagggcaacatggtggccaagatcgtgagccccatcgtgtctgtggtggtggtgaccctgctgggcgccgccgccagctacttcaagctgaacaacagaagaaactgcttccgcacccatgagccagaaaatgtgtag

SEQ ID NO: 52858 - DNA, 588 bp, Artificial Sequence
  derived and/or modified sequence
atggagagctggtggggcctgccctgcctggccttcctgtgcttcctgatgcatgccagggggcagagagacttcgatctggcggatgctctcgatgatcccgagcctacaaagaagcccaacagcgacatatatcccaaacctaagcccccttattacccccagcccgaaaatccggattcagggggaaacatctatcccagaccaaagccgcgcccgcagcctcagcctggaaactcggggaattccggaggatatttcaacgatgtggacagggacgatgggcgttaccctcctcgccctcgtcctcgcccacctgcaggaggcggcggtggcgggtactccagttatggaaattcagataacacccacggtcggggtggctaccgactgaactccagatatggaaacacatacggcggcgatcaccacagcacctacggcaacccagagggtaatatggtcgcgaagattgtaagtcccatcgtcagcgtcgttgttgtgacactgctcggagccgccgcttcgtatttcaaattaaataatcgacgcaattgttttaggacacatgaacctgaaaatgtgtag

SEQ ID NO: 52859 - DNA, 588 bp, Artificial Sequence
  derived and/or modified sequence
atggagtcatggtggggccttccttgcctcgccttcctctgcttcttgatgcatgccagaggtcagagagatttcgatctcgcagatgctctggatgaccctgagccaactaagaagcccaacagcgatatttatcctaagcccaagcccccttattatcctcagcccgaaaaccccgactctggcggtaacatctaccctagacctaaaccaaggccacagcctcaacctggaaacagcggcaactcaggcggatacttcaacgacgtggatcgcgatgatggcaggtatccccctcgccctaggcccaggcccccagccggtggcggagggggtggttacagttcctacggaaactcagataacacccacggcagaggtggatatcgcctgaatagtcggtacggtaacacttatggaggtgatcaccactctacctatggaaatcccgaaggcaacatggtggcgaaaatagtctccccaatcgtgagtgtcgtggtcgtaaccttactgggcgcagcagctagttattttaagttgaacaatcggaggaattgcttcaggacccacgaaccagagaatgtttag

SEQ ID NO: 52860 - DNA, 979 bp, Artificial Sequence
  derived and/or modified sequence
gtgcctacactggtcccacaggttttcagctgtggagtttgggatctgagcttggagcccatttgtttctggcagttccgctcatattttccacttgaagacatcgcctcccttccttccaagctgggagaccagaagtcaacaacaggagggtggagaggccgggtctcacaatccgcttggctggggagtccactgaggttcttgcatcctgaagcaaaccatggagagctggtggggacttccctgtcttgcgttcctgtgttttctaatgcacgcccgaggtcaaagagactttgatttggcagatgcccttgatgaccctgaacccaccaagaagccaaactcagatatctacccaaagccaaaaccaccttactacccacagcccgagaatcccgacagcggtggaaatatctacccaaggccaaagccacgccctcaaccccagcctggcaattccggcaacagtggaggttacttcaatgatgtggaccgtgatgacggacgctacccgcccaggcccaggccacggccgcctgcaggaggtggcggcggtggctactccagttatggcaactccgacaacacgcacggaagagggggctatagactcaactctcgttatggaaatacttatggtggagatcaccattcaacgtatggcaatccagaaggcaatatggtagcaaaaatcgtgtctcccatcgtatccgtggtggtggtgacactgctgggagcagcagccagttatttcaaactaaacaataggagaaattgtttcaggacccatgaaccagaaaatgtctgaagatgttaagatcccctgattactttgagaaaaacaactaaaacaagaaccgtgtttatcactgttgtggagatttccttttattcttgacacaatttgatgacctaaagtgtgttttcttctgtgtaaagtacatgagctgcctcactaagcattcccaactcattg

SEQ ID NO: 52861 - protein, 181 aa, Artificial Sequence
  derived and/or modified sequence
MESWWGLPCLAFLCFLMHARGQRDFDLADALDDPEPTKKPNSDIYPKPKPPYYPQPENPDSGGNIYPRPKPRPQPQPGNSGNSGGSYFNDVDRDDGRYPPRPRPRPPAGGGGGGYSSYGNSDNTHGGDHHSTYGNPEGNMVAKIVSPIVSVVVVTLLGAAASYFKLNNRRNCFRTHEPENV

SEQ ID NO: 52862 - DNA, 546 bp, Artificial Sequence
  derived and/or modified sequence
atggagagctggtggggcctgccctgcctggccttcctgtgcttcctgatgcacgccagaggccagagagacttcgacctggccgacgccctggacgaccccgagcccaccaagaagcccaacagcgacatctaccccaagcccaagcccccctactacccccagcccgagaaccccgacagcggcggcaacatctaccccagacccaagcccagaccccagccccagcccggcaacagcggcaacagcggcggcagctacttcaacgacgtggacagagacgacggcagatacccccccagacccagacccagaccccccgccggcggcggcggcggcggctacagcagctacggcaacagcgacaacacccacggcggcgaccaccacagcacctacggcaaccccgagggcaacatggtggccaagatcgtgagccccatcgtgagcgtggtggtggtgaccctgctgggcgccgccgccagctacttcaagctgaacaacagaagaaactgcttcagaacccacgagcccgagaacgtgtag

SEQ ID NO: 52863 - DNA, 546 bp, Artificial Sequence
  derived and/or modified sequence
atggagagctggtggggcttgccgtgcttggcctttctatgttttctgatgcacgctcgaggccagagagacttcgacctggcagacgctttggatgatccggagcccactaaaaaaccaaacagtgatatttacccaaagccgaagcccccatactacccgcagcctgaaaaccctgactccggcggcaacatctatcctaggccaaagcctcgaccgcaacctcagcctggaaactccggaaattctgggggctcttatttcaatgatgttgaccgcgatgacggcaggtatccgccacggcccaggccccgccctcccgccggggggggaggcggaggctacagcagttatggaaatagtgacaacacacacggaggtgaccatcacagtacttatggtaatcccgaaggcaacatggttgcaaaaatagtgagtcctatcgttagtgtggtggtagtgaccttactcggtgccgccgcctcatactttaaattaaataaccgcagaaattgctttagaacccacgagcctgaaaatgtctag

SEQ ID NO: 52864 - DNA, 546 bp, Artificial Sequence
  derived and/or modified sequence
atggagagctggtggggcctgccctgcctggccttcctgtgcttcctgatgcacgcccggggccagagggactttgacctggctgatgccctggatgatcctgagcccaccaagaagcccaacagcgacatctaccccaagcccaagccaccctactacccccagccagaaaatccagattctgggggcaacatctacccccggcccaagccccggccccagccccagcccggcaacagcggcaacagcggcggcagctacttcaatgatgtggacagagatgatggccgctacccaccccggccccggccccggcccccagctgggggcggcggcggcggctacagcagctatggcaacagcgacaacacccatggaggagaccaccacagcacctacggcaaccctgagggcaacatggtggccaagatcgtgagccccatcgtgtctgtggtggtggtgaccctgctgggcgccgccgccagctacttcaagctgaacaacagaagaaactgcttccgcacccatgagccagaaaatgtgtag

SEQ ID NO: 52865 - DNA, 546 bp, Artificial Sequence
  derived and/or modified sequence
atggagagctggtggggcctgccctgcctggccttcctgtgcttcctgatgcacgcccggggccagagagattttgacctggcggacgcgctggacgatcccgagcccaccaaaaagcccaattcagatatctaccctaagccaaaacccccttactaccctcagccagaaaacccggactcaggggggaacatttatccaaggcctaagccaagaccgcagccacagcctggcaacagcggcaattccgggggatcttacttcaatgacgtcgatagggatgatggaagatacccacctcggcccaggcctcggccaccagcaggcggagggggtggcggttattcatcatacggcaacagcgacaatacgcacggaggtgatcatcattcaacttacggtaatcctgaggggaacatggtggcgaagatcgtttccccaatagtttcagtcgttgttgtcaccctgcttggagcagccgcctcttatttcaaactcaataatcgacggaattgctttcgcactcacgaacccgagaatgtctag

SEQ ID NO: 52866 - DNA, 546 bp, Artificial Sequence
  derived and/or modified sequence
atggagtcctggtggggtttaccctgtctggccttcctgtgttttttgatgcacgctcggggtcagcgggactttgaccttgctgatgcgctggatgaccctgaaccaactaagaaacctaactctgacatctacccgaaacccaagcctccttactacccccagccggaaaatccagatagtggcggaaacatctatcctcgcccaaagccccgaccacagccccagccaggcaacagcgggaatagcggaggctcttatttcaacgatgtcgatcgtgatgacggaaggtatccacctcggcctcggcctcgtccccctgccggaggtgggggaggtgggtacagctcttatgggaattctgataatacccatggtggggatcaccattccacgtacggaaaccccgagggcaacatggtcgccaaaatagtgtcccccatcgtcagtgtcgtggtggtgacgctgctgggggcagccgcttcttactttaagctcaacaaccgcaggaattgttttcgtacacacgagcctgaaaacgtgtag

SEQ ID NO: 52867 - DNA, 2887 bp, Artificial Sequence
  derived and/or modified sequence
gtgcctacactggtcccacaggttttcagctgtggagtttgggatctgagcttggagcccatttgtttctggcagttccgctcatattttccacttgaagacatcgcctcccttccttccaagctgggagaccagaagtcaacaacaggagggtggagaggccgggtctcacaatccgcttggctggggagtccactgaggttcttgcatcctgaagcaaaccatggagagctggtggggacttccctgtcttgcgttcctgtgttttctaatgcacgcccgaggtcaaagagactttgatttggcagatgcccttgatgaccctgaacccaccaagaagccaaactcagatatctacccaaagccaaaaccaccttactacccacagcccgagaatcccgacagcggtggaaatatctacccaaggccaaagccacgccctcaaccccagcctggcaattccggcaacagtggaggtagttacttcaatgatgtggaccgtgatgacggacgctacccgcccaggcccaggccacggccgcctgcaggaggtggcggcggtggctactccagttatggcaactccgacaacacgcacggtggagatcaccattcaacgtatggcaatccagaaggcaatatggtagcaaaaatcgtgtctcccatcgtatccgtggtggtggtgacactgctgggagcagcagccagttatttcaaactaaacaataggagaaattgtttcaggacccatgaaccagaaaatgtctgaagatgttaagatcccctgattactttgagaaaaacaactaaaacaagaaccgtgtttatcactgttgtggagatttccttttattcttgacacaatttgatgacctaaagtgtgttttcttctgtgtaaagtacatgagctgcctcactaagcattcccaactcattgaatgtgatgtggttataaagataagttaggcagctagaccctgcgttctaaaaaaggattgcttgcaatgttggtttggctattcatttgcacaaagagactgtggctctctgttgtgagatcttcagctacctcatggtgcaataacacacacacgcttaaccatgttgatggcacaaagcggtgagcagtagggaggtagaatatcttggtggggaggggatgttatcagcttctgggagatgaagaatattgttgaggttccaaagatgctggacctgtgctaaattcttcagtgatatgaaaaaatcattgagcattcattattgcgaatgaagtggggatgcattatttctgacacccacaagcagggtttgatcatcctttcagctttgagatatctgcacataaaattattattacctgaagaaaataaggctgcattttgaaatgttaagtgcaaaatgactgatgttaaaaccatctgggggaaatcttgggatgctttttcctaggaaatcatatggttgtgatatgttttggcgcataggagacagaaatagtgattatcaggcgttgagcctttttgtagtatttttagtctttgatactctgtaagtgctagttcctaaggcaccaacattgcattccttggtttatactttttctattcatcagggtaggaagtcttaaatccttaggcatccaagaagtatactagctttttgcttctcttttagaaatacttgtggggagagaaaaaaggatggtttgggcatattggtatagtttgagtaaactaaggttaatgttcatataacatttagactttgccataaatatcagaaccaaagatcaagacattcatgtacagtctggaatgtatatatggggcccataaaaattcccagtatgcatgttttatgctcaccattatgaattggggtcttcaaagagagaaggttgaaagtggaaagcacttgaaagggctccccggtttgtaaaatatctttaatcattcacattaggtacctcggagttgcgggtctcaaatgtggattcatgcatcatttgtgcagtttgaagatagtccatatttcctatttcagtattaggtcctgcaacacttttcaattcttgtagaaggtttttttcaggagtggtgatgtctgatgctcaattactattttccctataagagtttcagcatgagcttaattaaattcttgtgaaaaaacctgtgtttttagttacacacacacacacacacacacctacttaaatggaatctaaacatttttagcctttaatccattccattttctaaaactgtcataaactatttttaatcattttaaataaatgtaaaagaaaaataactggatttgattattgaatagtttttttctatatttcacaaataaattgtatgaaatgactgtagaagtggccccaaaattatgaaccttcgtagctgtgaatatgatgccataaatctcttttaaagctcaagatagactatgaacatatgaaatacatagttacctaatcatgagactaaattcacctgggtgacaaggctaacgttcaagctacttaagatgaaaatatttgaatcatgattgcttgggggaacctctctttgaggggtcatgaggaccacctgctgggcattctgttttcatgctgagaaggtgagaattgaacagatgagaaaagccttgataaaacgtcatctccatgtaatttagagaaggataaccttgactgtacagctgacccttgaacaacacagggctgaactgcacatgtccacctgtatgtgagtttgcttctggctctgccattactgagacagcaggaccaaccctccatctactcaatgggaagatgataaggatgaagacctttatggtgatccgcttccacttaataaatagtaaattcatt

SEQ ID NO: 52868 - DNA, 288 bp, Artificial Sequence
  derived and/or modified sequence
atggcccctccccctgcctgcaggagccctatgtcgcctccacccccacctctactcttactactcctaagtctggctctgctcggagcccgagcaagagccgagcctgcaggtagcgcggtgccagctcagtcacgcccatgtgtcgattgtcatgcctttgagttcatgcagagggctcttcaggatttgcggaaaaccgcgtgcagcctcgatgctaggaccgaaacgctgctgctacaagccgagaggcgcgctctttgcgcttgctggcctgcaggccactag

SEQ ID NO: 52869 - DNA, 477 bp, Artificial Sequence
  derived and/or modified sequence
ccggggtccctgaaccgcggtaagggcggtggtgcgggcgtccgaatgggcgttttctagatacggggcgcggactagaggctcgctgggcccggagaccggcggactggagtcggggaaccggagggcggccccgctccctctgctggccatggcccccccgcccgcgtgccggtccccgatgtcaccgccgccgccgccgctgctgctgctgctgctgagtctggcgctgctgggcgcccgggcccgcgccgagcccgccgggagtgccgtccccgcgcagagccgcccatgcgtggactgccacgccttcgagttcatgcagcgcgccctgcaggacctgcggaagacagcctgcagcctggacgcgcggacggagaccctactgctgcaggcagagcgccgtgccctgtgtgcctgctggccagcggggcactgaggaccacgctgctccgtgtgaataaatgcccagtggca

SEQ ID NO: 52870 - DNA, 288 bp, Artificial Sequence
  derived and/or modified sequence
atggcacccccacccgcttgtagaagtccgatgtcccctcctccccctcccttgctattactactcctctcactagcactcttgggtgcacgcgcgagggctgaaccagcaggctctgctgtccccgcccagtccagaccgtgtgtcgactgccatgcctttgaatttatgcagcgcgccctccaagacctcaggaagactgcatgctcacttgacgctagaacagagaccctgttattgcaagccgaaaggcgcgccctttgtgcctgctggccggcaggccactag

SEQ ID NO: 52871 - DNA, 288 bp, Artificial Sequence
  derived and/or modified sequence
atggcccccccccccgcctgcagaagccccatgagccccccccccccccccctgctgctgctgctgctgagcctggccctgctgggcgccagagccagagccgagcccgccggcagcgccgtgcccgcccagagcagaccctgcgtggactgccacgccttcgagttcatgcagagagccctgcaggacctgagaaagaccgcctgcagcctggacgccagaaccgagaccctgctgctgcaggccgagagaagagccctgtgcgcctgctggcccgccggccactag

SEQ ID NO: 52872 - DNA, 288 bp, Artificial Sequence
  derived and/or modified sequence
atggcaccccctcccgcctgtagaagcccaatgtcacctccacctcctcccctgctactgctattgttatcccttgctctcttaggggctcgcgcaagagccgaaccagctggatccgccgtgcctgcccagagcagaccttgcgtcgactgccacgctttcgagtttatgcagcgggccttgcaggatttgagaaaaacagcatgttctttggacgcccgcaccgagacactgcttctgcaagcggaacgccgcgccctatgtgcttgttggcctgccggtcactag

SEQ ID NO: 52873 - DNA, 288 bp, Artificial Sequence
  derived and/or modified sequence
atggcccctcctccagcctgccgcagccccatgagccccccacctccacccctgctgctgctgctgctgagcctggccctgctgggcgcccgggcccgggcagagcctgctggcagcgctgtgcctgcccagagccggccctgtgtggactgccacgcctttgagttcatgcagagggccctgcaggacctgaggaagacagcctgcagcctggatgccaggacagagaccctgctgctgcaggccgagcggcgggccctgtgtgcctgctggccagctggccactag

SEQ ID NO: 52874 - DNA, 288 bp, Artificial Sequence
  derived and/or modified sequence
atggcccccccccccgcctgccggagccccatgagccccccccccccaccacttctactcctcctccttagtttagccctgctgggcgccagagcccgtgctgaacccgcgggaagcgccgtgccagcccagtcacgcccttgtgtggattgccatgcttttgagttcatgcagagggctctccaggatctgcggaaaacagcatgcagccttgacgcacgcactgagactctcctattgcaggcagaaagacgggccctctgtgcctgctggcctgctggtcactag

SEQ ID NO: 52875 - RNA, 288 nt, Artificial Sequence
  derived and/or modified sequence
auggcacccccacccgcuuguagaaguccgauguccccuccucccccucccuugcuauuacuacuccucucacuagcacucuugggugcacgcgcgagggcugaaccagcaggcucugcuguccccgcccaguccagaccgugugucgacugccaugccuuugaauuuaugcagcgcgcccuccaagaccucaggaagacugcaugcucacuugacgcuagaacagagacccuguuauugcaagccgaaaggcgcgcccuuugugccugcuggccggcaggccacuag

SEQ ID NO: 52876 - protein, 948 aa, Artificial Sequence
  derived and/or modified sequence
MNLGDGLKLETELLDGKTKLILSPYEHKSKISVKMGNKAKIAKCPLRTKTGHILKSTQDTCIGSEKLLQKKPVGSETSQAKGEKNGMTFSSTKDLCKQCIDKDCLHIQKEISPATPNMQKTRNTVNTSLVGKQKPHKKHITAENMKSSLVCLTQDQLQQILMTVNQGNRSLSLTENGKEAKSQYSLYLNSISNQPKDENIMGLFKKTEMVSSVPAENKSVLNEHQETSKQCEQKIAIENEWKPADIFSTLGERECDRSSLEAKKAQWRKELDEQVALKKKEKEVSEKWNDPWKKSESDKIIWEKHQILDQSRETVLLEHPFSAVKQELQRKWIEELNKQIEDDRQRKIEEKIIYSKGEEHDRWAMHFDSLKSYPGSQSQLFSQSTHKQPEYFCVSPDTQELADVSSVCTPTTGSQVEPSEEEHIAKPIKDVVMANSKKTNFLRSMTALLDPAQIEERDRRRQKQLEHQKAITAQVEEKRRKKQLEEEQRKKEEQEEELRLAQEREEMQKQYEEDILKQKQKEEIMTLKTNELFQTMQRAQELAQRLKQEQRIRELAQKGHDTSRLIKNLGVDTIQMEYNASNISNSRHDSDEISGKMNTYMNSTTSKKDTGVQTDDLNIGIFTNAESHCGSLMERDITNCSSPEISAELIGQFSTKKNKQELTQDKGASLEKENNRCNDQCNQFTRIEKQTKHMKKYPKRPDWNINKPPKRYIPASEKYPKQLQKQREEKKVRRQMELLHLVEKNNPGHLSQNRGISPEIFHSSHQETESKLRWHLVKKEEEPLNIHSFSKERSPSSPVPVVKNRTQQTQNTLHLPLKNSSYERENLISGSNQTELSSGISESSHFIPYVRTNEIYYLDPDAPLSGPSTQDPQYQNSQDCGQKRQLFDSDCVRDPLLNPNMVKNRDRQQAILKGLSELRQGLLQKQKELESSLLPLAENQEESFGSSF

SEQ ID NO: 52877 - protein, 948 aa, Artificial Sequence
  derived and/or modified sequence
MDLLDGLKLETELLDGKTKLILSPYEHKSKISVKMGNKAKIAKCPLRTKTGHILKSTQDTCIGSEKLLQKKPVGSETSQAKGEKNGMTFSSTKDLCKQCIDKDCLHIQKEISPATPNMQKTRNTVNTSLVGKQKPHKKHITAENMKSSLVCLTQDQLQQILMTVNQGNRSLSLTENGKEAKSQYSLYLNSISNQPKDENIMGLFKKTEMVSSVPAENKSVLNEHQETSKQCEQKIAIENEWKPADIFSTLGERECDRSSLEAKKAQWRKELDEQVALKKKEKEVSEKWNDPWKKSESDKIIWEKHQILDQSRETVLLEHPFSAVKQELQRKWIEELNKQIEDDRQRKIEEKIIYSKGEEHDRWAMHFDSLKSYPGSQSQLFSQSTHKQPEYFCVSPDTQELADVSSVCTPTTGSQVEPSEEEHIAKPIKDVVMANSKKTNFLRSMTALLDPAQIEERDRRRQKQLEHQKAITAQVEEKRRKKQLEEEQRKKEEQEEELRLAQEREEMQKQYEEDILKQKQKEEIMTLKTNELFQTMQRAQELAQRLKQEQRIRELAQKGHDTSRLIKNLGVDTIQMEYNASNISNSRHDSDEISGKMNTYMNSTTSKKDTGVQTDDLNIGIFTNAESHCGSLMERDITNCSSPEISAELIGQFSTKKNKQELTQDKGASLEKENNRCNDQCNQFTRIEKQTKHMKKYPKRPDWNINKPPKRYIPASEKYPKQLQKQREEKKVRRQMELLHLVEKNNPGHLSQNRGISPEIFHSSHQETESKLRWHLVKKEEEPLNIHSFSKERSPSSPVPVVKNRTQQTQNTLHLPLKNSSYERENLISGSNQTELSSGISESSHFIPYVRTNEIYYLDPDAPLSGPSTQDPQYQNSQDCGQKRQLFDSDCVRDPLLNPNMVKNRDRQQAILKGLSELRQGLLQKQKELESSLLPLAENQEESFGSSF

SEQ ID NO: 52878 - DNA, 2847 bp, Artificial Sequence
  derived and/or modified sequence
atgaacctgggcgacggcctgaagctggagaccgagctgctggacggcaagaccaagctgatcctgagcccctacgagcacaagagcaagatcagcgtgaagatgggcaacaaggccaagatcgccaagtgccccctgagaaccaagaccggccacatcctgaagagcacccaggacacctgcatcggcagcgagaagctgctgcagaagaagcccgtgggcagcgagaccagccaggccaagggcgagaagaacggcatgaccttcagcagcaccaaggacctgtgcaagcagtgcatcgacaaggactgcctgcacatccagaaggagatcagccccgccacccccaacatgcagaagaccagaaacaccgtgaacaccagcctggtgggcaagcagaagccccacaagaagcacatcaccgccgagaacatgaagagcagcctggtgtgcctgacccaggaccagctgcagcagatcctgatgaccgtgaaccagggcaacagaagcctgagcctgaccgagaacggcaaggaggccaagagccagtacagcctgtacctgaacagcatcagcaaccagcccaaggacgagaacatcatgggcctgttcaagaagaccgagatggtgagcagcgtgcccgccgagaacaagagcgtgctgaacgagcaccaggagaccagcaagcagtgcgagcagaagatcgccatcgagaacgagtggaagcccgccgacatcttcagcaccctgggcgagagagagtgcgacagaagcagcctggaggccaagaaggcccagtggagaaaggagctggacgagcaggtggccctgaagaagaaggagaaggaggtgagcgagaagtggaacgacccctggaagaagagcgagagcgacaagatcatctgggagaagcaccagatcctggaccagagcagagagaccgtgctgctggagcaccccttcagcgccgtgaagcaggagctgcagagaaagtggatcgaggagctgaacaagcagatcgaggacgacagacagagaaagatcgaggagaagatcatctacagcaagggcgaggagcacgacagatgggccatgcacttcgacagcctgaagagctaccccggcagccagagccagctgttcagccagagcacccacaagcagcccgagtacttctgcgtgagccccgacacccaggagctggccgacgtgagcagcgtgtgcacccccaccaccggcagccaggtggagcccagcgaggaggagcacatcgccaagcccatcaaggacgtggtgatggccaacagcaagaagaccaacttcctgagaagcatgaccgccctgctggaccccgcccagatcgaggagagagacagaagaagacagaagcagctggagcaccagaaggccatcaccgcccaggtggaggagaagagaagaaagaagcagctggaggaggagcagagaaagaaggaggagcaggaggaggagctgagactggcccaggagagagaggagatgcagaagcagtacgaggaggacatcctgaagcagaagcagaaggaggagatcatgaccctgaagaccaacgagctgttccagaccatgcagagagcccaggagctggcccagagactgaagcaggagcagagaatcagagagctggcccagaagggccacgacaccagcagactgatcaagaacctgggcgtggacaccatccagatggagtacaacgccagcaacatcagcaacagcagacacgacagcgacgagatcagcggcaagatgaacacctacatgaacagcaccaccagcaagaaggacaccggcgtgcagaccgacgacctgaacatcggcatcttcaccaacgccgagagccactgcggcagcctgatggagagagacatcaccaactgcagcagccccgagatcagcgccgagctgatcggccagttcagcaccaagaagaacaagcaggagctgacccaggacaagggcgccagcctggagaaggagaacaacagatgcaacgaccagtgcaaccagttcaccagaatcgagaagcagaccaagcacatgaagaagtaccccaagagacccgactggaacatcaacaagccccccaagagatacatccccgccagcgagaagtaccccaagcagctgcagaagcagagagaggagaagaaggtgagaagacagatggagctgctgcacctggtggagaagaacaaccccggccacctgagccagaacagaggcatcagccccgagatcttccacagcagccaccaggagaccgagagcaagctgagatggcacctggtgaagaaggaggaggagcccctgaacatccacagcttcagcaaggagagaagccccagcagccccgtgcccgtggtgaagaacagaacccagcagacccagaacaccctgcacctgcccctgaagaacagcagctacgagagagagaacctgatcagcggcagcaaccagaccgagctgagcagcggcatcagcgagagcagccacttcatcccctacgtgagaaccaacgagatctactacctggaccccgacgcccccctgagcggccccagcacccaggacccccagtaccagaacagccaggactgcggccagaagagacagctgttcgacagcgactgcgtgagagaccccctgctgaaccccaacatggtgaagaacagagacagacagcaggccatcctgaagggcctgagcgagctgagacagggcctgctgcagaagcagaaggagctggagagcagcctgctgcccctggccgagaaccaggaggagagcttcggcagcagcttctag

SEQ ID NO: 52879 - DNA, 2847 bp, Artificial Sequence
  derived and/or modified sequence
atggacctgctggacggcctgaagctggagaccgagctgctggacggcaagaccaagctgatcctgagcccctacgagcacaagagcaagatcagcgtgaagatgggcaacaaggccaagatcgccaagtgccccctgagaaccaagaccggccacatcctgaagagcacccaggacacctgcatcggcagcgagaagctgctgcagaagaagcccgtgggcagcgagaccagccaggccaagggcgagaagaacggcatgaccttcagcagcaccaaggacctgtgcaagcagtgcatcgacaaggactgcctgcacatccagaaggagatcagccccgccacccccaacatgcagaagaccagaaacaccgtgaacaccagcctggtgggcaagcagaagccccacaagaagcacatcaccgccgagaacatgaagagcagcctggtgtgcctgacccaggaccagctgcagcagatcctgatgaccgtgaaccagggcaacagaagcctgagcctgaccgagaacggcaaggaggccaagagccagtacagcctgtacctgaacagcatcagcaaccagcccaaggacgagaacatcatgggcctgttcaagaagaccgagatggtgagcagcgtgcccgccgagaacaagagcgtgctgaacgagcaccaggagaccagcaagcagtgcgagcagaagatcgccatcgagaacgagtggaagcccgccgacatcttcagcaccctgggcgagagagagtgcgacagaagcagcctggaggccaagaaggcccagtggagaaaggagctggacgagcaggtggccctgaagaagaaggagaaggaggtgagcgagaagtggaacgacccctggaagaagagcgagagcgacaagatcatctgggagaagcaccagatcctggaccagagcagagagaccgtgctgctggagcaccccttcagcgccgtgaagcaggagctgcagagaaagtggatcgaggagctgaacaagcagatcgaggacgacagacagagaaagatcgaggagaagatcatctacagcaagggcgaggagcacgacagatgggccatgcacttcgacagcctgaagagctaccccggcagccagagccagctgttcagccagagcacccacaagcagcccgagtacttctgcgtgagccccgacacccaggagctggccgacgtgagcagcgtgtgcacccccaccaccggcagccaggtggagcccagcgaggaggagcacatcgccaagcccatcaaggacgtggtgatggccaacagcaagaagaccaacttcctgagaagcatgaccgccctgctggaccccgcccagatcgaggagagagacagaagaagacagaagcagctggagcaccagaaggccatcaccgcccaggtggaggagaagagaagaaagaagcagctggaggaggagcagagaaagaaggaggagcaggaggaggagctgagactggcccaggagagagaggagatgcagaagcagtacgaggaggacatcctgaagcagaagcagaaggaggagatcatgaccctgaagaccaacgagctgttccagaccatgcagagagcccaggagctggcccagagactgaagcaggagcagagaatcagagagctggcccagaagggccacgacaccagcagactgatcaagaacctgggcgtggacaccatccagatggagtacaacgccagcaacatcagcaacagcagacacgacagcgacgagatcagcggcaagatgaacacctacatgaacagcaccaccagcaagaaggacaccggcgtgcagaccgacgacctgaacatcggcatcttcaccaacgccgagagccactgcggcagcctgatggagagagacatcaccaactgcagcagccccgagatcagcgccgagctgatcggccagttcagcaccaagaagaacaagcaggagctgacccaggacaagggcgccagcctggagaaggagaacaacagatgcaacgaccagtgcaaccagttcaccagaatcgagaagcagaccaagcacatgaagaagtaccccaagagacccgactggaacatcaacaagccccccaagagatacatccccgccagcgagaagtaccccaagcagctgcagaagcagagagaggagaagaaggtgagaagacagatggagctgctgcacctggtggagaagaacaaccccggccacctgagccagaacagaggcatcagccccgagatcttccacagcagccaccaggagaccgagagcaagctgagatggcacctggtgaagaaggaggaggagcccctgaacatccacagcttcagcaaggagagaagccccagcagccccgtgcccgtggtgaagaacagaacccagcagacccagaacaccctgcacctgcccctgaagaacagcagctacgagagagagaacctgatcagcggcagcaaccagaccgagctgagcagcggcatcagcgagagcagccacttcatcccctacgtgagaaccaacgagatctactacctggaccccgacgcccccctgagcggccccagcacccaggacccccagtaccagaacagccaggactgcggccagaagagacagctgttcgacagcgactgcgtgagagaccccctgctgaaccccaacatggtgaagaacagagacagacagcaggccatcctgaagggcctgagcgagctgagacagggcctgctgcagaagcagaaggagctggagagcagcctgctgcccctggccgagaaccaggaggagagcttcggcagcagcttctag

SEQ ID NO: 52880 - DNA, 3027 bp, Artificial Sequence
  derived and/or modified sequence
aaccgacgtacacaaggggcttgagcgttctgtggagagagtgcgagagatggtttaaagcttgaaactgaattactggatggaaaaaccaagctaatattgtctccatatgaacataaatcaaaaatttctgtgaagatgggaaataaggccaagattgcaaaatgtcctttaagaacaaaaactgggcacattctaaaatcaacacaagatacttgtattgggagtgaaaaacttttgcaaaagaagccagttggttcagaaacatcacaggcaaaaggtgaaaaaaatggaatgactttttcatccactaaggatttatgtaaacaatgtatagataaagactgtcttcatatccagaaagagatttcacctgcaacccctaatatgcagaagactagaaacaccgtaaatacatctctagtaggtaaacagaagcctcacaaaaaacacatcacagctgaaaacatgaagagcagtttggtgtgtctaacacaagaccaactacaacagattttgatgactgtaaaccaaggaaatagatctctttccctgactgagaatggaaaggaggcaaaaagtcaatatagtctatatttaaacagtatttctaatcagccaaaggatgagaacattatgggattattcaaaaaaactgaaatggtttcatctgtcccagctgaaaataaatctgtcttaaatgaacatcaggagacatctaaacagtgtgagcaaaaaattgccatagagaatgaatggaaaccagctgatatattcagtactctgggggaaagggaatgtgatagaagttcgttggaagcaaaaaaagcccagtggaggaaagagctagatgaacaggttgctttaaagaagaaagaaaaagaagtttctgaaaaatggaatgatccttggaaaaaatctgaaagtgataaaataatatgggaaaaacatcaaattcttgaccaatctagggaaacagtactgctggagcaccctttcagtgctgtgaaacaagaactgcaaagaaaatggattgaagagttgaataagcaaatagaagatgaccgtcaaagaaaaatagaggaaaaaattatatattcaaagggtgaggaacatgacagatgggcaatgcactttgattcattaaagagttatcctggttctcaatctcagctgttctctcagtcaacacacaaacaacctgagtacttctgtgtctctcctgacactcaggagctggctgatgtcagcagtgtttgtacacctacaaccggaagccaggttgaaccttcagaggaggagcatatagcaaaacctattaaggatgtggttatggcaaacagtaagaaaacaaactttctccgttctatgactgctctcttggacccagctcagattgaggaacgagacagacgacgacaaaaacaattagagcatcagaaagccatcactgcccaggtagaagagaagcgcaggaagaaacaactggaggaagagcaaagaaagaaggaagaacaagaagaggagcttcgcttagcacaggaacgtgaagagatgcagaaacagtatgaagaagacatacttaagcaaaaacaaaaggaagaaatcatgactctcaagacaaatgagctattccagacaatgcagcgagcacaggaactggcacagagactaaaacaagaacaaagaatccgagaattggcgcaaaagggacatgacacttctagactgattaaaaatcttggtgttgatacaatacaaatggaatataatgcatctaacatttcaaattcaagacatgattctgatgaaatcagtggtaaaatgaatacatatatgaattctacgacttctaagaaggatactggtgtgcaaacagatgacttaaatataggaatattcaccaatgcagaatcacattgtggatcattaatggagagggacatcacaaattgttcatctcctgagatttcggcagaacttattggacagtttagcaccaagaaaaacaagcaagaactaactcaggataaaggagccagcttagaaaaagaaaacaatcggtgtaatgaccagtgtaatcagttcacaagaatagagaaacaaacaaaacacatgaagaaatatcctaaaaggcctgattggaatataaataagccacctaaaaggtatattccagcatcagaaaagtaccctaaacagcttcaaaagcagagagaagaaaaaaaagtaaggaggcagatggaattgcttcatttggtagaaaaaaataatcctgggcacctctctcaaaacagaggcatttcaccagaaatttttcattcatctcatcaagaaacggagtcaaagttgaggtggcatctagtcaaaaaggaagaagagcctctgaatattcattcattcagcaaggaaaggtctccatcatcaccagttccagtagtgaaaaacagaacccaacaaactcaaaatacattacatttaccactaaaaaacagtagctatgagagagagaatttgatctcaggaagtaatcaaacagaattatcatctgggatttctgaatcatcccattttattccgtatgttcgaacaaatgagatctattaccttgatcccgatgcaccattgtctgggccttcaacccaggaccctcagtaccaaaattcacaagactgtggccaaaaacgacagctatttgattctgactgtgtcagggatccacttcttaatcctaacatggtgaaaaatagggatcgacagcaagcaatccttaagggactttcagaactgagacagggccttctccagaagcaaaaggagttggaaagtagtctcctgcctttagctgaaaatcaagaagagagttttggttcttcattttaaatgtagaaaatcaaatccttcacatttgatttgtgtcttccaaattataaaatgtgctcactggctcaactgtatttttcaaatagcctagatttacttatttttttaaatgctcattaaaaacttgtatactatgtagtaaaa

SEQ ID NO: 52881 - DNA, 3096 bp, Artificial Sequence
  derived and/or modified sequence
ctgagcggcggcggcaaccgacgtacacaaggggcttgagcgttctgtggagagagtgcgaggtcaggccatgaacttgggagatggtttaaagcttgaaactgaattactggatggaaaaaccaagctaatattgtctccatatgaacataaatcaaaaatttctgtgaagatgggaaataaggccaagattgcaaaatgtcctttaagaacaaaaactgggcacattctaaaatcaacacaagatacttgtattgggagtgaaaaacttttgcaaaagaagccagttggttcagaaacatcacaggcaaaaggtgaaaaaaatggaatgactttttcatccactaaggatttatgtaaacaatgtatagataaagactgtcttcatatccagaaagagatttcacctgcaacccctaatatgcagaagactagaaacaccgtaaatacatctctagtaggtaaacagaagcctcacaaaaaacacatcacagctgaaaacatgaagagcagtttggtgtgtctaacacaagaccaactacaacagattttgatgactgtaaaccaaggaaatagatctctttccctgactgagaatggaaaggaggcaaaaagtcaatatagtctatatttaaacagtatttctaatcagccaaaggatgagaacattatgggattattcaaaaaaactgaaatggtttcatctgtcccagctgaaaataaatctgtcttaaatgaacatcaggagacatctaaacagtgtgagcaaaaaattgccatagagaatgaatggaaaccagctgatatattcagtactctgggggaaagggaatgtgatagaagttcgttggaagcaaaaaaagcccagtggaggaaagagctagatgaacaggttgctttaaagaagaaagaaaaagaagtttctgaaaaatggaatgatccttggaaaaaatctgaaagtgataaaataatatgggaaaaacatcaaattcttgaccaatctagggaaacagtactgctggagcaccctttcagtgctgtgaaacaagaactgcaaagaaaatggattgaagagttgaataagcaaatagaagatgaccgtcaaagaaaaatagaggaaaaaattatatattcaaagggtgaggaacatgacagatgggcaatgcactttgattcattaaagagttatcctggttctcaatctcagctgttctctcagtcaacacacaaacaacctgagtacttctgtgtctctcctgacactcaggagctggctgatgtcagcagtgtttgtacacctacaaccggaagccaggttgaaccttcagaggaggagcatatagcaaaacctattaaggatgtggttatggcaaacagtaagaaaacaaactttctccgttctatgactgctctcttggacccagctcagattgaggaacgagacagacgacgacaaaaacaattagagcatcagaaagccatcactgcccaggtagaagagaagcgcaggaagaaacaactggaggaagagcaaagaaagaaggaagaacaagaagaggagcttcgcttagcacaggaacgtgaagagatgcagaaacagtatgaagaagacatacttaagcaaaaacaaaaggaagaaatcatgactctcaagacaaatgagctattccagacaatgcagcgagcacaggaactggcacagagactaaaacaagaacaaagaatccgagaattggcgcaaaagggacatgacacttctagactgattaaaaatcttggtgttgatacaatacaaatggaatataatgcatctaacatttcaaattcaagacatgattctgatgaaatcagtggtaaaatgaatacatatatgaattctacgacttctaagaaggatactggtgtgcaaacagatgacttaaatataggaatattcaccaatgcagaatcacattgtggatcattaatggagagggacatcacaaattgttcatctcctgagatttcggcagaacttattggacagtttagcaccaagaaaaacaagcaagaactaactcaggataaaggagccagcttagaaaaagaaaacaatcggtgtaatgaccagtgtaatcagttcacaagaatagagaaacaaacaaaacacatgaagaaatatcctaaaaggcctgattggaatataaataagccacctaaaaggtatattccagcatcagaaaagtaccctaaacagcttcaaaagcagagagaagaaaaaaaagtaaggaggcagatggaattgcttcatttggtagaaaaaaataatcctgggcacctctctcaaaacagaggcatttcaccagaaatttttcattcatctcatcaagaaacggagtcaaagttgaggtggcatctagtcaaaaaggaagaagagcctctgaatattcattcattcagcaaggaaaggtctccatcatcaccagttccagtagtgaaaaacagaacccaacaaactcaaaatacattacatttaccactaaaaaacagtagctatgagagagagaatttgatctcaggaagtaatcaaacagaattatcatctgggatttctgaatcatcccattttattccgtatgttcgaacaaatgagatctattaccttgatcccgatgcaccattgtctgggccttcaacccaggaccctcagtaccaaaattcacaagactgtggccaaaaacgacagctatttgattctgactgtgtcagggatccacttcttaatcctaacatggtgaaaaatagggatcgacagcaagcaatccttaagggactttcagaactgagacagggccttctccagaagcaaaaggagttggaaagtagtctcctgcctttagctgaaaatcaagaagagagttttggttcttcattttaaatgtagaaaatcaaatccttcacatttgatttgtgtcttccaaattataaaatgtgctcactggctcaactgtatttttcaaatagcctagatttacttatttttttaaatgctcattaaaaacttgtatactatgtagtaaaatgctgtacttgttctatacaataaaacagatactt

SEQ ID NO: 52882 - DNA, 3047 bp, Artificial Sequence
  derived and/or modified sequence
atggatttattagatggtttaaagcttgaaactgaattactggatggaaaaaccaagctaatattgtctccatatgaacataaatcaaaaatttctgtgaagatgggaaataaggccaagattgcaaaatgtcctttaagaacaaaaactgggcacattctaaaatcaacacaagatacttgtattgggagtgaaaaacttttgcaaaagaagccagttggttcagaaacatcacaggcaaaaggtgaaaaaaatggaatgactttttcatccactaaggatttatgtaaacaatgtatagataaagactgtcttcatatccagaaagagatttcacctgcaacccctaatatgcagaagactagaaacaccgtaaatacatctctagtaggtaaacagaagcctcacaaaaaacacatcacagctgaaaacatgaagagcagtttggtgtgtctaacacaagaccaactacaacagattttgatgactgtaaaccaaggaaatagatctctttccctgactgagaatggaaaggaggcaaaaagtcaatatagtctatatttaaacagtatttctaatcagccaaaggatgagaacattatgggattattcaaaaaaactgaaatggtttcatctgtcccagctgaaaataaatctgtcttaaatgaacatcaggagacatctaaacagtgtgagcaaaaaattgccatagagaatgaatggaaaccagctgatatattcagtactctgggggaaagggaatgtgatagaagttcgttggaagcaaaaaaagcccagtggaggaaagagctagatgaacaggttgctttaaagaagaaagaaaaagaagtttctgaaaaatggaatgatccttggaaaaaatctgaaagtgataaaataatatgggaaaaacatcaaattcttgaccaatctagggaaacagtactgctggagcaccctttcagtgctgtgaaacaagaactgcaaagaaaatggattgaagagttgaataagcaaatagaagatgaccgtcaaagaaaaatagaggaaaaaattatatattcaaagggtgaggaacatgacagatgggcaatgcactttgattcattaaagagttatcctggttctcaatctcagctgttctctcagtcaacacacaaacaacctgagtacttctgtgtctctcctgacactcaggagctggctgatgtcagcagtgtttgtacacctacaaccggaagccaggttgaaccttcagaggaggagcatatagcaaaacctattaaggatgtggttatggcaaacagtaagaaaacaaactttctccgttctatgactgctctcttggacccagctcagattgaggaacgagacagacgacgacaaaaacaattagagcatcagaaagccatcactgcccaggtagaagagaagcgcaggaagaaacaactggaggaagagcaaagaaagaaggaagaacaagaagaggagcttcgcttagcacaggaacgtgaagagatgcagaaacagtatgaagaagacatacttaagcaaaaacaaaaggaagaaatcatgactctcaagacaaatgagctattccagacaatgcagcgagcacaggaactggcacagagactaaaacaagaacaaagaatccgagaattggcgcaaaagggacatgacacttctagactgattaaaaatcttggtgttgatacaatacaaatggaatataatgcatctaacatttcaaattcaagacatgattctgatgaaatcagtggtaaaatgaatacatatatgaattctacgacttctaagaaggatactggtgtgcaaacagatgacttaaatataggaatattcaccaatgcagaatcacattgtggatcattaatggagagggacatcacaaattgttcatctcctgagatttcggcagaacttattggacagtttagcaccaagaaaaacaagcaagaactaactcaggataaaggagccagcttagaaaaagaaaacaatcggtgtaatgaccagtgtaatcagttcacaagaatagagaaacaaacaaaacacatgaagaaatatcctaaaaggcctgattggaatataaataagccacctaaaaggtatattccagcatcagaaaagtaccctaaacagcttcaaaagcagagagaagaaaaaaaagtaaggaggcagatggaattgcttcatttggtagaaaaaaataatcctgggcacctctctcaaaacagaggcatttcaccagaaatttttcattcatctcatcaagaaacggagtcaaagttgaggtggcatctagtcaaaaaggaagaagagcctctgaatattcattcattcagcaaggaaaggtctccatcatcaccagttccagtagtgaaaaacagaacccaacaaactcaaaatacattacatttaccactaaaaaacagtagctatgagagagagaatttgatctcaggaagtaatcaaacagaattatcatctgggatttctgaatcatcccattttattccgtatgttcgaacaaatgagatctattaccttgatcccgatgcaccattgtctgggccttcaacccaggaccctcagtaccaaaattcacaagactgtggccaaaaacgacagctatttgattctgactgtgtcagggatccacttcttaatcctaacatggtgaaaaatagggatcgacagcaagcaatccttaagggactttcagaactgagacagggccttctccagaagcaaaaggagttggaaagtagtctcctgcctttagctgaaaatcaagaagagagttttggttcttcattttaaatgtagaaaatcaaatccttcacatttgatttgtgtcttccaaattataaaatgtgctcactggctcaactgtatttttcaaatagcctagatttacttatttttttaaatgctcattaaaaacttgtatactatgtagtaaaatgctgtacttgttctatacaataaaacagatacttcttttgtaaaagcttagtagt

SEQ ID NO: 52883 - DNA, 2847 bp, Artificial Sequence
  derived and/or modified sequence
atgaacctgggcgacgggcttaaacttgagactgagttgctggatggcaagaccaaactgatactcagcccttacgagcacaaatctaagattagcgtcaagatgggcaataaggcaaagatcgcaaaatgtcctctgcgcaccaaaaccggacatatattaaagtccacacaagacacatgtattggatcagaaaagctcctgcagaaaaaaccagtggggtctgaaactagtcaggccaagggagagaagaatgggatgaccttttcttcaaccaaagatctgtgcaaacagtgcatagataaggattgcctgcatatccaaaaggagattagcccggccacccctaatatgcaaaagacgcggaataccgtgaataccagcttggtgggtaaacaaaagccgcataaaaagcacattactgcagagaacatgaaaagcagtctagtgtgcttaacacaagatcagcttcagcaaattctaatgaccgttaatcaaggcaatcgctctctgagtttgacagaaaacgggaaagaggctaagtctcagtatagtctttatttaaactccatcagcaaccaaccaaaggacgaaaacattatggggctttttaagaagaccgaaatggtgtccagcgttcccgccgagaacaagagcgtgctcaacgaacaccaggagacttctaaacagtgcgaacagaaaatcgcaatcgaaaacgagtggaagcccgcagacatattcagcacattgggagagcgggagtgtgaccgctcatcactcgaagcaaagaaagcccagtggcgtaaagagctagacgaacaagtcgccctgaagaaaaaggagaaggaagtctccgaaaaatggaacgacccatggaagaaatcagaatcagacaaaatcatctgggagaaacatcaaattttggatcagtcacgcgagacggttctattggaacaccccttcagcgccgtgaaacaagaactgcagcgcaagtggattgaagagttaaataagcagatcgaggatgaccgtcagaggaagatcgaagagaaaattatctactctaaaggcgaggagcacgatagatgggccatgcactttgactccctgaaatcctatcctggtagccaatcccaattattttctcaatcaacccacaaacaacccgagtatttttgcgtcagccccgatactcaggagctcgcagacgtgtcctccgtgtgcacccccaccaccgggtcacaggtagagccatccgaagaagagcatattgcaaagcctatcaaggacgtggtcatggccaactctaaaaagacgaactttttgcgcagtatgaccgccttgctggatccggctcagatcgaagagagagaccgacgccggcagaagcaactggagcaccagaaagcaatcaccgctcaggtcgaagaaaagcgaaggaagaagcaacttgaagaggagcagcggaagaaggaggagcaggaagaagaactgaggttggctcaggaacgggaggaaatgcaaaaacagtatgaggaggacattctcaaacagaagcagaaggaagagataatgactctgaagactaacgagctgttccagactatgcagagggcacaggaactagctcagaggttgaagcaggagcagagaataagggagctggcgcagaagggtcacgatacaagccgcctgataaagaacctcggcgtggacaccatccaaatggaatataatgcttcgaatattagcaacagtagacatgattcagacgagattagtggcaagatgaacacatatatgaattctactacctctaagaaggacacaggtgtgcagaccgatgacctcaacatcggaatttttaccaatgctgagtcgcattgtgggagtctcatggagagggatatcactaattgctcttcccctgagatttctgccgagctcatagggcagttctccactaaaaaaaacaagcaggagttaacgcaggacaagggggcctcattggagaaagagaataacagatgcaacgatcagtgcaatcagtttacaagaatcgagaaacagacgaaacacatgaaaaagtatcccaaacgcccagattggaacatcaataagcccccgaaacgctatataccagcctccgagaagtatcctaagcaactgcaaaagcagcgggaggagaaaaaagtgaggagacagatggagctactccacctggtagagaagaacaatcccggacacctctcacaaaatcgtggaatctctcctgagatttttcactccagtcatcaggagaccgaatcgaagctcagatggcatctcgtgaaaaaagaggaggagcctctcaacatccatagcttttctaaagagcgctctccttctagccccgtacccgtagtgaagaatcggacacagcaaacgcagaatacgcttcacctaccacttaagaatagctcttacgagcgggaaaatttgatatcaggctctaaccagacagaattgagctcgggtatttctgagtccagtcattttatcccctatgtacggacgaacgagatctattatcttgaccctgatgcccctctgtccgggccttccacacaggacccccagtaccagaattctcaggattgtggtcagaaacgccaactattcgacagtgactgtgtccgtgacccactgttaaatcccaacatggtgaagaacagggatcgacaacaagctatcctgaaggggctgtcagaactgcgtcagggcctcctccagaaacagaaagagttggagagcagcttacttcccctggctgagaatcaggaagagagtttcggatcatccttttag

SEQ ID NO: 52884 - DNA, 2847 bp, Artificial Sequence
  derived and/or modified sequence
atggatctgctggacggactcaagctggagactgaactgttggacggtaagaccaagctgatccttagcccatatgagcataagtccaagatttcagttaagatgggaaataaggcaaagattgcaaaatgtcccctgcgaacaaagaccggccatatcctgaagagcacacaagatacctgtattgggtcagagaaactgcttcagaagaaaccagttggaagcgaaactagccaggcaaagggggagaagaacggcatgactttttccagtacgaaggacctgtgtaagcagtgcatagacaaagattgcctgcatatccagaaagagatttcccccgctactccaaatatgcagaagactagaaacactgttaacacttctctcgtgggcaagcagaagccacataaaaagcacattaccgcagaaaacatgaaatccagcctggtctgtctgacccaggaccaactccagcagatcctgatgacggttaaccaaggcaaccgctccctgtccttgaccgaaaacggcaaggaagccaagtctcagtattcactgtatttgaatagtatctccaaccagcctaaggacgaaaacattatgggcttgtttaagaaaaccgagatggtgagtagcgtgcctgccgagaacaagtccgttcttaatgaacaccaggagacaagtaaacagtgtgagcagaagatcgctattgagaacgaatggaaacctgctgacatctttagtaccctgggggagcgggagtgcgacaggtcaagcctggaggcaaagaaggcgcaatggcgtaaggaactagacgagcaagttgccttgaaaaagaaggagaaagaggtatccgaaaagtggaatgacccctggaaaaagtcagagagcgacaagatcatctgggagaaacaccaaattctggatcagtcccgtgaaacagtgctgctggagcatcctttctcagctgttaaacaggagttacagcgtaagtggattgaagaactaaataaacaaattgaggacgacagacaaaggaagatagaggagaagatcatctattccaaaggagaggaacacgatcgttgggccatgcactttgactcgcttaagtcttatcccggcagccaaagccagcttttttctcagtccacccataagcagccagagtacttttgcgttagcccagacactcaggagcttgcagatgtctcgtctgtttgcacacccactaccgggtcacaagtcgaaccatcggaggaagaacatatcgccaagcctattaaagacgtggtcatggcaaactctaaaaagactaactttctgcgtagtatgaccgctctgctggatcctgcccagatcgaggaacgggacaggaggagacagaagcagttagagcatcagaaagcgatcaccgctcaggtggaagagaagagaagaaagaagcagctcgaggaggagcagcgtaaaaaagaagagcaggaagaagaacttaggttagcccaagaacgcgaggagatgcagaagcagtatgaagaagatatcctaaagcagaaacaaaaagaggaaatcatgaccctgaagactaacgagctcttccaaaccatgcagagggctcaagagctcgctcagcgccttaaacaagagcagagaatcagagaactcgcccagaaggggcatgatactagccgtcttataaagaaccttggcgtagacacaatacagatggagtacaacgcttccaatatatctaacagccgacacgattccgacgagatttccgggaagatgaacacctacatgaactcaactactagtaagaaagacactggtgtgcagactgacgatcttaacattggtatcttcactaatgccgaaagtcactgtggctctttgatggagagggatattactaattgttcaagtccggagatctcagctgaactcattggacaattctctactaagaagaataagcaggagctcacccaggataagggagcctccttagaaaaggaaaacaatcggtgcaacgaccagtgcaaccagtttacccgcatcgaaaagcagactaaacatatgaagaaatacccaaaacgtcccgactggaacatcaacaagcccccgaaaagatatatacccgcctcagagaagtacccaaaacaactccagaaacaacgggaagaaaagaaagtccgccggcagatggagctattgcacttagtagagaagaataatcctggacatctgagtcaaaacaggggcatcagtcccgaaatatttcactcaagccaccaggaaaccgaatcaaaactgcgctggcacctagtcaagaaagaggaagaacctctgaacatccacagcttttccaaagaacggagcccctcttcacccgttcccgtggtgaagaacagaacacaacagacacaaaatactctgcacctccctctgaagaatagctcatatgaaagagagaatctgatcagcggctctaatcagacagaactaagcagtggtataagtgagagctcccacttcattccctacgtacgcaccaatgagatatattacctcgacccagacgctccactttctggaccttctacgcaggacccgcagtatcagaattcacaggactgtgggcagaaacggcagctgtttgactcggactgtgtcagagatcctctgctgaatcctaacatggtgaaaaaccgcgatcgacagcaggcaattctgaaggggctctcggaactgaggcaaggactcctgcagaaacaaaaggagctggaaagtagtctgctgccgctggccgagaaccaggaggagtcctttggttcttctttctag

SEQ ID NO: 52885 - DNA, 2847 bp, Artificial Sequence
  derived and/or modified sequence
atgaacctgggagatggcctgaagctggagacagagctgctggatggcaagaccaagctgatcctgagcccctatgagcacaagagcaagatctctgtgaagatgggcaacaaggccaagatcgccaagtgccccctgcggaccaagacaggccacatcctgaagagcacccaggacacctgcatcggcagcgagaagctgctgcagaagaagcctgtgggcagcgagaccagccaggccaagggggagaagaatggcatgaccttcagcagcaccaaggacctgtgcaagcagtgcatcgacaaggactgcctgcacatccagaaggagatcagccctgccacccccaacatgcagaagaccaggaacacagtgaacaccagcctggtgggcaagcagaagccccacaagaagcacatcacagctgagaacatgaagagcagcctggtgtgcctgacccaggaccagctgcagcagatcctgatgacagtgaaccagggcaacagaagcctgagcctgacagaaaatggcaaggaggccaagagccagtacagcctgtacctgaacagcatcagcaaccagcccaaggatgagaacatcatgggcctcttcaagaagacagagatggtgtcctctgtgcctgctgagaacaagtctgtgctgaatgagcaccaggagaccagcaagcagtgtgagcagaagatcgccattgaaaatgagtggaagccagctgacatcttcagcaccctgggggagcgggagtgtgacaggagcagcctggaggccaagaaggcccagtggaggaaggagctggatgagcaggtggccctgaagaagaaggagaaggaggtgtctgagaagtggaatgacccctggaagaagtctgagagtgacaagatcatctgggagaagcaccagatcctggaccagagccgggagaccgtgctgctggagcaccccttctctgctgtgaagcaggagctgcagaggaagtggattgaggagctgaacaagcagattgaagatgaccggcagaggaagattgaggagaagatcatctacagcaagggggaggagcatgaccgctgggccatgcactttgacagcctgaagagctacccaggcagccagagccagctgttcagccagagcacccacaagcagcctgagtacttctgtgtgtccccagacacccaggagctggctgatgtgtcctctgtgtgcacccccaccaccggcagccaggtggagcccagcgaggaggagcacatcgccaagcccatcaaggatgtggtgatggccaacagcaagaagaccaacttcctgcgctccatgacagccctgctggaccctgcccagatcgaggagcgggacagaagacggcagaagcagctggagcaccagaaggccatcacagcccaggtggaggagaagaggaggaagaagcagctggaggaggagcagaggaagaaggaggagcaggaggaggagctgcggctggcccaggagcgggaggagatgcagaagcagtatgaggaggacatcctgaagcagaagcagaaggaggagatcatgaccctgaagaccaatgagctgttccagaccatgcagagggcccaggagctggcccagaggctgaagcaggagcagaggatccgggagctggcccagaagggccatgacaccagccgcctcatcaagaacctgggcgtggacaccatccagatggagtacaatgccagcaacatcagcaacagcagacatgacagtgatgagatcagcggcaagatgaacacctacatgaacagcaccaccagcaagaaggacaccggggtgcagacagatgacctgaacatcggcatcttcaccaatgctgagagccactgcggcagcctgatggagcgggacatcaccaactgcagcagccctgagatctctgctgagctgattggccagttcagcaccaagaagaacaagcaggagctgacccaggacaagggggccagcctggagaaggagaacaaccgctgcaatgaccagtgcaaccagttcaccagaattgagaagcagaccaagcacatgaagaagtaccccaagaggccagactggaacatcaacaagccacccaagcgctacatcccagccagcgagaagtaccccaagcagctgcagaagcagcgggaggagaagaaggtgcggcggcagatggagctgctgcacctggtggagaagaacaaccctggccacctgagccagaacagaggcatcagccctgagatcttccacagcagccaccaggagacagagagcaagctgcgctggcacctggtgaagaaggaggaggagcccctgaacatccacagcttcagcaaggagaggagccccagcagccctgtgcctgtggtgaagaacagaacccagcagacccagaacaccctgcacctgcccctgaagaacagcagctatgaaagagaaaatctcatcagcggcagcaaccagacagagctgagcagcggcatcagcgagagcagccacttcatcccctacgtgaggaccaatgagatctactacctggaccctgatgcccccctgagcggccccagcacccaggacccccagtaccagaacagccaggactgtggccagaagaggcagctgtttgacagcgactgtgtgcgggaccccctgctgaaccccaacatggtgaagaacagagaccggcagcaggccatcctgaagggcctgtctgagctgcggcagggcctgctgcagaagcagaaggagctggagagcagcctgctgcccctggccgagaaccaggaggagagctttggcagcagcttctag

SEQ ID NO: 52886 - DNA, 2847 bp, Artificial Sequence
  derived and/or modified sequence
atggacctgctggatggcctgaagctggagacagagctgctggatggcaagaccaagctgatcctgagcccctatgagcacaagagcaagatctctgtgaagatgggcaacaaggccaagatcgccaagtgccccctgcggaccaagacaggccacatcctgaagagcacccaggacacctgcatcggcagcgagaagctgctgcagaagaagcctgtgggcagcgagaccagccaggccaagggggagaagaatggcatgaccttcagcagcaccaaggacctgtgcaagcagtgcatcgacaaggactgcctgcacatccagaaggagatcagccctgccacccccaacatgcagaagaccaggaacacagtgaacaccagcctggtgggcaagcagaagccccacaagaagcacatcacagctgagaacatgaagagcagcctggtgtgcctgacccaggaccagctgcagcagatcctgatgacagtgaaccagggcaacagaagcctgagcctgacagaaaatggcaaggaggccaagagccagtacagcctgtacctgaacagcatcagcaaccagcccaaggatgagaacatcatgggcctcttcaagaagacagagatggtgtcctctgtgcctgctgagaacaagtctgtgctgaatgagcaccaggagaccagcaagcagtgtgagcagaagatcgccattgaaaatgagtggaagccagctgacatcttcagcaccctgggggagcgggagtgtgacaggagcagcctggaggccaagaaggcccagtggaggaaggagctggatgagcaggtggccctgaagaagaaggagaaggaggtgtctgagaagtggaatgacccctggaagaagtctgagagtgacaagatcatctgggagaagcaccagatcctggaccagagccgggagaccgtgctgctggagcaccccttctctgctgtgaagcaggagctgcagaggaagtggattgaggagctgaacaagcagattgaagatgaccggcagaggaagattgaggagaagatcatctacagcaagggggaggagcatgaccgctgggccatgcactttgacagcctgaagagctacccaggcagccagagccagctgttcagccagagcacccacaagcagcctgagtacttctgtgtgtccccagacacccaggagctggctgatgtgtcctctgtgtgcacccccaccaccggcagccaggtggagcccagcgaggaggagcacatcgccaagcccatcaaggatgtggtgatggccaacagcaagaagaccaacttcctgcgctccatgacagccctgctggaccctgcccagatcgaggagcgggacagaagacggcagaagcagctggagcaccagaaggccatcacagcccaggtggaggagaagaggaggaagaagcagctggaggaggagcagaggaagaaggaggagcaggaggaggagctgcggctggcccaggagcgggaggagatgcagaagcagtatgaggaggacatcctgaagcagaagcagaaggaggagatcatgaccctgaagaccaatgagctgttccagaccatgcagagggcccaggagctggcccagaggctgaagcaggagcagaggatccgggagctggcccagaagggccatgacaccagccgcctcatcaagaacctgggcgtggacaccatccagatggagtacaatgccagcaacatcagcaacagcagacatgacagtgatgagatcagcggcaagatgaacacctacatgaacagcaccaccagcaagaaggacaccggggtgcagacagatgacctgaacatcggcatcttcaccaatgctgagagccactgcggcagcctgatggagcgggacatcaccaactgcagcagccctgagatctctgctgagctgattggccagttcagcaccaagaagaacaagcaggagctgacccaggacaagggggccagcctggagaaggagaacaaccgctgcaatgaccagtgcaaccagttcaccagaattgagaagcagaccaagcacatgaagaagtaccccaagaggccagactggaacatcaacaagccacccaagcgctacatcccagccagcgagaagtaccccaagcagctgcagaagcagcgggaggagaagaaggtgcggcggcagatggagctgctgcacctggtggagaagaacaaccctggccacctgagccagaacagaggcatcagccctgagatcttccacagcagccaccaggagacagagagcaagctgcgctggcacctggtgaagaaggaggaggagcccctgaacatccacagcttcagcaaggagaggagccccagcagccctgtgcctgtggtgaagaacagaacccagcagacccagaacaccctgcacctgcccctgaagaacagcagctatgaaagagaaaatctcatcagcggcagcaaccagacagagctgagcagcggcatcagcgagagcagccacttcatcccctacgtgaggaccaatgagatctactacctggaccctgatgcccccctgagcggccccagcacccaggacccccagtaccagaacagccaggactgtggccagaagaggcagctgtttgacagcgactgtgtgcgggaccccctgctgaaccccaacatggtgaagaacagagaccggcagcaggccatcctgaagggcctgtctgagctgcggcagggcctgctgcagaagcagaaggagctggagagcagcctgctgcccctggccgagaaccaggaggagagctttggcagcagcttctag

SEQ ID NO: 52887 - DNA, 2847 bp, Artificial Sequence
  derived and/or modified sequence
atgaacctgggcgacggcctgaagctggagaccgagctgctggacggaaagactaaactgatattatccccctatgagcacaaatccaaaatcagcgttaagatgggaaataaggctaaaatagccaagtgccctttgcgcacgaagactgggcatattttgaagagcactcaagacacttgcatcggctcggagaaactactgcagaagaaacctgtgggaagtgagactagtcaggctaagggagagaagaacggaatgaccttcagttcaacaaaagacctgtgtaagcaatgcatcgataaggactgcctgcatatacagaaagaaatctcgcctgccacccctaacatgcagaagacaaggaacacggtgaatacctccctcgtcggaaaacagaagccccacaagaagcatatcacagccgaaaacatgaaatcctccttggtgtgcctgacacaggaccagctgcagcagatcctgatgactgttaaccagggaaatcgatcactttcactgactgaaaacggtaaagaggcaaagtcacagtattctctgtacctgaacagcatttccaaccaacccaaggacgaaaacatcatgggactcttcaagaagaccgaaatggtaagctcagttcccgctgaaaataagagtgttttaaatgaacaccaagaaacctccaagcagtgtgagcagaagatagcaattgaaaatgagtggaagcctgccgatatcttttccacgcttggtgaacgtgagtgtgaccggagttccttagaggcaaagaaggctcagtggcggaaggagctggacgaacaggtggccctgaagaagaaggaaaaggaggtgtctgagaagtggaatgacccttggaagaagagcgaatcagataagattatctgggaaaaacatcagattcttgaccagtctagggaaacagtgcttttagaacatccgtttagtgccgttaagcaggagcttcaaagaaagtggatcgaggaactcaacaagcagatcgaggacgaccggcaacgaaaaatcgaggaaaagattatatatagcaagggcgaggagcacgataggtgggccatgcactttgatagtctgaagtcttaccctggctcacagtctcagctgttctcccagtcaacacataaacaacctgagtatttttgcgtgtcccctgacacccaggagcttgctgacgtgtcaagcgtgtgcacccctactaccgggtctcaggtggaaccatctgaagaggaacatatcgccaagcctataaaggacgtagtcatggcaaactccaaaaagacaaatttcctgcgctctatgacggctctgctggaccctgctcagatagaggagcgggatcgacgtagacagaaacagcttgagcaccagaaagccattacagcccaagtagaagagaaacgccggaagaaacagttggaggaagaacagaggaaaaaagaggagcaggaggaagagctccgcctggcgcaggagagggaagagatgcagaagcaatacgaagaagatatcctaaagcagaagcaaaaggaggagatcatgacactgaaaaccaatgaacttttccagactatgcagagggcgcaggaattggctcaacgccttaaacaagaacagcgtattcgagagctggcgcaaaagggccatgatacgagtcgcctaatcaagaacttgggggtcgacaccattcaaatggagtacaacgcatcgaacatctctaactcccgtcacgattctgacgagatttctggcaaaatgaacacatacatgaactctacaacaagcaagaaggataccggcgtacagaccgatgatctcaacattggtatcttcaccaatgctgaaagccactgtggcagcctgatggagagggatattactaactgcagttcacccgagatcagcgctgaactgatcggacaattttcaaccaagaagaacaagcaggagcttacccaggacaaaggcgccagtttagagaaggaaaacaacagatgcaatgaccagtgtaaccaattcactagaatcgagaagcaaactaaacacatgaagaagtaccctaaacggcccgactggaatattaacaagcccccaaagagatatattccagcctccgagaaatatcccaagcaactgcagaaacaacgagaggagaagaaagtgagaaggcaaatggaacttctgcaccttgttgaaaagaacaacccgggacatctcagccagaataggggtatctcccccgagatctttcactcctctcatcaagagactgagtccaagcttaggtggcatctcgtgaagaaggaggaagaaccactcaacattcacagctttagcaaggagagaagtcctagttccccagtccccgtcgttaagaatcgaacgcagcagacccagaatactctgcacctgccgctcaaaaactcttcgtacgaacgtgaaaacctaatctcgggatcaaaccagaccgaactcagctccggcatcagcgagtctagccactttatcccatatgtgaggactaacgagatctattacctcgacccagatgctcccctatccggcccttccacacaggaccctcagtaccaaaactcacaggactgtggccagaagcgccagttgttcgattccgattgtgttcgggaccctctgctgaaccctaacatggtcaagaatagagatcggcagcaggccatacttaaaggacttagcgagctgagacaaggcctgctgcagaagcagaaagagctggaaagcagtcttttgcctctggcagagaatcaggaggagtcgttcggctcctctttttag

SEQ ID NO: 52888 - DNA, 2847 bp, Artificial Sequence
  derived and/or modified sequence
atggacctgctggacggcctgaagctggagaccgagctgctggacggaaagactaaattgattctgtctccctatgagcacaagagtaagatctcagtcaaaatgggcaataaagcaaagatcgccaagtgtccccttcgcacaaagactggccatatcttgaagtcgacacaggatacatgcatcggcagtgaaaagctgttacagaaaaaacctgtagggtcagaaacttcccaggctaagggggaaaagaatggaatgacattcagtagcacaaaagacctctgtaagcaatgcattgataaagactgcctgcatatccagaaggaaatcagtcctgctacgcctaacatgcagaagactcgcaacacggtgaacactagtctggtgggtaagcagaagccgcataagaaacatattaccgctgaaaatatgaagagtagcctcgtttgtttgactcaggaccagttgcagcagatcctaatgactgtgaatcagggaaatcgtagcctttccctgacagagaatggcaaggaggcgaaaagccagtatagcctttacctcaactcaatcagtaatcagcctaaggacgaaaacattatgggcctgttcaagaagactgagatggtgagctcagtccccgctgagaacaaaagcgtgctcaacgaacaccaggaaacctctaaacagtgcgagcaaaagatcgctatcgaaaacgagtggaagcccgccgacatcttttccaccttgggggagcgcgagtgtgaccgctccagcttggaagctaaaaaagcacaatggcggaaggagttggacgaacaggtggccctgaagaagaaggagaaagaagtgagtgagaagtggaatgatccctggaagaagtcagaatccgataagatcatctgggaaaagcatcagatacttgaccaaagccgcgaaactgtgctgttagaacatccctttagtgctgttaagcaggagttgcaaagaaagtggatagaggaattgaacaaacagatagaagacgatagacagcgcaaaattgaggaaaaaataatctattccaaaggggaggaacacgaccggtgggcaatgcactttgattccctaaagagttaccccggaagccagtcacagttattctctcagtccactcataaacaacccgaatacttttgcgtgtctcccgacactcaggagttggccgacgttagcagcgtttgcacgcctaccaccggctctcaggtggagcccagtgaggaagagcacattgcaaaaccaataaaggatgtcgtaatggctaactcaaagaagaccaactttctcagatccatgaccgcattattagaccccgcccagatagaggaacgcgaccgacgtcggcagaagcagcttgaacatcagaaagccattactgcacaggtggaggaaaagcggaggaaaaaacagctggaggaggagcagcgaaaaaaggaagaacaggaggaagaactcagactggcacaggaaagggaagaaatgcagaagcagtacgaagaagacatcctgaaacagaaacagaaagaagagataatgaccttgaaaacgaatgaactgttccagacaatgcagagggcccaggagctggcgcagaggctgaaacaggagcagcgaatccgggagctggctcagaagggtcacgataccagtcgccttatcaagaatcttggagtggatactatccagatggaatacaacgccagcaatatctctaattcaaggcacgacagcgatgaaatatccgggaaaatgaatacctatatgaattccacgaccagcaagaaagacacaggtgtccagactgatgatcttaacatcggcatattcacgaatgcagagagccactgcggctctctcatggagagagacatcacgaactgcagttctcccgaaatttcagcggaactgatcggacagttttccacgaagaagaataagcaggagctgactcaggataaaggggctagcctggagaaggagaataaccgctgcaacgaccagtgcaatcaatttacgcgaattgagaagcagactaaacacatgaagaaatatcctaaaaggcctgactggaacattaacaagccacctaaacgttacataccggcctctgagaaatatccaaaacagctccaaaagcaacgcgaggagaagaaagtcagaaggcaaatggagcttctgcaccttgttgaaaagaacaatcccgggcatctgagccagaataggggcatcagccccgagatcttccactccagtcatcaagaaaccgaaagcaaacttagatggcatctggtaaaaaaagaggaggagccgctcaatatccacagcttctcaaaagagcggagcccaagttcccccgtgcctgtcgttaagaaccggacccaacaaacccagaacactttgcacctgcctctgaaaaactccagctacgagcgcgaaaacctgattagcggaagcaatcaaacagagctctcgagtgggatctccgagagctctcactttattccatacgtaagaaccaatgagatctactaccttgatcctgatgccccactgtctgggccctccactcaggatccccaatatcagaacagtcaggactgcggccagaagcgccagttgtttgattcggactgcgtgcgcgacccccttctgaaccccaatatggtcaagaatcgggatcgacagcaagccatccttaaggggctctctgagttgagacagggacttcttcaaaaacagaaggagctcgagtccagcctgctcccactagctgagaatcaagaagagtctttcggcagctccttttag

SEQ ID NO: 52889 - DNA, 2847 bp, Artificial Sequence
  derived and/or modified sequence
atgaatctgggtgatgggctgaaactggagactgagctgctggatgggaaaaccaagctaatcttgagcccttacgaacataagtccaagatttcagtcaagatggggaataaagccaagattgcaaaatgcccactgcgcaccaaaaccgggcatatactcaagagcacccaagacacttgcatcggctcagagaagctcctccaaaaaaaacccgtcggctccgaaaccagtcaggcaaagggcgagaagaacggaatgactttctcttctacaaaggatctgtgcaagcagtgtatcgacaaagattgcctacacatccaaaaagagatttccccagctactcctaatatgcagaagacgcggaacacagtcaatactagcctggttggaaagcagaagccccacaagaaacatatcaccgctgagaatatgaagagctcactggtgtgtctaacacaagaccaattgcagcaaatactgatgaccgtaaaccaagggaatcggtccttgtccttgactgaaaatggaaaggaggccaaaagtcagtatagcctgtatctcaattcaatctccaaccagccaaaggacgagaatattatgggcctgtttaagaaaactgagatggtgtcctccgtaccagcggagaataaatcggtcctgaatgaacatcaagagacttcaaagcaatgcgaacagaagatcgccatcgagaacgagtggaagcccgctgacattttttcaacccttggggagagggagtgtgatcggtccagcctcgaggccaaaaaggcccaatggagaaaggagctagatgagcaggtcgccctgaagaagaaggagaaggaggtctcagagaagtggaacgatccttggaaaaagtccgaaagcgacaagattatctgggagaaacatcaaatcttggaccagagccgcgagaccgtactgctggaacaccctttttccgctgtgaaacaggaattgcagcgaaagtggatcgaggagctgaacaagcagatcgaggatgacagacagaggaagatagaggaaaaaataatttactcaaagggagaagaacatgatcgatgggccatgcatttcgactctttaaagtcctatcccggtagtcagagtcagctgttttcccagtctacccacaaacaacctgaatatttttgcgtctcgccagacacacaggagctggctgacgtctctagtgtatgcacacctactacaggctctcaggtggagccttccgaggaggagcacatcgctaagccaatcaaggatgttgtgatggctaatagcaagaaaaccaattttttaagatctatgactgctctgctggatcccgctcaaatcgaggaaagagacagacgccgacaaaaacagctggagcaccaaaaggcgatcacagcccaggtcgaggaaaagcgcagaaagaaacagctggaggaggagcagagaaagaaggaggaacaagaagaggagcttagactcgcccaggagagagaggaaatgcagaaacaatacgaagaggacatactaaagcagaagcagaaggaggagatcatgaccctgaagactaacgaactctttcagaccatgcagagagcacaggagctggcacagcgactgaaacaggagcagcggatacgtgagctagctcagaaaggacatgacacttccaggctgataaaaaatttaggagtggacacaatccagatggaatataacgctagtaatatctctaacagccggcatgacagtgacgagatctcggggaaaatgaatacatacatgaactctactacttctaagaaggacacaggtgtgcagaccgacgatctgaatatcggcatcttcactaacgccgagtcccactgcggatcattgatggaacgtgatatcacgaattgttcgagtcctgaaatatctgccgaattgatcggacaattttctaccaagaaaaacaaacaggagctgacacaggacaaaggggctagtctagaaaaggagaacaacagatgcaatgaccaatgcaaccagttcacaagaatcgagaaacaaacgaagcatatgaagaaataccctaagaggcctgattggaacatcaataagcctcccaagagatatatccccgcaagcgagaaatatcctaagcagctgcaaaaacagagagaagagaaaaaggttagacgtcagatggagcttttgcatcttgtagaaaagaacaaccctgggcatctgagtcagaatcgagggatttcccccgagatatttcattcatcacatcaggagactgaatccaagctgcgctggcatctggtcaagaaggaagaagaacctctgaatattcactcattctccaaggaacgtagtccgtcttctccagtgccagttgtcaagaaccgaacacagcagactcagaacaccttgcatcttcctcttaagaactcatcctacgaaagggagaacctgatctcaggctccaatcagaccgagctttcttcagggatctctgagagctcacactttataccctacgtaaggactaacgaaatttattacctggatcccgacgcacctctcagcggaccaagcactcaggatcctcagtaccagaattcacaggattgtgggcagaagcggcagctgttcgattcagactgtgttagggaccctctgttaaacccaaacatggttaaaaatcgagaccgccagcaagctatccttaaggggctgagcgaactgaggcagggcctgctccagaagcagaaagagttggagtcatcactgcttcctctggccgaaaaccaagaggagtcctttggtagcagcttttag

SEQ ID NO: 52890 - DNA, 2847 bp, Artificial Sequence
  derived and/or modified sequence
atggatttgctggatggtttaaagctggagactgaactgctggatggcaaaactaaactgatattgtctccttatgagcataagtctaagatctcagtgaagatggggaataaggcgaagatcgctaaatgccctttacgtaccaagaccgggcacatcctgaaaagcacacaggatacttgcattggttctgaaaagcttctgcaaaaaaagccagtcggctctgagacatcccaagccaagggagaaaaaaatggaatgactttctctagcacgaaagatttatgcaaacagtgtatagataaagactgcctgcacatccagaaagaaattagtcctgcgacaccaaacatgcaaaaaactagaaatacagttaatacgtccctggttggtaagcagaaaccgcacaagaagcatatcacggccgagaacatgaaatcctcccttgtctgtctaacgcaggatcagttacagcagattctaatgactgtgaaccagggcaaccggtctctgtccttgacagaaaatggtaaggaagctaagtcccaatactccctgtacctgaattctatctcgaaccaaccaaaagatgagaacatcatgggattgtttaagaaaaccgagatggtttcaagtgtccccgcagagaataaatccgtcctcaatgaacaccaggagacatctaagcagtgtgagcagaaaatcgcgattgagaacgagtggaagccagctgatatattcagcacccttggcgagcgagagtgtgaccggagcagtttggaggccaagaaggcccagtggaggaaggagctcgacgagcaggtcgctcttaagaagaaagagaaggaagtcagtgagaagtggaacgatccatggaaaaagagtgaaagcgacaaaatcatctgggaaaaacaccaaatattggatcagagcagggagacggttcttctggagcacccgtttagcgccgtaaaacaggaacttcagagaaaatggatcgaggagttaaataaacagatagaagatgacaggcagagaaaaatcgaagaaaagatcatctactcaaagggagaggaacacgatcggtgggcgatgcattttgatagcctcaagtcctaccctgggagccagtcccagctcttctcacagagcactcacaagcagcccgaatatttttgcgtttctcctgacactcaagaacttgccgatgtgagttcagtctgtaccccaaccacgggctctcaggtggagccatcagaagaggaacatattgcaaaaccaattaaagatgttgtcatggccaactccaagaagactaacttcctgcgcagcatgactgccctcctggaccccgcacaaatcgaggagcgtgataggcgacgccagaagcaattggaacatcagaaagctattacagcccaggtggaagagaagcgaagaaagaaacagctggaggaagagcaaagaaaaaaagaggaacaggaggaggagctacggttggcccaggaacgcgaagaaatgcagaagcagtacgaagaggatattctgaaacagaagcagaaagaggaaataatgacactcaagactaacgagctttttcagacaatgcagcgggcacaggagcttgcccaaagattgaagcaggaacagcgcatcagagagttagctcagaaaggacatgatacctcaaggttaatcaagaacttaggtgtagacaccattcaaatggagtataacgcttccaatatcagcaatagcaggcacgacagtgatgaaatctccggcaaaatgaacacctatatgaacagcaccacaagcaagaaggatacaggggttcagacagatgacctaaatatcggtatattcacgaacgctgagtcccattgcggaagcctgatggagcgtgatatcactaactgctctagccctgagatctctgctgagctgatagggcagttcagtactaaaaaaaataagcaggaattgactcaggacaaaggagcatcactggaaaaggagaataataggtgcaacgaccaatgcaatcagtttacccgtatcgagaaacagaccaaacacatgaaaaagtacccgaaaaggccagactggaacatcaacaaacctccgaagcgctacataccagcttcagaaaagtatccaaagcagctgcagaagcagcgcgaggagaagaaagtaaggagacagatggagttactgcaccttgtggaaaagaataaccccggacacctcagccagaatagaggtatttcacctgaaattttccacagctcccaccaagagacagaatccaagctccggtggcacctggtcaaaaaggaagaagagcctctcaacattcactccttttccaaggagaggtctccatctagtccagttcccgttgtcaagaatcggacccaacagacgcagaatacactgcatctgcctctgaaaaacagctcatacgagcgagaaaacttaatcagcggctcaaatcagactgagctgtcgtctggaattagtgagagctcacacttcatcccatacgtccgaacaaatgaaatctactatctcgacccagacgcaccactgtctggcccatccacgcaggatccacagtatcagaactctcaagactgcggccagaaacggcagctgttcgatagtgattgcgtccgagatcctctgctgaatccaaacatggtgaaaaacagagatcggcaacaagccattctaaaaggcctgtctgaactacgacagggactgttacagaagcagaaggagcttgaatctagcctacttccattagccgagaatcaggaggagagctttggttcatctttctag

SEQ ID NO: 52891 - protein, 411 aa, Artificial Sequence
  derived and/or modified sequence
MNESPQTNEFKGTTEEAPAKESPHTSEFKGAALVSPISKSMLERLSKFEVEDAENVASYEWTHLVRLLRLIILIRIFHLLHQKRQLEKLMRRLVSENKRRYTRDGFDLDLTYVTERIIAMSFPSSGRQSFYRNPIEEVVRFLDKKHRNHYRVYNLCSERAYDPKHFHNRVSRIMIDDHNVPTLHEMVVFTKEVNEWMAQDLENIVAIHCKGGKGRTGTMVCALLIASEIFLTAEESLYYFGERRTNKTHSNKFQGVETPSQNRYVGYFAQVKHLYNWNLPPRRILFIKRFIIYSIRGDVCDLKVQVVMEKKVVFSSTSLGNCSILHDIETDKILINVYDGPPLYDDVKVQFFSSNLPKYYDNCPFFFWFNTSFIQNNRLCLPRNELDNPHKQKAWKIYPPEFAVEILFGEK

SEQ ID NO: 52892 - protein, 324 aa, Artificial Sequence
  derived and/or modified sequence
MNESPQTNEFKGTTEEAPAKESPHTSEFKGAALVSPISKRWTHLVRLLRLIILIRIFHLLHQKRQLEKLMRRLVSENKRRYTRDGFDLDLTYVTERIIAMSFPSSGRQSFYRNPIEEVVRFLDKKHRNHYRVYNLCSERAYDPKHFHNRVSRIMIDDHNVPTLHEMVVFTKEVNEWMAQDLENIVAIHCKGGKGRTGTMVCALLIASEIFLTAEESLYYFGERRTNKTHSNKFQGVETPSQNRYVGYFAQVKHLYNWNLPPRRILFIKRFIIYSIRGDVCDLKVQVVMEKKVVFSSTSLGNCSREEGSTRANWKGEPSRRPVLD

SEQ ID NO: 52893 - DNA, 1236 bp, Artificial Sequence
  derived and/or modified sequence
atgaacgagagcccccagaccaacgagttcaagggcaccaccgaggaggcccccgccaaggagagcccccacaccagcgagttcaagggcgccgccctggtgagccccatcagcaagagcatgctggagagactgagcaagttcgaggtggaggacgccgagaacgtggccagctacgagtggacccacctggtgagactgctgagactgatcatcctgatcagaatcttccacctgctgcaccagaagagacagctggagaagctgatgagaagactggtgagcgagaacaagagaagatacaccagagacggcttcgacctggacctgacctacgtgaccgagagaatcatcgccatgagcttccccagcagcggcagacagagcttctacagaaaccccatcgaggaggtggtgagattcctggacaagaagcacagaaaccactacagagtgtacaacctgtgcagcgagagagcctacgaccccaagcacttccacaacagagtgagcagaatcatgatcgacgaccacaacgtgcccaccctgcacgagatggtggtgttcaccaaggaggtgaacgagtggatggcccaggacctggagaacatcgtggccatccactgcaagggcggcaagggcagaaccggcaccatggtgtgcgccctgctgatcgccagcgagatcttcctgaccgccgaggagagcctgtactacttcggcgagagaagaaccaacaagacccacagcaacaagttccagggcgtggagacccccagccagaacagatacgtgggctacttcgcccaggtgaagcacctgtacaactggaacctgccccccagaagaatcctgttcatcaagagattcatcatctacagcatcagaggcgacgtgtgcgacctgaaggtgcaggtggtgatggagaagaaggtggtgttcagcagcaccagcctgggcaactgcagcatcctgcacgacatcgagaccgacaagatcctgatcaacgtgtacgacggcccccccctgtacgacgacgtgaaggtgcagttcttcagcagcaacctgcccaagtactacgacaactgccccttcttcttctggttcaacaccagcttcatccagaacaacagactgtgcctgcccagaaacgagctggacaacccccacaagcagaaggcctggaagatctacccccccgagttcgccgtggagatcctgttcggcgagaagtag

SEQ ID NO: 52894 - DNA, 975 bp, Artificial Sequence
  derived and/or modified sequence
atgaacgagagcccccagaccaacgagttcaagggcaccaccgaggaggcccccgccaaggagagcccccacaccagcgagttcaagggcgccgccctggtgagccccatcagcaagagatggacccacctggtgagactgctgagactgatcatcctgatcagaatcttccacctgctgcaccagaagagacagctggagaagctgatgagaagactggtgagcgagaacaagagaagatacaccagagacggcttcgacctggacctgacctacgtgaccgagagaatcatcgccatgagcttccccagcagcggcagacagagcttctacagaaaccccatcgaggaggtggtgagattcctggacaagaagcacagaaaccactacagagtgtacaacctgtgcagcgagagagcctacgaccccaagcacttccacaacagagtgagcagaatcatgatcgacgaccacaacgtgcccaccctgcacgagatggtggtgttcaccaaggaggtgaacgagtggatggcccaggacctggagaacatcgtggccatccactgcaagggcggcaagggcagaaccggcaccatggtgtgcgccctgctgatcgccagcgagatcttcctgaccgccgaggagagcctgtactacttcggcgagagaagaaccaacaagacccacagcaacaagttccagggcgtggagacccccagccagaacagatacgtgggctacttcgcccaggtgaagcacctgtacaactggaacctgccccccagaagaatcctgttcatcaagagattcatcatctacagcatcagaggcgacgtgtgcgacctgaaggtgcaggtggtgatggagaagaaggtggtgttcagcagcaccagcctgggcaactgcagcagagaggagggcagcaccagagccaactggaagggcgagcccagcagaagacccgtgctggactag

SEQ ID NO: 52895 - DNA, 1236 bp, Artificial Sequence
  derived and/or modified sequence
atgaacgaatctccacaaactaatgaatttaaaggcactacagaggaggcacctgctaaagagtccccccacactagtgaatttaagggcgcagccttggtgtcaccaatctccaaatccatgttggagagattatccaaattcgaagtcgaggatgctgaaaatgttgcaagttacgagtggacccaccttgtgagacttctgcgcctcataattcttataaggatcttccatcttttgcatcagaagaggcagttagaaaagttgatgcggcgcctcgttagtgaaaacaagcgcagatatactcgtgacgggttcgatctcgacctgacctacgttaccgaaaggatcatcgcaatgtcattccctagcagtggcaggcagtccttctaccgtaaccccatagaagaggtcgtcaggtttctggacaagaaacacaggaatcattacagggtttacaacttatgtagcgagcgggcctacgaccccaagcattttcacaatagagtcagtagaataatgatagacgaccacaatgtgcctactttacacgagatggttgtgtttaccaaggaggtgaatgagtggatggcgcaggacctggaaaatattgtggcaatacactgtaaaggcggcaagggaaggacagggacaatggtgtgtgctttgctcattgcaagcgagatttttctgacggcggaggagagtctctattacttcggcgagcgacggaccaataagacacactctaacaaattccagggggtggagaccccctctcaaaatcggtatgtgggttatttcgcccaggtaaaacacctctacaattggaacctgcccccccgccggatcctgttcatcaaaaggttcatcatttattctattaggggagacgtgtgtgatttaaaggtacaggtcgtgatggagaagaaagttgttttttcatccacttccctcggcaattgtagtatactacacgatatcgagaccgataaaatcttgatcaatgtgtatgatggaccgcccctgtatgatgatgtaaaggtgcagttcttttcttctaacctaccgaaatactatgataactgtccgttctttttttggtttaacacatcttttattcaaaacaatcggctgtgtctgcctcgtaatgaactagacaatcctcataagcagaaggcttggaagatttatcctcctgagttcgcagtagagatcctgtttggagaaaaatag

SEQ ID NO: 52896 - DNA, 975 bp, Artificial Sequence
  derived and/or modified sequence
atgaatgaatctccgcagacgaacgagtttaagggtactaccgaggaagcccctgcgaaggaaagcccccatacttcggagtttaagggggcagcacttgtgtcacctatttctaaacgttggacgcatctagtccggctgcttagactgatcatcttaatcagaatctttcatctgctccaccagaagagacagttagagaagctaatgcgcaggcttgtgagcgaaaacaaacggcgatatacccgggatgggttcgacctcgatcttacctacgtgacagagcgaatcatagctatgagctttcctagctctggccggcaatcgttttatcgaaatccaatcgaggaggtcgtcagattcttggataaaaagcacagaaatcactaccgggtatataacctgtgttctgagagagcctacgatccgaagcacttccataatcgggtgtccagaatcatgatcgacgatcataatgtccccacactgcatgaaatggtggtatttaccaaggaggttaacgagtggatggctcaggacttggagaacatcgtggcaatacattgcaaagggggtaaaggtcgcactggcaccatggtgtgtgccctactgatcgccagcgaaattttcctgacagcagaggagtctctatactatttcggcgagcggagaacgaacaagactcattctaacaaatttcagggagttgaaacaccctcccagaatcgatacgtaggctactttgcccaggtgaagcatttgtacaactggaaccttcctccacgcagaatcctgtttatcaaaaggttcatcatctacagcatcaggggcgacgtctgtgacctgaaggttcaggtagtcatggaaaagaaagtagtattttcttccaccagcttgggtaactgttctcgagaagagggctctacacgggccaactggaagggagagccaagccgcaggccggtgctagattag

SEQ ID NO: 52897 - DNA, 1236 bp, Artificial Sequence
  derived and/or modified sequence
atgaacgagtcaccccaaactaacgagtttaaagggactacagaagaggctcctgctaaggagagtccccacaccagcgagttcaaaggtgccgcacttgtatctccaatcagtaagagtatgcttgagaggctctctaagtttgaagttgaggatgctgagaatgtagcttcatacgagtggacccatcttgttcgtctgctccgtctcatcatcctcatccggatatttcacctcctccaccaaaagaggcagctggaaaagttgatgcgccgactggtgagtgagaataagcgaaggtacaccagggacgggtttgatctagatctcacctacgtaaccgagaggatcatcgccatgagttttccctccagcggacgtcagtcattctaccggaatccaatagaagaggtggtgcgcttcctagacaagaagcatagaaaccactaccgcgtgtataacctgtgttcagagagagcttatgaccccaagcacttccacaatcgcgtctctagaattatgatagatgaccacaacgttccgacccttcatgagatggtcgtgtttactaaagaggtgaacgagtggatggcacaggatttagagaacattgtggctatccactgcaagggcggcaaaggtagaacggggactatggtctgcgcactgctgatcgcctctgagattttcttgaccgccgaagaatccctgtattacttcggggagcgccggaccaacaagacccactccaacaaatttcagggcgtggagactccatcgcaaaatcgttacgtcgggtatttcgcccaagtgaagcacctgtacaattggaatttgccgccaagaagaatcctgttcatcaagaggtttatcatctactccatacgcggagacgtgtgcgacctgaaggtgcaggtggtaatggagaaaaaggtcgttttttcgagtactagcttaggaaactgctcaatactgcacgatatcgaaacggacaaaattcttatcaacgtctatgatggaccacccctgtacgacgatgtgaaggtacaattcttctctagtaatctccccaaatattacgacaactgcccattttttttttggttcaatacttcctttatccagaacaaccgcctctgcctcccacgtaacgagctggacaatccccacaagcagaaggcctggaaaatctatccccctgaatttgcagtcgagatcttgttcggagaaaagtag

SEQ ID NO: 52898 - DNA, 1236 bp, Artificial Sequence
  derived and/or modified sequence
atgaatgaaagcccccagaccaatgagttcaagggcaccacagaggaggccccagccaaggagagcccccacaccagcgagttcaagggagctgccctggtgagccccatcagcaagtccatgctggagcggctgagcaagtttgaggtggaggatgctgaaaatgtggccagctatgagtggacccacctggtgcggctgctgcggctcatcatcctgatccgcatcttccacctgctgcaccagaagaggcagctggagaagctgatgaggcggctggtgtctgagaacaagaggcgctacaccagagatggctttgacctggacctgacctacgtgacagagcgcatcatcgccatgtccttccccagcagcggccggcagagcttctacagaaaccccatcgaggaggtggtgcgcttcctggacaagaagcacaggaaccactacagagtgtacaacctgtgcagcgagcgggcctatgaccccaagcacttccacaacagagtgagccgcatcatgattgatgaccacaacgtgcccaccctgcacgagatggtggtgttcaccaaggaggtgaatgagtggatggcccaggacctggagaacatcgtggccatccactgcaagggcggcaaaggaagaacaggcaccatggtgtgtgccctgctgattgccagcgagatcttcctgacagctgaggagagcctgtactactttggagagaggaggaccaacaagacccacagcaacaagttccagggcgtggagacccccagccagaaccgctacgtgggctactttgcccaggtgaagcacctgtacaactggaacctgcccccccggcgcatcctcttcatcaagcgcttcatcatctacagcatcagaggagatgtgtgtgacctgaaggtgcaggtggtgatggagaagaaggtggtgttcagcagcaccagcctgggcaactgcagcatcctgcatgacatcgagacagacaagatcctgatcaacgtgtatgatggcccccccctgtatgatgatgtgaaggtgcagttcttcagcagcaacctgcccaagtactatgacaactgccccttcttcttctggttcaacaccagcttcatccagaacaaccggctgtgcctgcccagaaatgagctggacaacccccacaagcagaaggcctggaagatctacccacctgagtttgctgtggagatcctgtttggagagaagtag

SEQ ID NO: 52899 - DNA, 975 bp, Artificial Sequence
  derived and/or modified sequence
atgaatgaaagcccccagaccaatgagttcaagggcaccacagaggaggccccagccaaggagagcccccacaccagcgagttcaagggagctgccctggtgagccccatcagcaagcgctggacccacctggtgcggctgctgcggctcatcatcctgatccgcatcttccacctgctgcaccagaagaggcagctggagaagctgatgaggcggctggtgtctgagaacaagaggcgctacaccagagatggctttgacctggacctgacctacgtgacagagcgcatcatcgccatgtccttccccagcagcggccggcagagcttctacagaaaccccatcgaggaggtggtgcgcttcctggacaagaagcacaggaaccactacagagtgtacaacctgtgcagcgagcgggcctatgaccccaagcacttccacaacagagtgagccgcatcatgattgatgaccacaacgtgcccaccctgcacgagatggtggtgttcaccaaggaggtgaatgagtggatggcccaggacctggagaacatcgtggccatccactgcaagggcggcaaaggaagaacaggcaccatggtgtgtgccctgctgattgccagcgagatcttcctgacagctgaggagagcctgtactactttggagagaggaggaccaacaagacccacagcaacaagttccagggcgtggagacccccagccagaaccgctacgtgggctactttgcccaggtgaagcacctgtacaactggaacctgcccccccggcgcatcctcttcatcaagcgcttcatcatctacagcatcagaggagatgtgtgtgacctgaaggtgcaggtggtgatggagaagaaggtggtgttcagcagcaccagcctgggcaactgcagccgggaggagggcagcacccgggccaactggaagggggagcccagcagaagacctgtgctggactag

SEQ ID NO: 52900 - DNA, 1236 bp, Artificial Sequence
  derived and/or modified sequence
atgaacgagagcccccagaccaacgagttcaagggcaccaccgaggaagcacccgccaaagaatccccacacactagcgagtttaagggagcggccctggtgtcaccaataagcaagagcatgctggagcgtctgtctaagttcgaagtcgaggacgctgaaaatgtcgcgtcttacgaatggactcacctggtaaggctacttagactgatcattcttattcgtatattccacttactacaccagaaaaggcagttggagaagctcatgaggcggcttgtgtctgaaaacaaacgcagatataccagggatggctttgacttggatctaacttacgtgaccgagcgcattatcgctatgagctttccctctagcggacggcagtcattctaccgaaatcccatcgaggaggttgtgcgctttcttgataaaaaacataggaaccactacagagtttataacttatgctcagaacgagcctatgatcctaaacattttcataaccgggtcagccgcataatgatcgacgaccataacgtccctactctccatgaaatggtcgtgtttacgaaggaagtcaatgagtggatggcccaggatctcgagaatatcgtagctatccattgcaagggcgggaaggggaggacagggaccatggtttgtgccctgctcatagcatcagaaattttcctgacggccgaagaaagcctttactattttggagaaaggcgaacaaacaaaacacattcaaataagttccaaggagtcgaaacaccgtcccagaaccgctatgttgggtattttgcacaggtgaaacatctgtataattggaatctgccccctcggaggatccttttcattaagagatttattatttatagcatccggggagacgtgtgtgacctaaaggtccaagtcgtaatggagaagaaagtggtcttcagcagcacctcactgggcaactgcagtattcttcacgacattgagactgacaagatcctcatcaacgtctacgacggaccccccctttacgatgatgtaaaagtgcagtttttctcctccaatttacccaaatactacgacaattgccccttcttcttctggttcaatactagtttcatccagaataacagattatgtcttccgagaaacgaactggacaatcctcataagcagaaagcctggaagatctacccccccgagttcgcagtggagatactgtttggggagaagtag

SEQ ID NO: 52901 - DNA, 975 bp, Artificial Sequence
  derived and/or modified sequence
atgaacgagagcccccagaccaacgagttcaagggcaccaccgaggaggcccctgctaaagagagtccacatacaagcgaatttaagggcgccgcgcttgttagcccaatttcaaagagatggacacatctcgtgagactcctgagattgataatcctcattcgcatatttcacctactccaccagaaaagacaacttgagaagttgatgagacgcctggtcagtgagaacaagagaaggtacaccagagacgggttcgacctggatcttacctacgtgactgagcgaataatagccatgtcattcccatccagcggcaggcagtcattttacagaaatcctattgaggaggtcgttcgtttcctggataagaagcatcgtaatcattatagagtctacaatctatgttccgagcgagcctacgatccgaaacattttcataaccgagtgagtcgcatcatgattgacgaccataatgtgcccactctgcatgaaatggttgtgtttactaaagaagtcaacgagtggatggcccaggaccttgaaaatatcgtggctattcactgtaaaggcggcaaaggccggaccggcaccatggtctgcgcacttttgattgcctccgaaatcttcctgaccgccgaggagtctctgtactattttggcgaacgacggacaaacaagacccactcgaataagttccagggcgtggagacaccctcacagaatcggtacgtcgggtattttgcccaagtcaagcatctgtacaattggaatctacctcccaggagaatactgttcattaaaaggtttatcatttatagtattcgcggcgacgtctgcgatctcaaggtgcaggtggtgatggagaaaaaagtcgtgttctctagcacaagcctgggaaattgctcaagggaagaaggctcaactagggcgaattggaagggggaacctagtcggcgccccgtgctggattag

SEQ ID NO: 52902 - DNA, 1236 bp, Artificial Sequence
  derived and/or modified sequence
atgaacgagagcccccagaccaacgagttcaagggcaccaccgaggaagcccctgctaaggaatcaccacataccagtgagtttaagggcgctgctctcgtgtcccccatttcaaagagtatgctggaaaggctctctaaattcgaggtggaggacgccgagaacgtcgcttcttatgaatggacccacttggtcagactgttgcggctcataattttgatccgcatctttcatcttctccatcaaaagcgccagctcgaaaagctcatgcggcggcttgttagcgagaacaagagaaggtacacccgggacggcttcgacctggacctgacctacgtcaccgaacgaatcatcgcaatgtcctttccgtcttcagggcgtcagtctttctacaggaacccgattgaagaagtggttaggtttctggacaagaagcaccggaaccactatcgcgtatataatctatgcagcgagcgcgcttatgaccccaaacatttccacaatcgcgtgtccagaattatgattgacgaccataacgtcccaacactgcacgagatggtagtgttcaccaaggaggtgaatgagtggatggcccaggacctcgaaaatattgtggctatacactgcaagggaggcaaaggacggaccggcaccatggtgtgtgccttgttaatcgcatctgaaattttcctcaccgccgaagaaagtctatactacttcggcgaaaggagaacaaacaaaactcattccaataagtttcaaggcgtggaaacgccatctcagaacaggtatgttggttacttcgcccaggtgaaacatctgtacaattggaatttacccccccgcaggatcttatttatcaagagattcattatctactccatcagaggtgacgtgtgcgatttaaaagttcaggtcgtgatggagaagaaagtggtgttctccagcacaagcttgggcaattgtagtatcttacacgacatagagacggacaagattttaataaacgtatatgacggcccgccactgtatgatgatgttaaggttcagtttttttcctcaaaccttcctaagtattacgacaattgtcccttttttttttggttcaacacgagctttatccagaacaaccgcttgtgcctgcccaggaatgagctggataatcctcataagcagaaggcctggaaaatctatccccccgaattcgctgtcgagatcttgttcggggagaagtag

SEQ ID NO: 52903 - DNA, 1236 bp, Artificial Sequence
  derived and/or modified sequence
atgaatgagagcccccagactaatgaatttaaaggcactaccgaagaggccccagccaaggagtcaccacacacttccgaattcaaaggcgcagcattagttagtcccatatcaaagtcaatgttagagagattgtccaagttcgaggtggaggacgccgagaacgtggctagctatgaatggacacatctagtgcgactgctccgcctgataatccttatccggatatttcacctgctccaccagaagcgtcaattagagaagctgatgcgaaggctagtgtcagaaaacaagcgtagatacaccagggatggatttgatttagatctcacatacgtcactgaacggattatcgccatgagcttcccatctagcgggagacaatcattctatcgaaaccccatagaagaagttgtacggttcctggataagaagcataggaaccattatagggtctataacctgtgctctgaaagggcgtatgaccctaaacatttccataacagggtaagcaggattatgattgatgatcacaatgtgccaactctgcacgaaatggtcgtttttacaaaggaggtgaatgagtggatggcccaagatttggaaaatatcgtcgcaattcactgtaaaggcggaaagggccgtacgggtaccatggtatgcgcgctactgattgcctccgaaattttcctgaccgccgaggaatctctttactacttcggcgaacgccgaactaacaagacgcattctaataaattccaaggcgtcgagaccccttcgcagaatagatatgtaggctatttcgctcaggtcaagcacctgtataactggaatctgccacctcggcgaatcctcttcattaagaggtttatcatttattccatacggggagatgtatgtgacttgaaagttcaagtcgtcatggagaagaaagtggtgttctccagcactagtctcggcaactgttccatcctgcacgatatcgaaacagacaagatccttatcaatgtctatgacgggccaccactctatgacgacgttaaggtccagtttttctcatcaaatttgcctaagtactacgataattgcccttttttcttttggttcaataccagctttattcagaacaacaggttgtgcctgccgcgaaacgagctagataatccacataagcagaaagcctggaagatttatccacccgaatttgctgtggagatcttgttcggcgagaaatag

SEQ ID NO: 52904 - DNA, 975 bp, Artificial Sequence
  derived and/or modified sequence
atgaatgaatccccccagacaaatgaatttaagggcactaccgaggaagcacccgcaaaagaatcgccacatacaagcgaattcaagggggctgccctggtgtctccaattagcaagaggtggacacatctcgtgagacttcttagacttattattttgattcggatatttcatctccttcatcagaaaagacagctggagaagctgatgcggcgtcttgttagcgaaaataagcgtagatatactcgcgatggttttgacttggatctgacctacgtgaccgaacgcatcattgccatgagctttccctcgtccggacgccagtcattttataggaatcccatcgaagaggtggtgaggtttctggataagaaacacaggaaccactacagggtgtacaatctctgctccgagcgcgcatatgaccctaaacactttcacaatcgagtctcccgaataatgattgacgaccacaacgttcccaccctgcacgaaatggtagtgttcaccaaggaagtgaatgaatggatggcccaggacctggaaaacatcgtcgccatccactgcaaaggcggaaagggcaggaccggaacaatggtgtgcgcacttctgatcgcatccgagatctttctgacggccgaagagagcctgtactattttggcgaaaggcgcacgaataagacacattccaataagttccaaggagtggaaaccccctcacagaataggtacgtgggttattttgcccaggtgaaacatctgtacaactggaacctgccacctaggagaatcctttttatcaagagatttataatatactctatacgaggcgatgtctgtgaccttaaggttcaagtcgtcatggagaagaaagtggtctttagtagtacaagcctggggaattgtagtcgggaagagggatctactcgagctaactggaagggggaacctagcaggcgcccagttttggactag

SEQ ID NO: 52905 - DNA, 1236 bp, Artificial Sequence
  derived and/or modified sequence
atgaatgaaagcccacaaaccaatgaattcaaaggcaccacagaggaggctcccgctaaggagtcccctcatacctccgagttcaagggtgcagctcttgttagtcctataagcaagtctatgctggagagactgtctaaatttgaggttgaggacgctgagaacgtagcgagctacgagtggacccatctggtgagactgcttaggctcatcatccttatcagaatattccaccttctacatcagaagcgccagctggagaaactgatgagaaggctagtgtctgagaataagcgccgttatacacgcgacggttttgatctcgatctgacttatgtgacagaaagaattatcgcaatgagctttcccagctccgggagacagtcattctatagaaatcccatcgaagaggtcgtccgctttctggacaagaagcatcggaaccattaccgcgtttacaatctctgttctgagcgtgcctacgatcccaagcactttcacaatagagtatcgaggattatgatagacgatcacaacgtcccaactttacacgagatggtcgtctttacaaaggaggttaacgagtggatggctcaagatctggaaaacatcgttgctattcactgtaaggggggtaagggcagaaccggcacaatggtatgcgccctgctgattgcttccgaaatctttctgacagctgaagaatctctgtattatttcggggaacgcagaacgaataagactcactccaacaaattccagggtgtagagactccttcgcaaaacaggtatgtgggctatttcgcccaggtcaagcacctctataattggaacctgccccctcgcaggatcctttttattaagcggtttataatatacagtattaggggagacgtctgtgatctgaaggtgcaggttgtgatggaaaaaaaggtggtgttcagcagtacatctctgggtaactgttcaatcttacacgacatcgagacagataaaatcttaatcaatgtttatgatggtcccccactttacgatgatgttaaagttcagttcttctcttctaacctgccgaaatactatgacaactgtcccttcttcttctggtttaatacgagttttatacagaacaaccgattgtgtttgccacgcaatgaactggacaaccctcacaagcagaaggcatggaagatatacccaccagagtttgccgttgagatactgtttggagagaagtag

SEQ ID NO: 52906 - DNA, 1652 bp, Artificial Sequence
  derived and/or modified sequence
agaccaaattggataaaagaggacgaagtcatgaaagggatgcttcttcctcttagtatatttgtcactctaagttggtggtatccaatcccttaggaacgaacctctgaggttttccatttatgagactctcctactactagagtgggccaaagggagagagaatcctatttggagcaatgaggaggtaacagtccacccacaaatgaattatcaggagtgaacccagaggcacgtatgaatgaaagtccacagacaaacgaatttaaaggaacaaccgaggaggcacctgcgaaagaaagcccacacacaagtgaatttaaaggagcagccctggtgtcacctatcagtaaaagtatgttagaacgactttccaagtttgaagttgaagatgctgaaaatgttgcttcatatgaatggacacatttagttcgacttctacgacttattattctgataagaatttttcatctgcttcatcaaaaaagacaacttgaaaagctgatgagaaggctggtttcagaaaacaaaaggcgatacacaagggatggatttgacctagacctcacttacgttacagaacgtattattgctatgtcatttccatcttctggaaggcagtctttctatagaaatccaattgaggaagttgtgcggtttctagataagaaacatcgaaaccactatcgagtctacaatctatgcagtgaaagagcttatgatcctaagcacttccataatagggtcagtagaatcatgattgatgatcataatgtccccactctacatgagatggtggttttcaccaaggaagtaaatgagtggatggctcaagatcttgaaaacatcgtagcgattcactgtaaaggaggcaaaggaagaaccgggactatggtttgtgccctccttattgcctccgaaatatttttaactgccgaggaaagcctatattattttggagaaaggcgaaccaataaaacccacagcaataaatttcagggagtagaaactccttctcagaatagatatgttggatattttgcacaagtgaaacatctctacaactggaatctccctccaagacggatactctttataaaaagattcattatttattcgattcgtggtgatgtatgtgatctaaaagtccaagtagtaatggagaaaaaggttgtcttttccagtacttcattaggaaattgttcgatattgcatgacattgaaacagacaaaatattaattaatgtatatgacggtccacctctgtatgatgatgtgaaagtgcagtttttctcttcgaatcttcctaaatactatgacaattgtccatttttcttctggttcaacacgtcttttattcaaaataacaggctttgtctaccaagaaatgaattggataatccacataaacaaaaagcatggaaaatttatccaccagaatttgctgtggagatactttttggcgagaaatgacttccaatgatgttgtagctggatccgactaagtatagctcccccttccccttctgggaaagaattatgttctttccaacccctgccacatgttcatgtgtcctaagtcttccttgatgatgcatctatatttatatatgtttatatatgttcttcataaatctattaaatatatatag

SEQ ID NO: 52907 - DNA, 1186 bp, Artificial Sequence
  derived and/or modified sequence
aatgatcgaagcagtacaaatcaggggagaacgtgcccaagacctggagaactgataataaattgtggtttatccttgcaatggaacactatatggaagtgaaaatgattgaaatagagctatacacatcatcacagacaaatttcagaaacaacgctgagtgaaaaatccacccacaaatgaattatcaggagtgaacccagaggcacgtatgaatgaaagtccacagacaaacgaatttaaaggaacaaccgaggaggcacctgcgaaagaaagcccacacacaagtgaatttaaaggagcagccctggtgtcacctatcagtaaaagatggacacatttagttcgacttctacgacttattattctgataagaatttttcatctgcttcatcaaaaaagacaacttgaaaagctgatgagaaggctggtttcagaaaacaaaaggcgatacacaagggatggatttgacctagacctcacttacgttacagaacgtattattgctatgtcatttccatcttctggaaggcagtctttctatagaaatccaattgaggaagttgtgcggtttctagataagaaacatcgaaaccactatcgagtctacaatctatgcagtgaaagagcttatgatcctaagcacttccataatagggtcagtagaatcatgattgatgatcataatgtccccactctacatgagatggtggttttcaccaaggaagtaaatgagtggatggctcaagatcttgaaaacatcgtagcgattcactgtaaaggaggcaaaggaagaaccgggactatggtttgtgccctccttattgcctccgaaatatttttaactgccgaggaaagcctatattattttggagaaaggcgaaccaataaaacccacagcaataaatttcagggagtagaaactccttctcagaatagatatgttggatattttgcacaagtgaaacatctctacaactggaatctccctccaagacggatactctttataaaaagattcattatttattcgattcgtggtgatgtatgtgatctaaaagtccaagtagtaatggagaaaaaggttgtcttttccagtacttcattaggaaattgttcgagagaagagggcagcacaagggccaactggaagggggagccatccaggagacctgtgctcgactga

SEQ ID NO: 52908 - DNA, 1457 bp, Artificial Sequence
  derived and/or modified sequence
aatgatcgaagcagtacaaatcaggggagaacgtgcccaagacctggagaactgataataaattgtggtttatccttgcaatggaacactatatggaagtgaaaatgattgaaatagagctatacacatcatcacagacaaatttcagaaacaacgctgagtgaaaaatccacccacaaatgaattatcaggagtgaacccagaggcacgtatgaatgaaagtccacagacaaacgaatttaaaggaacaaccgaggaggcacctgcgaaagaaagcccacacacaagtgaatttaaaggagcagccctggtgtcacctatcagtaaaagtatgttagaacgactttccaagtttgaagttgaagatgctgaaaatgttgcttcatatgaatggacacatttagttcgacttctacgacttattattctgataagaatttttcatctgcttcatcaaaaaagacaacttgaaaagctgatgagaaggctggtttcagaaaacaaaaggcgatacacaagggatggatttgacctagacctcacttacgttacagaacgtattattgctatgtcatttccatcttctggaaggcagtctttctatagaaatccaattgaggaagttgtgcggtttctagataagaaacatcgaaaccactatcgagtctacaatctatgcagtgaaagagcttatgatcctaagcacttccataatagggtcagtagaatcatgattgatgatcataatgtccccactctacatgagatggtggttttcaccaaggaagtaaatgagtggatggctcaagatcttgaaaacatcgtagcgattcactgtaaaggaggcaaaggaagaaccgggactatggtttgtgccctccttattgcctccgaaatatttttaactgccgaggaaagcctatattattttggagaaaggcgaaccaataaaacccacagcaataaatttcagggagtagaaactccttctcagaatagatatgttggatattttgcacaagtgaaacatctctacaactggaatctccctccaagacggatactctttataaaaagattcattatttattcgattcgtggtgatgtatgtgatctaaaagtccaagtagtaatggagaaaaaggttgtcttttccagtacttcattaggaaattgttcgatattgcatgacattgaaacagacaaaatattaattaatgtatatgacggtccacctctgtatgatgatgtgaaagtgcagtttttctcttcgaatcttcctaaatactatgacaattgtccatttttcttctggttcaacacgtcttttattcaaaataacaggctttgtctaccaagaaatgaattggataatccacataaacaaaaagcatggaaaatttatccaccagaatttgctgtggagatactttttggcgagaaatgacttccaatga

SEQ ID NO: 52909 - DNA, 1998 bp, Artificial Sequence
  derived and/or modified sequence
atgcagaccgccgaccaccccgaggtggtgcccttcctgtacaacagacagcagagagcccacagcctgttcctggccagcgccgagttctgcaacatcctgagcagagtgctgagcagagccagaagcagacccgccaagctgtacgtgtacatcaacgagctgtgcaccgtgctgaaggcccacagcgccaagaagaagctgaacctggcccccgccgccaccaccagcaacgagcccagcggcaacaacccccccacccacctgagcctggaccccaccaacgccgagaacaccgccagccagagccccagaaccagaggcagcagaagacagatccagagactggagcagctgctggccctgtacgtggccgagatcagaagactgcaggagaaggagctggacctgagcgagctggacgaccccgacagcgcctacctgcaggaggccagactgaagagaaagctgatcagactgttcggcagactgtgcgagctgaaggactgcagcagcctgaccggcagagtgatcgagcagagaatcccctacagaggcaccagataccccgaggtgaacagaagaatcgagagactgatcaacaagcccggccccgacaccttccccgactacggcgacgtgctgagagccgtggagaaggccgccgccagacacagcctgggcctgcccagacagcagctgcagctgatggcccaggacgccttcagagacgtgggcatcagactgcaggagagaagacacctggacctgatctacaacttcggctgccacctgaccgacgactacagacccggcgtggaccccgccctgagcgaccccgtgctggccagaagactgagagagaacagaagcctggccatgagcagactggacgaggtgatcagcaagtacgccatgctgcaggacaagagcgaggagggcgagagaaagaagagaagagccagactgcagggcaccagcagccacagcgccgacacccccgaggccagcctggacagcggcgagggccccagcggcatggccagccagggctgccccagcgccagcagagccgagaccgacgacgaggacgacgaggagagcgacgaggaggaggaggaggaggaggaggaggaggaggaggaggccaccgacagcgaggaggaggaggacctggagcagatgcaggagggccaggaggacgacgaggaggaggacgaggaggaggaggccgccgccggcaaggacggcgacaagagccccatgagcagcctgcagatcagcaacgagaagaacctggagcccggcaagcagatcagcagaagcagcggcgagcagcagaacaagggcagaatcgtgagccccagcctgctgagcgaggagcccctggcccccagcagcatcgacgccgagagcaacggcgagcagcccgaggagctgaccctggaggaggagagccccgtgagccagctgttcgagctggagatcgaggccctgcccctggacacccccagcagcgtggagaccgacatcagcagcagcagaaagcagagcgaggagcccttcaccaccgtgctggagaacggcgccggcatggtgagcagcaccagcttcaacggcggcgtgagcccccacaactggggcgacagcggccccccctgcaagaagagcagaaaggagaagaagcagaccggcagcggccccctgggcaacagctacgtggagagacagagaagcgtgcacgagaagaacggcaagaagatctgcaccctgcccagcccccccagccccctggccagcctggcccccgtggccgacagcagcaccagagtggacagccccagccacggcctggtgaccagcagcctgtgcatccccagccccgccagactgagccagaccccccacagccagccccccagacccggcacctgcaagaccagcgtggccacccagtgcgaccccgaggagatcatcgtgctgagcgacagcgactag

SEQ ID NO: 52910 - DNA, 2606 bp, Artificial Sequence
  derived and/or modified sequence
atatggcggcgcttagttgcatgaaggcggaaactctgtgacttccggtccgtagtggggcctgcggtgggagtgggaaggaaggcggagggaaccatgcgaggttctgagaattgcggcgagggtcgcctcgagagacggtttctgaggaattctgaaatccccaccacttcctccctccgggggatttgatcccctatggccaccgctaacagcatcatcgtgctggatgatgatgacgaagatgaagcagctgctcagccagggccctcccacccactccccaatgcggcctcacctggggcagaagcccctagctcctctgagcctcatggggccagaggaagcagtagttcgggcggcaagaaatgctacaagctggagaatgagaagctgttcgaagagttccttgaactttgtaagatgcagacagcagaccaccctgaggtggtcccattcctctataaccggcagcaacgtgcccactctctgtttttggcctcggcggagttctgcaacatcctctctagggtcctgtctcgggcccggagccggccagccaagctctatgtctacatcaatgagctctgcactgttctcaaggcccactcagccaaaaagaagctgaacttggcccctgccgccaccacctccaatgagccctctgggaataaccctcccacacacctctccttggaccccacaaatgctgaaaacactgcctctcagtctccaaggacccgtggttcccggcggcagatccagcgtttggagcagctgctggcgctctatgtggcagagatccggcggctgcaggaaaaggagttggatctctcagaattggatgacccagactccgcatacctgcaggaggcacggttgaagcgtaagctgatccgcctctttgggcgactatgtgagctgaaagactgctcttcactgaccggccgtgtcatagagcagcgcatcccctaccgtggcacccgctacccagaggttaacaggcgcattgagcggctcatcaacaagccagggcctgataccttccctgactatggggatgtgcttcgggctgtagagaaggcagctgcccgacacagccttggcctcccccgacagcagctccagctcatggctcaggatgccttccgagatgtgggcatcaggttacaggagcgacgtcacctcgatctcatctacaactttggctgccacctcacagatgactataggccaggcgttgaccctgcactatcagatcctgtgttggcccggcgccttcgggaaaaccggagtttggccatgagtcggctggatgaggtcatctccaaatatgcaatgttgcaagacaaaagtgaggagggcgagagaaaaaagagaagagctcggctccaaggcacctcttcccactctgcagacacccccgaagcctccttggattctggtgagggccctagtggaatggcatcccaggggtgcccttctgcctccagagctgagacagatgacgaagacgatgaggagagtgatgaggaagaggaggaggaggaggaagaagaagaggaggaggccacagattctgaagaggaggaggatctggaacagatgcaggagggtcaggaggatgatgaagaggaggacgaagaggaagaagcagcagcaggtaaagatggagacaagagccccatgtcctcactacagatctccaatgaaaagaacctggaacctggcaaacagatcagcagatcttcaggggagcagcaaaacaaaggacgcatagtgtcaccatcgttactgtcagaagaacccctggccccctccagcatagatgctgaaagcaatggagaacagcctgaggagctgaccctggaggaagaaagccctgtgtctcagctctttgagctagagattgaagctttgcccctggataccccttcctctgtggagacggacatttcctcttccaggaagcaatcagaggagcccttcaccactgtcttagagaatggagcaggcatggtctcttctacttccttcaatggaggcgtctctcctcacaactggggagattctggtcccccctgcaaaaaatctcggaaggagaagaagcaaacaggatcagggccattaggaaacagctatgtggaaaggcaaaggtcagtgcatgagaagaatgggaaaaagatatgtaccctgcccagcccaccttcccccttggcttccttggccccagttgctgattcctccacgagggtggactctcccagccatggcctggtgaccagctccctctgcatcccttctccagcccggctgtcccaaaccccccattcacagcctcctcggcctggtacttgcaagacaagtgtggccacacaatgcgatccagaagagatcatcgtgctctcagactctgattagctgcctccccttctccctgcctccagaatgttctgggataacatttggaggaaggtgggaagcagatgactgaggaagggatggactaagctaatccccttttggtggtgtttctttaaaaaaaaaaaaaagcttaagttttacacagaaacattaataaacaataaagttcttttcttactgta

SEQ ID NO: 52911 - DNA, 2613 bp, Artificial Sequence
  derived and/or modified sequence
gacaatatggcggcgcttagttgcatgaaggcggaaactctgtgacttccggtccgtagtggggcctgcggtgggagtgggaaggaaggcggagggaaccatgcgaggttctgagaattgcggcgagggtcgcctcgagagacggtttctgagcaggaattctgaaatccccaccacttcctccctccgggggatttgatcccctatggccaccgctaacagcatcatcgtgctggatgatgatgacgaagatgaagcagctgctcagccagggccctcccacccactccccaatgcggcctcacctggggcagaagcccctagctcctctgagcctcatggggccagaggaagcagtagttcgggcggcaagaaatgctacaagctggagaatgagaagctgttcgaagagttccttgaactttgtaagatgcagacagcagaccaccctgaggtggtcccattcctctataaccggcagcaacgtgcccactctctgtttttggcctcggcggagttctgcaacatcctctctagggtcctgtctcgggcccggagccggccagccaagctctatgtctacatcaatgagctctgcactgttctcaaggcccactcagccaaaaagaagctgaacttggcccctgccgccaccacctccaatgagccctctgggaataaccctcccacacacctctccttggaccccacaaatgctgaaaacactgcctctcagtctccaaggacccgtggttcccggcggcagatccagcgtttggagcagctgctggcgctctatgtggcagagatccggcggctgcaggaaaaggagttggatctctcagaattggatgacccagactccgcatacctgcaggaggcacggttgaagcgtaagctgatccgcctctttgggcgactatgtgagctgaaagactgctcttcactgaccggccgtgtcatagagcagcgcatcccctaccgtggcacccgctacccagaggttaacaggcgcattgagcggctcatcaacaagccagggcctgataccttccctgactatggggatgtgcttcgggctgtagagaaggcagctgcccgacacagccttggcctcccccgacagcagctccagctcatggctcaggatgccttccgagatgtgggcatcaggttacaggagcgacgtcacctcgatctcatctacaactttggctgccacctcacagatgactataggccaggcgttgaccctgcactatcagatcctgtgttggcccggcgccttcgggaaaaccggagtttggccatgagtcggctggatgaggtcatctccaaatatgcaatgttgcaagacaaaagtgaggagggcgagagaaaaaagagaagagctcggctccaaggcacctcttcccactctgcagacacccccgaagcctccttggattctggtgagggccctagtggaatggcatcccaggggtgcccttctgcctccagagctgagacagatgacgaagacgatgaggagagtgatgaggaagaggaggaggaggaggaagaagaagaggaggaggccacagattctgaagaggaggaggatctggaacagatgcaggagggtcaggaggatgatgaagaggaggacgaagaggaagaagcagcagcaggtaaagatggagacaagagccccatgtcctcactacagatctccaatgaaaagaacctggaacctggcaaacagatcagcagatcttcaggggagcagcaaaacaaaggacgcatagtgtcaccatcgttactgtcagaagaacccctggccccctccagcatagatgctgaaagcaatggagaacagcctgaggagctgaccctggaggaagaaagccctgtgtctcagctctttgagctagagattgaagctttgcccctggataccccttcctctgtggagacggacatttcctcttccaggaagcaatcagaggagcccttcaccactgtcttagagaatggagcaggcatggtctcttctacttccttcaatggaggcgtctctcctcacaactggggagattctggtcccccctgcaaaaaatctcggaaggagaagaagcaaacaggatcagggccattaggaaacagctatgtggaaaggcaaaggtcagtgcatgagaagaatgggaaaaagatatgtaccctgcccagcccaccttcccccttggcttccttggccccagttgctgattcctccacgagggtggactctcccagccatggcctggtgaccagctccctctgcatcccttctccagcccggctgtcccaaaccccccattcacagcctcctcggcctggtacttgcaagacaagtgtggccacacaatgcgatccagaagagatcatcgtgctctcagactctgattagctgcctccccttctccctgcctccagaatgttctgggataacatttggaggaaggtgggaagcagatgactgaggaagggatggactaagctaatccccttttggtggtgtttctttaaaaaaaaaaaaaagcttaagttttacacagaaacattaataaacaataaagttcttttcttactgta

SEQ ID NO: 52912 - DNA, 2152 bp, Artificial Sequence
  derived and/or modified sequence
gtgacttccggtccgtagtggggcctgcggtgggagtgggaaggaaggcggagggaaccatgcgaggttctgagaattgcggcgagggtcgcctcgagagacggtttctgagttccttgaactttgtaagatgcagacagcagaccaccctgaggtggtcccattcctctataaccggcagcaacgtgcccactctctgtttttggcctcggcggagttctgcaacatcctctctagggtcctgtctcgggcccggagccggccagccaagctctatgtctacatcaatgagctctgcactgttctcaaggcccactcagccaaaaagaagctgaacttggcccctgccgccaccacctccaatgagccctctgggaataaccctcccacacacctctccttggaccccacaaatgctgaaaacactgcctctcagtctccaaggacccgtggttcccggcggcagatccagcgtttggagcagctgctggcgctctatgtggcagagatccggcggctgcaggaaaaggagttggatctctcagaattggatgacccagactccgcatacctgcaggaggcacggttgaagcgtaagctgatccgcctctttgggcgactatgtgagctgaaagactgctcttcactgaccggccgtgtcatagagcagcgcatcccctaccgtggcacccgctacccagaggttaacaggcgcattgagcggctcatcaacaagccagggcctgataccttccctgactatggggatgtgcttcgggctgtagagaaggcagctgcccgacacagccttggcctcccccgacagcagctccagctcatggctcaggatgccttccgagatgtgggcatcaggttacaggagcgacgtcacctcgatctcatctacaactttggctgccacctcacagatgactataggccaggcgttgaccctgcactatcagatcctgtgttggcccggcgccttcgggaaaaccggagtttggccatgagtcggctggatgaggtcatctccaaatatgcaatgttgcaagacaaaagtgaggagggcgagagaaaaaagagaagagctcggctccaaggcacctcttcccactctgcagacacccccgaagcctccttggattctggtgagggccctagtggaatggcatcccaggggtgcccttctgcctccagagctgagacagatgacgaagacgatgaggagagtgatgaggaagaggaggaggaggaggaagaagaagaggaggaggccacagattctgaagaggaggaggatctggaacagatgcaggagggtcaggaggatgatgaagaggaggacgaagaggaagaagcagcagcaggtaaagatggagacaagagccccatgtcctcactacagatctccaatgaaaagaacctggaacctggcaaacagatcagcagatcttcaggggagcagcaaaacaaaggacgcatagtgtcaccatcgttactgtcagaagaacccctggccccctccagcatagatgctgaaagcaatggagaacagcctgaggagctgaccctggaggaagaaagccctgtgtctcagctctttgagctagagattgaagctttgcccctggataccccttcctctgtggagacggacatttcctcttccaggaagcaatcagaggagcccttcaccactgtcttagagaatggagcaggcatggtctcttctacttccttcaatggaggcgtctctcctcacaactggggagattctggtcccccctgcaaaaaatctcggaaggagaagaagcaaacaggatcagggccattaggaaacagctatgtggaaaggcaaaggtcagtgcatgagaagaatgggaaaaagatatgtaccctgcccagcccaccttcccccttggcttccttggccccagttgctgattcctccacgagggtggactctcccagccatggcctggtgaccagctccctctgcatcccttctccagcccggctgtcccaaaccccccattcacagcctcctcggcctggtacttgcaagacaagtgtggccacacaatgcgatccagaagagatcatcgtgctctcagactctgattagctgcctccccttctccctgcctcc

SEQ ID NO: 52913 - DNA, 1998 bp, Artificial Sequence
  derived and/or modified sequence
atgcagaccgctgaccaccctgaagtggttcctttcctttacaatagacagcagcgcgctcattcactgttcctggctagcgcagaattttgtaatatactctctcgcgtgttatcacgtgctagatccagacctgcgaagttgtatgtgtacattaacgagctgtgtaccgtgttaaaggctcattccgctaagaagaaactgaatctcgcacccgcagccaccacttccaacgagccttcaggcaataatcccccgacacacctgtcgcttgatccaaccaacgccgagaatacagcctcgcagtcgcctagaactagaggctctcgcagacagatccagagactggaacagctgctggccctgtatgttgccgagataaggcgcttacaggaaaaggagcttgatctcagcgagcttgacgacccagatagtgcttatctgcaggaggcacggctgaagaggaaactgattcgactatttggaagactctgcgagctgaaagattgttcctcccttacagggcgagttatagaacagaggattccctaccggggaacccgatatcccgaagtcaaccgcaggattgaaaggcttataaacaagccggggccggacactttccccgattacggcgacgtgctgcgcgctgtggagaaggcggctgctagacacagcttgggcctccctcgacaacagctgcagttgatggcccaggatgcattcagggatgtgggaatcaggctgcaagaacgtcgccacctggatttgatatataacttcgggtgccatctgaccgatgattaccgaccgggagtggaccccgccctatcggaccccgtgctagcacgaagacttagagagaaccgctcccttgcaatgtcacgcctcgacgaggtgatctctaagtacgcaatgcttcaggacaagtctgaagaaggtgaacgtaagaaaagacgagccagattacaggggacctcatctcacagcgccgacacacccgaggcctctctggacagcggtgagggcccctccggcatggccagccaggggtgccccagcgcttcgcgggctgaaactgacgacgaggatgacgaggagtccgacgaggaagaagaggaagaagaggaagaagaagaagaggaggccacggactcagaagaggaggaggacttggaacaaatgcaggagggacaggaggatgacgaggaagaggatgaagaagaggaggccgctgctggtaaggacggagataagagccctatgtcatcactacagatctctaatgagaaaaacttggagcccgggaagcagatttcaaggagcagcggcgaacagcagaacaaaggtcgaatagtttcaccttcactcttatccgaggaacctctcgcaccttccagcatcgatgccgaatcaaatggcgaacagccggaagaactcacccttgaagaggaaagtcctgtctcccagctgttcgaactcgaaatcgaggcacttcctctcgatactccttcttccgtggaaacggacatcagttcatctcggaagcagtctgaggagccattcacaaccgtgttggagaacggagcagggatggtctcatcaactagtttcaatggtggcgtaagcccccataattggggagacagcggcccaccttgcaagaagagtcgtaaagagaagaagcagacagggtctggcccactcgggaacagctacgttgagaggcagcgctccgtgcatgaaaaaaacggcaagaaaatctgcacactgccctcccctccaagcccactcgcctccctggcccctgtggctgattcctcaacacgggtggactcccccagccatgggctagtcacatcatctctgtgcatccccagtcccgcacgcctaagtcagacacctcatagtcagcctccaagacctggtacctgtaagacttctgtggcaacacagtgcgaccccgaggaaattatcgtactgtcagactctgactag

SEQ ID NO: 52914 - DNA, 1998 bp, Artificial Sequence
  derived and/or modified sequence
atgcagacagctgaccaccctgaggtggtgcccttcctgtacaaccggcagcagagggcccacagcctcttcctggccagcgctgagttctgcaacatcctgagccgggtgctgagccgggcccggagcaggcctgccaagctgtatgtgtacatcaatgagctgtgcaccgtgctgaaggcccacagcgccaagaagaagctgaacctggccccagctgccaccaccagcaatgagcccagcggcaacaacccccccacccacctgagcctggaccccaccaatgcagaaaatacagccagccagagccccaggacccggggcagccggcggcagatccagaggctggagcagctgctggccctgtatgtggccgagatccggcggctgcaggagaaggagctggacctgtctgagctggatgatcctgattctgcctacctgcaggaggcccggctgaagaggaagctgatccggctgtttggccgcctgtgtgagctgaaggactgcagcagcctgaccggccgggtcatcgagcagaggatcccctaccggggcacccgctacccagaggtgaacagacgcatcgagcggctcatcaacaagccaggccctgacaccttcccagactatggagatgtgctgcgggctgtggagaaggccgccgcccggcacagcctgggcctgccccggcagcagctgcagctgatggcccaggatgccttcagagatgtgggcatccggctgcaggagcggcggcacctggacctgatctacaactttggctgccacctgacagatgactacagacctggggtggaccctgccctgagtgaccctgtgctggcccggcggctgcgggagaacagaagcctggccatgagccggctggatgaggtgatcagcaaatatgccatgctgcaggacaagtctgaggagggggagaggaagaagagaagagcccggctgcagggcaccagcagccacagcgctgacaccccagaggccagcctggacagcggggagggccccagcggcatggccagccagggctgccccagcgccagcagagctgagacagatgatgaagatgatgaggagagtgatgaggaggaggaggaggaggaggaggaggaggaggaggaggccacagacagcgaggaggaggaggacctggagcagatgcaggagggccaggaggatgatgaggaggaggatgaggaggaggaggccgctgctgggaaggatggagacaagagccccatgagcagcctgcagatcagcaatgagaagaacctggagcccgggaagcagatcagccgcagcagtggagagcagcagaacaagggccgcatcgtgagccccagcctgctgtctgaggagcccctggcccccagcagcattgatgctgagagcaatggagagcagcctgaggagctgaccctggaggaggagagccctgtgtcccagctgtttgagctggagattgaggccctgcccctggacacccccagctctgtggagacagacatcagcagcagcaggaagcagagcgaggagcccttcaccaccgtgctggagaatggagctggcatggtgagcagcaccagcttcaatggaggagtgagcccccacaactggggagacagcggccccccctgcaagaagagcaggaaggagaagaagcagacaggcagcggccccctgggcaacagctatgtggagcggcagaggtctgtgcatgagaagaatggcaagaagatctgcaccctgcccagcccccccagccccctggccagcctggcccctgtggccgacagcagcaccagggtggacagccccagccacggcctggtgaccagcagcctgtgcatccccagccctgcccggctgagccagaccccccacagccagcccccccggcccggcacctgcaagacctctgtggccacccagtgtgaccctgaggagatcatcgtgctgagtgacagcgactag

SEQ ID NO: 52915 - DNA, 1998 bp, Artificial Sequence
  derived and/or modified sequence
atgcagaccgccgaccaccccgaggtggtgcccttcctgtacaaccgtcagcaaagagcacatagtctgttcctggcaagtgccgaattttgcaacattctgtcccgagtgctaagcagggctaggtctcggcccgccaagctctacgtctatatcaacgaactctgtacggtgctcaaggcccatagcgccaagaaaaaacttaatctggcccctgcggctaccacaagtaacgagccctctggcaataaccctccaacacatctatcactggacccaactaacgcagaaaacactgcctcgcagtccccaagaacacgagggtctcggcgacaaatacagagactggagcagttattggctttgtatgtggccgaaatccgacgactacaggagaaggagttagacctttccgagttagacgaccccgattctgcctatctgcaggaagcacgattgaaaagaaaactgatcaggctgtttgggaggctatgcgagcttaaggattgttcctcgttaactgggagagtcatcgaacagagaattccctataggggcacaaggtaccccgaggtgaatcgcagaatcgagcggctgattaataagcccggccctgatacatttcccgattatggcgatgttttgcgcgcagtggagaaggccgcagctagacactcccttggcttgccacgtcaacagttgcaactgatggcccaagatgcctttcgcgacgtgggcatccgccttcaagaacgtcgacatctcgatcttatctacaacttcggatgccaccttacagatgactatcgtcctggcgtggatcctgcactttctgaccccgttctggcgcgtaggctacgggaaaataggtccctggccatgtctcgactcgacgaggttatttccaagtacgccatgctgcaggataaatcagaagaaggggagcgcaaaaaacgacgggctcgcctgcaagggacaagttctcattccgcagatacgcctgaagcttccttggactccggggagggaccatccggcatggcctctcaaggctgtccaagcgccagtcgagctgaaaccgatgacgaagacgacgaagaaagtgatgaggaggaggaggaagaggaagaggaggaggaagaggaagccaccgactctgaagaagaagaagatttagaacagatgcaagagggccaagaggatgatgaggaggaggacgaggaggaggaggccgctgccggcaaagacggggataaatcacctatgtcctcactgcaaatcagcaatgaaaaaaacttggaaccaggaaagcaaatatctaggtctagtggggagcagcagaataagggacggatagttagcccaagtcttttgtccgaggagccactggccccgtccagtattgacgccgagagcaatggggaacagcccgaggagctcacccttgaagaggagtccccggtgtcgcaactgttcgaacttgagatagaggccttgcccctggatactcccagcagtgtcgagaccgacatatcctccagtaggaaacaatccgaggagccctttacaaccgtgctcgagaatggggcgggcatggtttcttctacctctttcaacggcggggtgagtccacacaactggggtgacagcgggccaccttgtaaaaaaagccggaaggagaagaagcaaactggaagcggccctttaggcaactcatatgtggagcgtcagagatccgtccatgaaaaaaacggcaagaaaatctgcaccctcccctccccacccagccctctcgcctctctggcacccgtcgctgatagcagcacccgggtggatagcccatcacacggtctggtcacatcatctttatgcattccctcgcctgccaggctatcacagactcctcactcccagccgccccgcccgggcacctgcaagacatccgtcgcaacacaatgcgacccagaggagattatcgtactgagcgactctgactag

SEQ ID NO: 52916 - DNA, 1998 bp, Artificial Sequence
  derived and/or modified sequence
atgcaaaccgccgaccacccagaagtggtcccctttctctataatcggcagcagcgcgctcacagtctgttcctggcgagcgccgaattctgtaacatccttagtcgggtcctgagccgcgctcgtagtcgacccgctaaactttatgtgtacataaacgagctatgcaccgttctgaaggctcatagcgcaaaaaaaaaactgaacctggccccagcagctactacatctaacgaacccagtgggaataacccccctacgcacttgagcctggaccccactaacgcagaaaatactgcgtcccagtctccacgtacccggggttctcgacgtcagattcagcggctcgagcagcttctggcactgtacgtcgctgagatcaggcgcttgcaagaaaaagaacttgatcttagcgagctggatgacccagattccgcatacctccaagaagccaggttgaagcggaagttgatccgtctttttgggaggttgtgcgaactcaaggattgctcatctctgaccgggcgtgttatcgagcagcggataccttatagaggaacaagataccctgaggtgaataggcgcatcgagcgtcttatcaataaaccaggccctgatacattccccgactacggagacgtcctccgagccgtggagaaagccgcagcaagacattctctgggattacctcgtcagcagctgcagctgatggctcaggacgcttttagggacgtgggcataaggctacaggagcgcaggcacctcgacctgatctacaactttggctgtcatctgacagatgattatcggcctggtgtagaccctgcactctctgatcctgtgctcgctagaaggctgcgagagaaccgctctctggccatgtccaggcttgatgaagtgatttcgaagtacgccatgctgcaagacaagtccgaggaaggcgagcgaaagaaacgcagagccagactgcagggcactagttctcactctgctgacacacctgaggcatctcttgattcgggagagggtccaagcggcatggcgagccaggggtgccccagcgcttcccgcgcagagacagacgacgaggatgatgaggagtccgatgaggaggaggaagaagaagaagaagaagaggaggaagaagctacagactctgaggaggaggaagacctagagcagatgcaggagggccaggaagatgacgaagaggaagacgaggaggaagaggctgcggctggcaaagacggagataaatctcctatgtcctccctgcagatatcaaatgaaaagaatctggagccaggaaagcagatctccaggagtagcggggaacagcagaataaggggaggatcgtttccccgagcctcttgagcgaggagcctttggcaccgtcatctattgacgctgagtccaatggcgaacaaccagaggagttgacactcgaagaagaaagtccagtttcacagttatttgagttggagatagaagccctgccgcttgatacaccttctagcgtggagaccgacatcagctctagccggaagcaatctgaagagccgtttacgaccgtgctcgaaaatggggcagggatggtttcctccacctccttcaatggtggggtctctccgcacaactggggcgattctggacccccatgtaagaaaagtaggaaggagaagaagcaaactggaagcggtcctctaggtaatagttatgtggaacgccaacgctcagttcatgagaagaacggaaaaaagatttgcaccctcccttctccaccttcaccactggcgtccctggcaccagtagccgactcctcgacacgtgtggactcaccttctcatgggctggtgacttcctcgctgtgtataccctcccctgcccgtctcagtcaaacccctcactcgcagcccccacggccaggcacctgtaagacatcagtggcaacacaatgcgatccagaggaaatcattgtgttgtccgattctgactag

SEQ ID NO: 52917 - DNA, 1998 bp, Artificial Sequence
  derived and/or modified sequence
atgcagaccgcggaccacccggaagtggtcccattcctatataatagacaacagagggcccattccttgtttcttgccagtgcagaattttgtaatattctgtctagagtgctctcaagagcgcggagccgcccggccaagctgtatgtgtacatcaacgagctgtgtactgtactgaaggcgcactccgccaaaaaaaagttgaacctcgccccagcggctaccacttctaatgaacccagcgggaataatcctcccacccacctgtctctggatcccaccaatgccgaaaataccgccagccagtctccgagaacacgaggctcaagaaggcagatccagagattggagcagctcctggccttgtacgtggccgaaatccgccgcttacaagaaaaggagctggatctatctgaactggacgacccagacagtgcctatcttcaggaagcgagattgaagcgaaagcttatacgactgttcggcagactgtgcgagcttaaggactgtagtagcttgactgggcgggtgatagagcagaggatcccttaccggggtacaaggtacccagaggttaatcggaggatcgagcgactcattaacaagcctggtccggatacgttcccagactacggagacgttcttagagccgtagagaaagctgctgctcgccattccttagggttgccacgccagcaattgcaactgatggctcaggacgcatttcgagatgtcggaattaggctgcaggagcggaggcacctcgacctgatttataattttggatgccaccttacagacgattacagacctggagtcgacccagccctctccgatcctgtcttggctcgcagactccgcgagaatcggtctctggccatgtctcgcctcgacgaggtgatttcgaaatatgctatgttacaagacaagtccgaggagggggaacggaaaaaacgtagggccaggttacagggaacttcatcacattcagctgatactccagaagcaagtctggatagcggcgagggcccttccgggatggcatcacagggctgtccctcagctagcagagccgaaacagatgatgaagacgacgaagagtccgatgaggaggaagaggaggaagaagaggaagaggaagaagaagctaccgacagcgaggaggaggaagacctggagcagatgcaagaaggccaggaggacgacgaagaagaggatgaggaagaggaagcggccgccggtaaggacggtgataagtccccaatgagctctcttcagatctctaatgaaaagaatctcgagcccggtaaacaaatcagccgttcatcgggcgagcagcagaacaagggcagaatcgtgagcccgagccttttgtccgaagagccacttgccccatcgtcgatcgatgctgagtctaatggtgaacaacctgaggagttaacacttgaggaggagtcccctgtaagtcagctatttgagctggaaatcgaggcgctccccctcgacacacctagttccgtcgaaaccgatatctcctcttctcgaaagcagagtgaagagcctttcactactgttctggaaaacggagctggaatggtatcctctacatcgttcaacggcggggtgagcccacataattggggtgattcgggccccccctgcaagaaatctagaaaggagaagaaacagacggggtcaggacctctgggcaatagctacgtagagaggcagcggtcagtacacgagaaaaatggtaaaaaaatttgcacactgccatccccaccaagtcccttggcttcacttgcacccgtcgccgattcttccaccagggttgactcaccctcacacggccttgtgacttctagtctgtgtattccatcgccagcccgtctgagccagaccccacactcccagcctcccaggccgggcacctgcaaaacatcagtagccacgcagtgtgatcccgaggagattatagttctctctgacagcgattag

SEQ ID NO: 52918 - DNA, 1998 bp, Artificial Sequence
  derived and/or modified sequence
atgcaaacagcagaccaccccgaagtggtcccgttcctttataacagacagcagcgggcgcacagcctgttcctcgcctcagctgagttctgcaacattttgtcacgagtgttaagccgggcccgctcaaggcctgccaagctctacgtgtacatcaatgagttatgcacagttttgaaagcacactccgcaaagaagaagctgaacttggctccagccgcgacaacaagcaacgagccgtcaggaaacaatccacctactcatttgtcgttggaccctacaaatgccgaaaacacagcctcccagagccctcggacgagaggttcgcggcgccaaattcagaggctggagcaattactagccctgtacgtcgctgaaatccgtaggttacaggaaaaggaactggatctgtctgagctggatgatcccgacagcgcttatctgcaggaagcaaggctgaagcgcaaattgataaggctgtttggaagactgtgcgagttaaaggactgctcttccctgactgggagggtcattgagcaacggattccctaccgggggacccgttacccggaggttaatcgacgcatcgaaaggcttattaacaagccaggacccgacacgttccccgactacggcgatgttctaagagctgtggagaaggccgctgcgcgacattcccttggtctgccaagacagcagttacagttaatggcgcaggatgcattcagggacgtgggtatccgcctccaggaaaggaggcacctggatctgatctacaattttggatgccacttgacagatgattaccgcccgggtgttgacccggcccttagcgaccccgtactggccaggcgcctgcgtgaaaatagaagtcttgccatgagcagattagacgaagtgatcagtaaatacgccatgctgcaagacaagagcgaggagggagaacgcaaaaagcggagggccagactacagggcacttcctctcactcagctgacactcctgaagccagccttgattcaggggaaggtccctccggcatggcctcacaaggctgccctagcgcctctagggctgaaacggacgacgaggatgacgaagagtcagacgaagaggaggaagaggaggaggaagaagaagaggaggaggctacagactccgaggaggaagaagacctggaacagatgcaggagggacaagaagacgacgaagaagaagacgaggaggaggaggcggctgcgggaaaagacggggataagagcccgatgagttcgctccaaattagcaatgagaaaaacttggagcccgggaaacagatttctcgaagttccggtgagcaacagaacaagggccgcatcgttagcccatcccttctctctgaggagcccctcgcccccagtagcattgatgcagagtccaatggggagcaaccagaggaactgaccttggaggaggagtctcctgtatcacagcttttcgagcttgaaatcgaggctttgccgcttgacacaccctcatccgtagagaccgatatctccagctcacggaaacagagtgaggagccattcactactgttctggaaaacggggccggtatggtctcatccacaagcttcaatggtggggtctccccgcacaattggggtgactccggacccccttgtaaaaagtcacggaaagaaaagaagcagacagggtccgggcccctcggcaactcttacgttgagcgacaaagatcagtacacgaaaagaacggcaagaagatttgcactctcccgagtcctccatcccctttggccagcctggcgccggtcgctgatagttctacaagagtggattctccatctcacggactcgtcacaagcagtctgtgtatccccagccctgcccggttgtcacaaaccccgcacagtcagccccccaggccggggacatgcaagacatccgttgccactcagtgtgatcctgaagaaatcatagtgttgagcgatagtgattag

SEQ ID NO: 52919 - DNA, 1998 bp, Artificial Sequence
  derived and/or modified sequence
atgcagaccgctgatcatccagaggttgtcccattcttgtacaatcgccaacaacgcgctcattcgctgtttctagctagcgcagagttctgcaacatcctcagccgtgtcctttccagagcacggtctcgcccagctaagctgtatgtgtatatcaacgagctgtgtacagtgcttaaagcacactctgccaaaaagaaacttaatctggcgccagccgcaacaaccagtaacgaacctagcgggaacaacccgcccacccatctctcattagacccaactaacgctgagaataccgcttcacaatcaccccgaacgagggggagccgccggcaaatccaaagacttgagcagttgctggccttgtacgtcgcggagatcagaaggctacaggagaaagagcttgacctttcagagttggacgatcctgacagcgcctacctgcaggaggcacgtctcaaacgcaagctgatccggctttttggcagattgtgtgagctgaaggattgcagttctctgaccgggagagttattgaacagaggatcccttacaggggcaccagatatccagaggtgaaccgccgcatagagcgcctaatcaacaagccagggcctgatacatttcccgattacggcgacgtactgagagcagtggagaaagccgctgcccgccacagcctcgggctgcctcgccagcagttgcagctgatggcccaggatgccttccgggacgtgggcatcaggttacaggaacgacgccaccttgatctgatttataatttcggttgtcacctgacggatgattatcgacctggggttgaccctgctctgagtgaccccgtactggcgagaagactgagggagaatcgatccctcgctatgtctaggctggatgaagtgatttccaaatatgccatgttacaagataagagcgaagagggggagcggaagaagaggcgggcaaggcttcagggcactagtagccactccgccgacactcctgaggcctcactcgacagtggggagggaccgtctggcatggcctcccaaggatgcccgtcggctagcagagctgagaccgatgacgaggacgatgaggagagtgatgaagaagaggaagaagaagaggaagaggaagaggaggaagctacagactccgaagaggaggaggacctcgagcaaatgcaggagggacaggaggatgatgaggaagaagacgaggaggaggaagccgcggccggaaaggatggtgataagagtcccatgtcgtcgctccagatcagcaatgagaagaatcttgagcccggaaaacagatcagtcgctctagcggagagcaacagaataagggccggattgttagcccttcactcctctccgaagaacctttggccccctctagcatcgatgccgagagcaatggtgaacagccagaagagctgacactcgaggaggagtcacctgtttctcagctcttcgagctggagatcgaagctctgccactggataccccctcctctgtcgagaccgacatctcaagttctcgaaagcagtccgaggaacccttcaccaccgtgttagagaatggcgccgggatggtgtcgtcaacctccttcaacggaggcgtgtcaccacataattggggcgactcgggcccgccttgcaaaaagtccagaaaagaaaagaaacagaccggaagcggccccctcgggaatagctatgttgagcgtcaacgatctgtgcacgaaaaaaatggaaagaaaatctgtacgctgcctagccctccaagccccctcgcatctttggcaccagtggctgattcctccactcgtgtggactcaccaagtcatgggctggtcacatcttcattgtgtatcccgtctcctgcccgcctgtcccaaacacctcattcccagccacctaggccaggcacctgtaagacatcggtggccacgcaatgtgacccagaggaaatcatcgtgctcagcgattcagactag

SEQ ID NO: 52920 - DNA, 1998 bp, Artificial Sequence
  derived and/or modified sequence
atgcaaaccgcggaccatccagaagttgtcccctttctttacaatcggcagcagagggcccactctctgtttctggcgagcgcagaattctgcaatattcttagtcgcgtactgtccagagccagatctaggccagctaagctctatgtgtacatcaacgagctctgcacagtgctcaaagctcattcagcgaaaaaaaaattaaacctagctcctgctgcaactacgtccaatgagccgtcggggaataacccgcctacacacttgtccctcgacccaaccaatgcagaaaacactgccagccagagccctcggactcgagggtcacgaagacaaatacagcggctggaacaattgttagctttatacgtcgcagaaattcggaggctgcaggagaaggaacttgatctttctgagcttgacgacccagactctgcttacctgcaggaagctcgccttaagcgaaagctgattagattgttcgggcgcctctgtgagctgaaagactgctccagcctcaccgggagagttatcgaacagaggatcccgtataggggtacaaggtaccccgaggtgaatcgacgcattgaaaggctcattaacaaaccaggtcccgatacgtttcccgattatggcgatgtgctaagagccgtggagaaggctgcagcacggcacagcctggggcttccaaggcaacagttgcagctgatggctcaggacgcttttcgcgacgtgggaatcagactgcaggagagacggcacctggacttaatctataatttcggctgccatttaaccgatgattaccgcccgggggttgaccccgcccttagtgaccctgttctcgccaggaggttgcgggaaaaccgttccctggccatgtctcgtctggatgaggtcatttcaaagtatgccatgctgcaagataagagtgaagaaggagaaaggaaaaagcgcagggcgagattacaaggcacgagcagtcattcagccgatacaccagaggcttcgctcgattcaggggaaggtccctctggaatggcatcgcaaggttgtccctcagcttctcgagctgagactgatgatgaggatgacgaggagagcgatgaggaagaggaggaggaggaggaggaagaagaggaggaggcaactgactcagaagaagaagaggacctggagcagatgcaggaaggccaagaggatgacgaagaagaggacgaggaggaagaggctgctgccggaaaagacggcgataagagccctatgagctcactgcaaatatctaacgaaaaaaatctggagcccggcaagcagatcagcaggtcttccggtgagcagcagaacaaaggcaggattgtctctcctagcctgctgtccgaggagcccctagccccttcctccatcgacgccgagagtaatggagagcagccagaagagctgaccctggaggaggaaagtccggtcagccagctgttcgagcttgagattgaagccttgcctctggataccccctccagtgtcgagacggatatttcatccagcaggaagcaatccgaagaaccatttaccacggtgctggaaaatggagctggtatggtgtcctctacatctttcaatggcggggtcagccctcataactggggtgacagcgggcctccatgcaagaaatcacggaaggaaaagaagcaaacgggtagtggccccttaggcaatagctatgtcgagagacaaaggagcgtccacgaaaagaatgggaagaagatctgtaccttgccatctccaccaagcccgctcgcttccctggcccccgtggccgatagtagtacccgcgtggatagcccaagccatggtcttgttacatctagtctctgcatcccttctcccgctaggttgtctcagacaccgcattcccaacccccccggcctggcacctgcaaaacaagcgtagctacccaatgcgaccctgaggaaatcattgtgctttcagacagtgattag

SEQ ID NO: 52921 - DNA, 1998 bp, Artificial Sequence
  derived and/or modified sequence
atgcagaccgccgaccaccccgaggtggtgcccttcctgtacaacagacagcagcgtgcacacagtctgttcctcgcctcggcagaattctgcaacatcttatctagagtactcagccgggccagatccaggcccgcgaaactctatgtgtatatcaatgaactgtgtacggtgcttaaagcacactctgcaaagaaaaagctgaacctggccccagcagcaacaactagcaatgaaccatcaggtaacaaccctcccactcacttaagcctcgaccccaccaacgctgaaaacaccgctagccagtcacctcgaacgaggggaagcagaagacagattcagcgactagaacagttgctggcactgtatgttgccgagatccgccgcttacaagagaaggagctggatctgtctgagctggacgatcctgatagcgcttacctgcaggaggcaagacttaagcgcaagctgatcaggttgttcgggaggctgtgtgagctcaaggactgttctagtctgacaggcagagtaattgaacagcggatcccttaccgcggtaccagatatcctgaggtcaaccgccgtatcgagcgattgatcaacaaacctggccctgatacattccctgattacggcgatgtgctgagagccgtggaaaaggccgctgctagacatagtctcgggttgcctcgccagcagttacagttgatggcccaggacgcctttagggacgtgggaattcgactccaggagcgaagacatctggacctgatttataacttcggatgtcatctgactgatgactacaggcctggagtggacccagccctaagcgacccagtgctggctcgccggctacgcgagaacagaagcctggccatgtctcgcttggatgaagtaatttcgaaatacgcgatgttacaagataagtccgaagagggggagcggaagaagcggagggccagactccagggaacctcttctcattcagcagacacaccagaggctagtctggatagtggagagggtccaagtggtatggccagtcaaggatgcccctcagcctcccgagctgaaacagatgatgaggatgacgaagaatcagatgaagaggaggaggaggaggaggaggaggaggaggaggaagcaacagactccgaagaggaggaggatctggaacagatgcaagagggacaagaggatgatgaggaagaggacgaagaggaggaagctgctgccggtaaggacggtgacaaatcaccaatgagcagtcttcaaatcagcaatgagaagaacctcgagcctgggaagcaaatttctagatcatccggcgaacagcagaataaggggcgcatcgtcagcccatcactgctttccgaggagcctttggctccctccagcatcgacgctgaatctaatggagaacagcctgaggaattaacactcgaggaggagtcgcctgtgagtcagttatttgagctcgagatcgaggctttgcccttggacacaccatcgtccgtggaaacagacattagcagcagcagaaaacagagcgaagagccattcacaacggttctggagaatggggccggcatggtttccagtaccagttttaatgggggggttagtccccataactggggagattctgggcccccctgcaagaaatcgcggaaggaaaaaaaacaaacaggaagtggaccactgggtaattcttacgtggagcgccagcggagcgtgcatgaaaagaacggtaagaaaatttgcactttaccctcccccccgagcccccttgccagcctcgcgccagtagcagactccagcactagagttgatagtccctctcatgggcttgtcacttcaagtttgtgcatcccgtcccctgcaaggctttcgcagaccccccatagtcagcctcccaggccagggacttgtaaaacttccgtcgccacacaatgtgaccccgaagagatcatcgttctgtcagattctgattag

SEQ ID NO: 52922 - DNA, 1998 bp, Artificial Sequence
  derived and/or modified sequence
atgcagaccgccgaccaccccgaggtggtgcccttcctgtacaaccggcagcaaagagcgcacagcctgttcttggcatccgcagagttctgcaacatcctgtctcgggtgctctcaagagcacgctcgagacccgcaaagctatatgtgtatatcaacgaactttgtaccgttctgaaggcccacagcgcaaaaaagaaactgaacctggccccagcagccacaacaagtaacgaaccttcaggaaacaatccccccactcatcttagtctggatccgactaatgcggaaaataccgcatcacagtctcccaggacccgaggtagtcgtaggcaaatccagaggctggaacaattacttgccctctatgtggccgaaattcgacgccttcaagagaaggaactcgaccttagtgaacttgatgaccctgactccgcctacctgcaagaagcccgcctcaaacgaaagttgatcagactgttcgggcgactctgtgagcttaaagattgttccagcctcacgggccgcgtgatagagcagcgcatcccctatcgagggacacgttacccagaggtgaaccgcagaattgagcggctgatcaataagcccggcccggataccttcccggattacggggatgtgctgcgggcagttgagaaggccgcggcacgacatagcctcggcctcccccggcaacagctgcagctgatggctcaggacgcctttagagacgtcgggatacgtttacaggagagacggcacctggacctgatttataactttggctgccatcttaccgacgactatcgcccaggcgtagaccctgctctttcagatccagtcctcgccaggagattgcgtgagaaccgctctttggctatgagccggttagacgaagtgatctcaaagtacgccatgcttcaagataaatccgaggagggggagagaaaaaagcggagagcgcgtctgcagggcacctcgtcacacagtgcagacacccccgaggcatctctcgatagcggggaaggccccagtggcatggcgtctcagggttgtccaagcgccagtcgagccgagactgatgacgaagatgacgaagagtcggacgaggaggaagaagaggaggaagaggaggaggaggaagaagccacagactccgaggaggaggaagacctggagcagatgcaagaaggacaggaggatgacgaggaggaggatgaagaggaggaggccgcagcaggcaaggacggggacaaatctcctatgtcttcgttacaaataagcaatgagaaaaatctggagcccggtaagcagatctccagatcttctggggagcagcagaataagggccggatcgtcagcccctcacttctctcagaagagccgctggctccaagcagcattgatgccgaaagtaacggtgagcagcccgaagagctgaccctggaagaggagtcccccgtgtcccagctcttcgagctcgaaattgaggcactgcctctggatacgccatcatccgtggaaaccgacattagctcctcacgaaaacaatctgaagagcctttcacaaccgtgctcgagaatggggctggaatggtgagctctaccagctttaatggcggcgtgagtccccataattggggcgatagcgggcccccttgtaagaaaagccgaaaggagaaaaaacagacaggaagcggaccactcgggaattcctatgttgaacgccagagatctgtccacgaaaagaacggtaaaaagatctgtacgctcccgtctccccctagtcccctggcttcccttgctcctgtagctgacagctctactagggttgattcaccatcacacggacttgttactagctccctttgtatcccatctcccgctaggctgagtcagaccccgcactcccagccacctcgccctggcacttgcaagacatccgtggctacacaatgcgatccagaagagatcattgtgctgtcagattctgattag

SEQ ID NO: 52923 - DNA, 1998 bp, Artificial Sequence
  derived and/or modified sequence
atgcagaccgccgaccaccccgaggtggtgcccttcctgtacaacagacagcagcgagcccactcgctgttcttggccagtgcagagttttgcaacatcctatcccgcgtcctgtctcgcgctaggagcagacctgccaagctgtacgtttacattaatgagctttgtactgtcctcaaagctcacagtgctaaaaaaaaactgaatcttgccccagctgccactaccagtaacgagccatctggcaataatcccccaactcatctgtcgctcgatccaaccaacgcagagaatactgccagccagtcgcccaggacacggggatcaagacggcagatccagagactggagcagctgctagctttgtatgttgccgagatccgtcgcctccaggaaaaggagcttgaccttagcgaactggatgaccccgactccgcatatctgcaagaagcacgcctgaagcggaagctcatcaggcttttcggccgtttgtgcgaattgaaagactgttcaagcctgactggacgagtcattgaacagaggattccctaccgggggacacgctatccagaagttaaccggcggattgagaggcttattaataaaccaggcccagacacgtttcccgactatggggacgtgctgcgagccgtggaaaaggctgctgcaaggcactccctgggtctccctagacaacagctacaacttatggcccaggatgcctttagggacgtcgggatacggttgcaggagaggagacatctcgaccttatctacaactttggatgccaccttacggacgattaccgacccggtgtggatccagcactttccgaccccgtgctcgcccgacggctacgcgaaaataggtccttggccatgagtagactggatgaggtgatctctaagtatgccatgctgcaagacaaatccgaagagggggagcgcaagaagcgcagagcgaggctgcagggcacaagtagccactcagccgacactcctgaagcgagcctagactctggcgaggggcctagcggcatggcttctcagggatgtccatccgcctctagagcagagacagacgacgaggacgatgaggagagcgatgaggaagaggaggaagaggaggaagaagaggaggaagaggccacagactccgaagaggaggaggaccttgaacaaatgcaggaagggcaagaagatgacgaggaagaggacgaggaagaggaggctgcagcgggaaaagatggggacaaatctcccatgtccagtctgcagatttccaacgaaaaaaaccttgagccaggcaagcagatctctcgctcctccggcgagcaacaaaacaaaggccgcatcgtttcaccatcgctcctctctgaagagccgctggccccgtcaagtattgatgcagagagcaacggggagcagcccgaggaactcacccttgaggaggagagccccgtgagtcagctgtttgagttagaaattgaggcgttacctttagacaccccctctagcgtggagacggatatttctagcagtcgcaaacagagcgaagagccttttacgacggtgctagagaatggtgccggaatggtgtctagcaccagctttaatggaggggttagtccacacaattggggagactcaggtcccccatgcaagaagagtaggaaagagaagaaacaaactgggtcaggtcccttaggcaactcatacgtcgaaagacagcgatccgtacacgagaagaatggcaagaagatctgtactctgccatctccaccttcaccgctggcaagcctggctccggtcgccgactcctctacgcgcgtcgattctccttctcatggcctggtaacttcctctctgtgtataccctcccctgccaggttgtctcagactccacattcccagccacctaggcccgggacttgtaagacctcggtggctacccagtgcgatcctgaggaaatcattgtgctgtctgattcagattag

SEQ ID NO: 52924 - DNA, 1998 bp, Artificial Sequence
  derived and/or modified sequence
atgcagaccgccgaccaccccgaggtggtgcccttcctgtacaaccgtcaacagagagcccactccctgttcctcgcttcggcggagttctgtaacatcttgagccgagtcctgtccagggctcggtcccgccccgcgaaactgtatgtgtacataaacgaactctgtactgttctgaaggctcactcagctaagaaaaaactgaacctcgcccccgcggccacgacttctaatgagccgagtggcaataatcctccaactcacttgagtctcgaccccaccaacgcagaaaacacggcctcccagtctcctagaactagagggtcccgccgccaaatacagcgtctcgagcagctgcttgccctgtacgtcgcagaaatcaggcgtcttcaggaaaaagagttagacctttccgagctcgacgacccagattccgcctacctgcaggaagcaagactgaagagaaaactcatcaggttatttgggagattgtgtgaactaaaggactgttcatcactcacagggagggtgattgaacagaggataccataccgcgggactcgctacccagaagtaaacagacggattgaaaggctcattaataagcctggtcctgacacattccctgactacggtgatgttctccgtgccgtggaaaaggccgctgcacgccactcacttgggctgcctcgacaacagctgcaactgatggctcaagacgcgtttagagatgtcgggataagactccaggaacgacgccatttggatctcatttataactttggttgtcatctcaccgatgactatcggcctggggtcgatcccgcccttagcgatcctgtgctcgcacgcaggctaagggagaatcgatctttggctatgagccgactcgatgaagtcatttctaaatacgccatgctccaggataagagtgaggagggggagaggaagaaacggagggccagactgcagggaacctcttcccacagcgccgacacccccgaggcaagcctggacagtggcgaaggccccagtggtatggcatctcagggatgcccaagcgcaagccgcgcggaaacggacgacgaggacgatgaagagagcgacgaggaagaggaagaagaagaagaggaagaagaggaagaagcaacagattccgaagaagaggaggatcttgaacagatgcaggagggtcaggaagatgatgaggaggaggatgaggaggaggaagcagccgcaggcaaggatggcgataaaagccctatgagttctctccaaatctctaacgagaaaaatctagaaccgggaaaacagatctctcggtcatccggcgagcagcaaaacaagggcaggattgtgagcccctccttactttcagaagaacctctggctccttcttcaattgacgcagaatcaaacggcgaacagccagaggagttaacattagaagaggagtcaccagtgtctcagctgttcgagctcgaaatcgaagcactccctctggacacccccagctctgtcgagactgacatttcctcttcccgtaaacagtccgaggagcccttcaccactgtccttgaaaatggcgctggcatggtgtcaagtacctcctttaatggtggcgtctcgccacacaactggggggacagcggacctccttgcaaaaaaagccggaaggaaaagaaacaaacaggaagtggacctttagggaactcatacgttgaacggcagagatctgtccatgagaaaaatggtaaaaagatctgtacactccctagccccccctcccccctagcttcactggctcctgttgcggacagttctacacgtgtggatagtccttctcacggattagtgacctcatctctctgtattccttctccggctcggctgtctcagaccccacattctcaacctccacgacccggaacttgcaaaacttccgtggctacccagtgcgaccctgaagaaattatcgtcctcagcgacagcgattag

SEQ ID NO: 52925 - DNA, 1998 bp, Artificial Sequence
  derived and/or modified sequence
atgcagaccgcggatcaccccgaggttgtgccatttctgtacaatcgccagcaacgggctcatagtctttttctagcctctgcagagttttgcaacatactatcccgggtgttgtcccgggcacggagtcgccctgccaaactatacgtgtatattaatgagctgtgtacagtgctgaaggcccactccgccaagaagaagctgaaccttgccccagccgcaaccaccagcaacgagccatctgggaataacccacctacacacctgtccctcgacccgactaatgccgaaaatactgcgagtcagagccctaggacccgcggtagtaggcgccagatccagcgattggaacagttgttagctctttatgtcgcagagattagacgactgcaggagaaagagctcgacctgtccgaattggacgatcctgacagcgcttacttgcaggaagcacgcctgaagagaaaactgatcagactttttgggagactgtgtgagttaaaagattgttcttcgctgactggcagagtcatagagcagcgaataccctacagaggaacgcgctatccagaagtgaacagaaggatcgagcggctgatcaacaagcccggacctgacacctttcccgattacggggacgtcctccgtgcagtggagaaagctgcagctcggcatagtctagggctgccacgccagcagctgcagttaatggctcaagatgcctttcgcgatgttgggattcggctccaggagcggcgacacttggatctaatatataattttggctgccatctaacagacgactaccgtccaggggttgacccggcattgtcggaccccgtactagctagacgcctgcgcgagaaccgctccctcgccatgtcccggctcgacgaggtaatcagcaaatatgcgatgctgcaggataaatcagaagaaggcgagcggaagaagcggcgtgcccgtctgcaggggacaagcagccactctgctgacactcccgaggcgagcctggatagcggggaaggcccttcagggatggcatcacagggctgtcccagcgcgagcagggcagaaactgatgacgaagacgatgaagaaagcgacgaagaggaagaggaagaggaggaggaagaggaggaggaagctactgattctgaggaagaggaagacttggagcagatgcaggagggacaggaagatgatgaagaggaagatgaagaggaagaggccgcagccggaaaggacggggataagagtccaatgtcatcacttcagatctccaatgaaaagaatctcgagcccggtaaacaaatcagccggtctagcggggagcagcagaataaggggcgtatcgtgagcccttcactgctgagcgaagagcccctcgcccctagctcaattgacgccgagtctaatggtgaacaaccagaagaactaaccctggaagaagagagtcctgtatctcaactcttcgaacttgagattgaggcattgccattggatactccttcctctgtggagactgacatatcttcatcccgtaagcagtctgaggaacccttcacaactgtcttggaaaatggagccggaatggtgagttccacatcgttcaacggcggtgtgagtcctcacaattggggcgatagtggcccaccctgcaagaaaagccgaaaagagaaaaaacagacaggcagcggaccgctgggcaactcctatgtggagcggcagcggtccgtccatgaaaaaaacggtaaaaagatttgcacgctcccttcacctccatccccactggcgtctctagccccagtggccgacagctccacaagggtcgactctccttcacacggactggtgaccagctccctgtgtatcccgagtcccgcaaggctttcacagacaccccattctcagcccccacggccaggcacatgtaaaactagcgtcgcgactcagtgtgatccagaagagatcattgtgctgagtgatagcgactag

SEQ ID NO: 52926 - DNA, 1998 bp, Artificial Sequence
  derived and/or modified sequence
atgcaaaccgccgatcaccccgaggttgtcccctttttgtacaatcgccagcagagggctcactcactcttcctcgcctcggctgaattttgcaacatacttagccgcgttctgtccagggccagatcccgacctgcgaaattgtacgtgtacattaacgaactttgcacagttctgaaggcacactccgcaaagaaaaaacttaacctagccccagccgcaacaacatccaacgagccctccggcaataatccccctacccatctcagcctggaccccacgaacgccgagaatacagcgtcgcagtctccacgcacccggggtagccggagacagattcagagattggagcagctgcttgccctctacgtagcagagatccgtcgccttcaggaaaaggagctggacctgtctgagcttgacgaccccgattcagcctatcttcaggaggcaaggctgaaacggaaactcataaggctgttcgggcgtctatgcgagctgaaagattgttcatctctcaccggaagagtgatcgaacagaggattccttaccgaggcactcgatatccagaggttaacaggcggatcgagcgcctcattaataaacccggacctgacactttcccagattacggggatgtactaagggctgtcgagaaggccgctgcccgtcacagcctgggcctccccaggcagcagctgcagctgatggcccaggacgccttcagggacgtcggcatccgcttgcaggaaaggagacacctggacttaatttacaactttggctgccatctcaccgacgattatcggcctggtgtggatccagcactgtcggaccccgtgctggcaaggcgccttcgcgaaaatcgcagcctcgctatgagccggctggacgaagtgatcagtaaatatgccatgctccaggacaagtcggaggaaggtgagaggaagaagagaagagcacgcttgcaaggaacgagtagccatagcgctgataccccagaggcttctttagactctggagaaggaccatctggcatggccagccagggctgtcctagcgccagcagagctgagacggatgatgaggacgatgaggagtctgatgaagaagaagaggaagaggaggaggaggaggaagaagaggccacagactccgaggaggaggaggacttggagcagatgcaggaaggtcaagaggatgatgaggaagaggacgaagaagaggaagccgcagcgggaaaagacggggataaatctcctatgagctccctgcagatcagcaatgagaagaacctggaaccaggtaaacagatttcgcggtctagtggcgagcagcagaataaagggaggatcgtttccccaagtctgctcagtgaggaaccactggctccgtcctccatcgacgcagagtctaatggcgagcaacccgaagagctaactttagaagaggaatcaccagttagccagctcttcgagctggagattgaagccctcccattggacaccccatcctccgtcgagactgacatcagtagttctcgaaagcagtccgaagaaccattcacaacggtactcgaaaatggcgcaggaatggtcagctccacaagctttaatggaggtgttagtccccacaactggggggattccggcccaccatgcaagaaaagtaggaaggaaaagaagcagaccgggtctggcccattagggaacagctacgtagagcgtcagaggtccgtgcacgaaaagaatggaaagaaaatctgtacgctgccttcgccacccagccccctggcttcactggcccctgtagccgattcttcaacccgggttgatagtccctcccatggcctcgtcacttcttccctctgcatccccagtccagctagactgagccagactcctcattctcagccacccaggcctggtacctgtaagacttccgtggccacccaatgcgaccccgaagaaattatcgtgctgagcgatagtgattag

SEQ ID NO: 52927 - DNA, 1998 bp, Artificial Sequence
  derived and/or modified sequence
atgcagacagctgaccaccctgaagtagtacccttcctctacaatagacagcagcgcgcacattcactctttctcgcttcagcagagttctgtaatatcttaagccgggtcctgagcagagcacgaagtcgcccagccaagctgtatgtgtacatcaatgagttgtgtacagttctgaaggcacattccgcaaagaagaagcttaatctggcccctgctgcaacaactagtaacgaaccctcaggtaacaaccctccaacccatctcagtctggatcctaccaacgccgagaacacagcaagccagtcaccccgaactagaggctctcgcaggcagattcagcgcctggaacagctactcgcactgtatgtggctgagatccggaggctgcaggaaaaagagttagatctgtcagaactcgatgatcctgactccgcgtatctgcaagaggctaggctcaaaaggaaactgatacgccttttcggcaggctctgcgagctcaaggactgttcctctcttactggcagggtaatagagcagaggatcccttaccgcggtaccagataccctgaggtgaacaggcgaatcgaaagattaattaacaagcccggaccagatactttccccgactacggcgacgtgctgagagccgtggagaaagccgctgcgaggcattcacttggattaccgagacagcaactgcagttaatggcccaagacgctttcagagatgtggggattcggctgcaggaaagaagacacctggacctgatatataatttcggatgtcacctgaccgacgattatcggcctggagtagacccagccttgtccgatcctgtccttgcacgcaggttaagggagaatcggagcctggctatgagtcggttggatgaggtcatttcaaagtatgccatgcttcaggacaagtccgaagaaggtgagaggaaaaagcggagagctcggctgcaaggaacaagttcacattctgctgacactcccgaagcctccctcgatagcggcgaagggccatcgggaatggcctcccagggttgcccctcagcttcccgggcagaaaccgatgatgaggatgatgaagagagcgatgaagaagaggaggaggaggaggaagaggaggaggaagaagcgaccgattctgaagaggaggaagacctcgagcagatgcaggagggacaggaggacgacgaggaggaggacgaggaggaagaggctgctgcgggtaaggatggagataaaagcccaatgtcctctcttcagatttctaatgagaaaaatttggagcctggcaaacaaatctctcggagtagtggggagcagcagaataaaggccgaatcgtgtcaccgagcctcctctcagaggaaccactagccccttcctctatcgatgccgaatctaacggcgagcaacctgaagagttgacattggaggaggagtcgcccgtcagccagctgttcgaacttgagatcgaggccctgcccctggacaccccatccagcgtggaaactgacatatcttcgtccaggaagcagtcagaagaaccttttacaacagtgttggagaatggtgccggtatggtgtcgtccaccagtttcaatggtggggtatcaccccacaactggggggattccggccctccctgcaagaagtcacgaaaggagaagaagcagacagggtccggaccattgggaaacagctatgtggaaagacagcgcagcgttcatgagaagaacgggaaaaagatctgtactctgccaagccctccttcaccactggcatcacttgctcccgtggccgattcctccaccagggtggacagtccctcccacgggcttgtgacctcgagcctgtgcattccatcgccagcacgtttaagccaaacccctcattcccagcctccaagacctggcacttgcaagaccagtgtggccacacaatgcgatcctgaagaaatcattgtgctgtcagactctgactag

SEQ ID NO: 52928 - DNA, 1998 bp, Artificial Sequence
  derived and/or modified sequence
atgcaaacagccgatcatccagaggtagtgccctttctttataaccggcagcaacgggcacatagtctgttcctggccagtgcagaattctgcaacattctaagccgggtgctgagtagagcaaggtcacgcccagccaaattatatgtctatatcaatgaactgtgcactgtgctgaaagcccattcagctaaaaagaagctgaacctagcaccagctgccactacatcaaatgagccctccggaaataatcctcccacacacctctcactcgaccctaccaatgctgagaacacggcgtctcaatctcccaggactagaggttcacgccgacagatccagcgactcgagcaactcctggccttgtacgttgcagagatccggcgtttgcaagaaaaggaactggacttaagtgagctcgacgacccggacagtgcctacctgcaggaggcccgactgaaacgcaagttaatcaggctttttggccgactgtgtgagctcaaggattgcagcagtctgaccggaagagttatcgaacagcggatcccgtaccggggtactagatatcccgaagtcaatcgcagaatcgagcgcctgattaacaagcctggccctgatacttttcctgattacggcgacgtcttacgagcagtcgaaaaagctgccgctcggcattccctcggactaccccgacagcagctccaactcatggctcaggatgcgtttcgagacgtgggcattaggctgcaagagcggaggcatctggatctgatttataatttcggttgtcacttgactgatgactacagaccgggtgtggatcccgctctgtcagacccggtcttagcacgacggctgagagaaaaccgatcccttgcaatgagccgacttgatgaggtcatttccaagtatgccatgctgcaagataagagtgaggagggagagagaaagaagaggcgggcaagactgcaaggaacatcctcacactctgctgatacccccgaagcctctttggacagtggcgagggtcccagtggaatggcctctcaaggttgccccagcgcctcccgagctgagacagatgatgaggatgatgaggagtcagatgaggaagaagaggaagaggaggaggaagaggaagaggaggccaccgattctgaagaggaagaggatctggagcagatgcaagaaggtcaagaggacgatgaggaggaagacgaggaggaagaggcagcggctggcaaagacggagacaagagccccatgagctccttacaaatctccaacgagaagaatcttgaacccggaaagcaaataagtagaagcagtggcgagcagcagaataaaggacggatagtatctcctagtctgctgtccgaagagcccctggcccctagtagcatcgacgctgagagtaatggggagcaaccggaagaattgacactggaagaggagagcccggtgagccagctgttcgagcttgagattgaggccctgcctctcgatactcctagttctgtggaaacagacatcagttcgtctcgcaagcagagtgaagagccctttaccaccgttctcgaaaacggtgctgggatggtgtcctcaacttcatttaatggaggcgtgagtcctcacaactggggtgattccggacccccttgcaaaaagagtcgcaaagagaaaaagcaaaccggttctggaccactgggcaatagctacgttgaaagacagagaagcgttcacgagaagaatggtaaaaagatatgcacccttccttcacccccaagtcctctcgccagtctcgccccagttgctgactctagtacacgggtagacagtccaagccatgggctggtcacatcttctctgtgtataccttccccggctcgcttgtctcagaccccccatagtcagcctcctagacccggaacctgcaaaactagtgtggctacccagtgcgacccggaagagatcattgtgctgagtgatagcgactag

SEQ ID NO: 52929 - DNA, 2615 bp, Artificial Sequence
  derived and/or modified sequence
gacaatatggcggcgcttagttgcatgaaggcggaaactctgtgacttccggtccgtagtggggcctgcggtgggagtgggaaggaaggcggagggaaccatgcgaggttctgagaattgcggcgagggtcgcctcgagagacggtttctgagcaggaattctgaaatccccaccacttcctccctccgggggatttgatcccctatggccaccgctaacagcatcatcgtgctggatgatgatgacgaagatgaagcagctgctcagccagggccctcccacccactccccaatgcggcctcacctggggcagaagcccctagctcctctgagcctcatggggccagaggaagcagtagttcgggcggcaagaaatgctacaagctggagaatgagaagctgttcgaagagttccttgaactttgtaagatgcagacagcagaccaccctgaggtggtcccattcctctataaccggcagcaacgtgcccactctctgtttttggcctcggcggagttctgcaacatcctctctagggtcctgtctcgggcccggagccggccagccaagctctatgtctacatcaatgagctctgcactgttctcaaggcccactcagccaaaaagaagctgaacttggcccctgccgccaccacctccaatgagccctctgggaataaccctcccacacacctctccttggaccccacaaatgctgaaaacactgcctctcagtctccaaggacccgtggttcccggcggcagatccagcgtttggagcagctgctggcgctctatgtggcagagatccggcggctgcaggaaaaggagttggatctctcagaattggatgacccagactccgcatacctgcaggaggcacggttgaagcgtaagctgatccgcctctttgggcgactatgtgagctgaaagactgctcttcactgaccggccgtgtcatagagcagcgcatcccctaccgtggcacccgctacccagaggttaacaggcgcattgagcggctcatcaacaagccagggcctgataccttccctgactatggggatgtgcttcgggctgtagagaaggcagctgcccgacacagccttggcctcccccgacagcagctccagctcatggctcaggatgccttccgagatgtgggcatcaggttacaggagcgacgtcacctcgatctcatctacaactttggctgccacctcacagatgactataggccaggcgttgaccctgcactatcagatcctgtgttggcccggcgccttcgggaaaaccggagtttggccatgagtcggctggatgaggtcatctccaaatacgcaatgttgcaagacaaaagtgaggagggcgagagaaaaaagagaagagctcggctccaaggcacctcttcccactctgcagacacccccgaagcctccttggattctggtgagggccctagtggaatggcatcccaggggtgcccttctgcctccagagctgagacagatgacgaagacgatgaggagagtgatgaggaagaggaggaggaggaggaagaagaagaggaggaggccacagattctgaagaggaggaggatctggaacagatgcaggagggtcaggaggatgatgaagaggaggacgaagaggaagaagcagcagcaggtaaagatggagacaagagccccatgtcctcactacagatctccaatgaaaagaacctggaacctggcaaacagatcagcagatcttcaggggagcagcaaaacaaaggacgcatagtgtcaccatcgttactgtcagaagaacccctggccccctccagcatagatgctgaaagcaatggagaacagcctgaggagctgaccctggaggaagaaagccctgtgtctcagctctttgagctagagattgaagctttgcccctggataccccttcctctgtggagacggacatttcctcttccaggaagcaatcagaggagcccttcaccactgtcttagagaatggagcaggcatggtctcttctacttccttcaatggaggcgtctctcctcacaactggggagattctggtcccccctgcaaaaaatctcggaaggagaagaagcaaacaggatcagggccattaggaaacagctatgtggaaaggcaaaggtcagtgcatgagaagaatgggaaaaagatatgtaccctgcccagcccaccttcccccttggcttccttggccccagttgctgattcctccacgagggtggactctcccagccatggcctggtgaccagctccctctgcatcccttctccagcccggctgtcccaaaccccccattcacagcctcctcggcctggtacttgcaagacaagtgtggccacacaatgcgatccagaagagatcatcgtgctctcagactctgattagctgcctccccttctccctgcctccagaatgttctgggataacatttggaggaaggtgggaagcagatgactgaggaagggatggactaagctaatccccttttggtggtgtttctttaaaaaaaaaaaaaaaagcttaagttttacacagaaacattaataaacaataaagttcttttcttactgta

SEQ ID NO: 52930 - DNA, 2614 bp, Artificial Sequence
  derived and/or modified sequence
gacaatatggcggcgcttagttgcatgaaggcggaaactctgtgacttccggtccgtagtggggcctgcggtgggagtgggaaggaaggcggagggaaccatgcgaggttctgagaattgcggcgagggtcgcctcgagagacggtttctgagcaggaattctgaaatccccaccacttcctccctccgggggatttgatcccctatggccaccgctaacagcatcatcgtgctggatgatgatgacgaagatgaagcagctgctcagccagggccctcccacccactccccaatgcggcctcacctggggcagaagcccctagctcctctgagcctcatggggccagaggaagcagtagttcgggcggcaagaaatgctacaagctggagaatgagaagctgttcgaagagttccttgaactttgtaagatgcagacagcagaccaccctgaggtggtcccattcctctataaccggcagcaacgtgcccactctctgtttttggcctcggcggagttctgcaacatcctctctagggtcctgtctcgggcccggagccggccagccaagctctatgtctacatcaatgagctctgcactgttctcaaggcccactcagccaaaaagaagctgaacttggcccctgccgccaccacctccaatgagccctctgggaataaccctcccacacacctctccttggaccccacaaatgctgaaaacactgcctctcagtctccaaggacccgtggttcccggcggcagatccagcgtttggagcagctgctggcgctctatgtggcagagatccggcggctgcaggaaaaggagttggatctctcagaattggatgacccagactccgcatacctgcaggaggcacggttgaagcgtaagctgatccgcctctttgggcgactatgtgagctgaaagactgctcttcactgaccggccgtgtcatagagcagcgcatcccctaccgtggcacccgctacccagaggttaacaggcgcattgagcggctcatcaacaagccagggcctgataccttccctgactatggggatgtgcttcgggctgtagagaaggcagctgcccgacacagccttggcctcccccgacagcagctccagctcatggctcaggatgccttccgagatgtgggcatcaggttacaggagcgacgtcacctcgatctcatctacaactttggctgccacctcacagatgactataggccaggcgttgaccctgcactatcagatcctgtgttggcccggcgccttcgggaaaaccggagtttggccatgagtcggctggatgaggtcatctccaaatatgcaatgttgcaagacaaaagtgaggagggcgagagaaaaaagagaagagctcggctccaaggcacctcttcccactctgcagacacccccgaagcctccttggattctggtgagggccctagtggaatggcatcccaggggtgcccttctgcctccagagctgagacagatgacgaagacgatgaggagagtgatgaggaagaggaggaggaggaggaagaagaagaggaggaggccacagattctgaagaggaggaggatctggaacagatgcaggagggtcaggaggatgatgaagaggaggacgaagaggaagaagcagcagcaggtaaagatggagacaagagccccatgtcctcactacagatctccaatgaaaagaacctggaacctggcaaacagatcagcagatcttcaggggagcagcaaaacaaaggacgcatagtgtcaccatcgttactgtcagaagaacccctggccccctccagcatagatgctgaaagcaatggagaacagcctgaggagctgaccctggaggaagaaagccctgtgtctcagctctttgagctagagattgaagctttgcccctggataccccttcctctgtggagacggacatttcctcttccaggaagcaatcagaggagcccttcaccactgtcttagagaatggagcaggcatggtctcttctacttccttcaatggaggcgtctctcctcacaactggggagattctggtcccccctgcaaaaaatctcggaaggagaagaagcaaacaggatcagggccattaggaaacagctatgtggaaaggcaaaggtcagtgcatgagaagaatgggaaaaagatatgtaccctgcccagcccaccttcccccttggcttccttggccccagttgctgattcctccacgagggtggactctcccagccatggcctggtgaccagctccctctgcatcccttctccagcccggctgtcccaaaccccccattcacagcctcctcggcctggtacttgcaagacaagtgtggccacacaatgcgatccagaagagatcatcgtgctctcagactctgattagctgcctccccttctccctgcctccagaatgttctgggataacatttggaggaaggtgggaagcagatgactgaggaagggatggactaagctaatccccttttggtggtgtttctttaaaaaaaaaaaaaaagcttaagttttacacagaaacattaataaacaataaagttcttttcttactgta

SEQ ID NO: 52931 - DNA, 2608 bp, Artificial Sequence
  derived and/or modified sequence
atatggcggcgcttagttgcatgaaggcggaaactctgtgacttccggtccgtagtggggcctgcggtgggagtgggaaggaaggcggagggaaccatgcgaggttctgagaattgcggcgagggtcgcctcgagagacggtttctgaggaattctgaaatccccaccacttcctccctccgggggatttgatcccctatggccaccgctaacagcatcatcgtgctggatgatgatgacgaagatgaagcagctgctcagccagggccctcccacccactccccaatgcggcctcacctggggcagaagcccctagctcctctgagcctcatggggccagaggaagcagtagttcgggcggcaagaaatgctacaagctggagaatgagaagctgttcgaagagttccttgaactttgtaagatgcagacagcagaccaccctgaggtggtcccattcctctataaccggcagcaacgtgcccactctctgtttttggcctcggcggagttctgcaacatcctctctagggtcctgtctcgggcccggagccggccagccaagctctatgtctacatcaatgagctctgcactgttctcaaggcccactcagccaaaaagaagctgaacttggcccctgccgccaccacctccaatgagccctctgggaataaccctcccacacacctctccttggaccccacaaatgctgaaaacactgcctctcagtctccaaggacccgtggttcccggcggcagatccagcgtttggagcagctgctggcgctctatgtggcagagatccggcggctgcaggaaaaggagttggatctctcagaattggatgacccagactccgcatacctgcaggaggcacggttgaagcgtaagctgatccgcctctttgggcgactatgtgagctgaaagactgctcttcactgaccggccgtgtcatagagcagcgcatcccctaccgtggcacccgctacccagaggttaacaggcgcattgagcggctcatcaacaagccagggcctgataccttccctgactatggggatgtgcttcgggctgtagagaaggcagctgcccgacacagccttggcctcccccgacagcagctccagctcatggctcaggatgccttccgagatgtgggcatcaggttacaggagcgacgtcacctcgatctcatctacaactttggctgccacctcacagatgactataggccaggcgttgaccctgcactatcagatcctgtgttggcccggcgccttcgggaaaaccggagtttggccatgagtcggctggatgaggtcatctccaaatacgcaatgttgcaagacaaaagtgaggagggcgagagaaaaaagagaagagctcggctccaaggcacctcttcccactctgcagacacccccgaagcctccttggattctggtgagggccctagtggaatggcatcccaggggtgcccttctgcctccagagctgagacagatgacgaagacgatgaggagagtgatgaggaagaggaggaggaggaggaagaagaagaggaggaggccacagattctgaagaggaggaggatctggaacagatgcaggagggtcaggaggatgatgaagaggaggacgaagaggaagaagcagcagcaggtaaagatggagacaagagccccatgtcctcactacagatctccaatgaaaagaacctggaacctggcaaacagatcagcagatcttcaggggagcagcaaaacaaaggacgcatagtgtcaccatcgttactgtcagaagaacccctggccccctccagcatagatgctgaaagcaatggagaacagcctgaggagctgaccctggaggaagaaagccctgtgtctcagctctttgagctagagattgaagctttgcccctggataccccttcctctgtggagacggacatttcctcttccaggaagcaatcagaggagcccttcaccactgtcttagagaatggagcaggcatggtctcttctacttccttcaatggaggcgtctctcctcacaactggggagattctggtcccccctgcaaaaaatctcggaaggagaagaagcaaacaggatcagggccattaggaaacagctatgtggaaaggcaaaggtcagtgcatgagaagaatgggaaaaagatatgtaccctgcccagcccaccttcccccttggcttccttggccccagttgctgattcctccacgagggtggactctcccagccatggcctggtgaccagctccctctgcatcccttctccagcccggctgtcccaaaccccccattcacagcctcctcggcctggtacttgcaagacaagtgtggccacacaatgcgatccagaagagatcatcgtgctctcagactctgattagctgcctccccttctccctgcctccagaatgttctgggataacatttggaggaaggtgggaagcagatgactgaggaagggatggactaagctaatccccttttggtggtgtttctttaaaaaaaaaaaaaaaagcttaagttttacacagaaacattaataaacaataaagttcttttcttactgta

SEQ ID NO: 52932 - DNA, 2607 bp, Artificial Sequence
  derived and/or modified sequence
atatggcggcgcttagttgcatgaaggcggaaactctgtgacttccggtccgtagtggggcctgcggtgggagtgggaaggaaggcggagggaaccatgcgaggttctgagaattgcggcgagggtcgcctcgagagacggtttctgaggaattctgaaatccccaccacttcctccctccgggggatttgatcccctatggccaccgctaacagcatcatcgtgctggatgatgatgacgaagatgaagcagctgctcagccagggccctcccacccactccccaatgcggcctcacctggggcagaagcccctagctcctctgagcctcatggggccagaggaagcagtagttcgggcggcaagaaatgctacaagctggagaatgagaagctgttcgaagagttccttgaactttgtaagatgcagacagcagaccaccctgaggtggtcccattcctctataaccggcagcaacgtgcccactctctgtttttggcctcggcggagttctgcaacatcctctctagggtcctgtctcgggcccggagccggccagccaagctctatgtctacatcaatgagctctgcactgttctcaaggcccactcagccaaaaagaagctgaacttggcccctgccgccaccacctccaatgagccctctgggaataaccctcccacacacctctccttggaccccacaaatgctgaaaacactgcctctcagtctccaaggacccgtggttcccggcggcagatccagcgtttggagcagctgctggcgctctatgtggcagagatccggcggctgcaggaaaaggagttggatctctcagaattggatgacccagactccgcatacctgcaggaggcacggttgaagcgtaagctgatccgcctctttgggcgactatgtgagctgaaagactgctcttcactgaccggccgtgtcatagagcagcgcatcccctaccgtggcacccgctacccagaggttaacaggcgcattgagcggctcatcaacaagccagggcctgataccttccctgactatggggatgtgcttcgggctgtagagaaggcagctgcccgacacagccttggcctcccccgacagcagctccagctcatggctcaggatgccttccgagatgtgggcatcaggttacaggagcgacgtcacctcgatctcatctacaactttggctgccacctcacagatgactataggccaggcgttgaccctgcactatcagatcctgtgttggcccggcgccttcgggaaaaccggagtttggccatgagtcggctggatgaggtcatctccaaatatgcaatgttgcaagacaaaagtgaggagggcgagagaaaaaagagaagagctcggctccaaggcacctcttcccactctgcagacacccccgaagcctccttggattctggtgagggccctagtggaatggcatcccaggggtgcccttctgcctccagagctgagacagatgacgaagacgatgaggagagtgatgaggaagaggaggaggaggaggaagaagaagaggaggaggccacagattctgaagaggaggaggatctggaacagatgcaggagggtcaggaggatgatgaagaggaggacgaagaggaagaagcagcagcaggtaaagatggagacaagagccccatgtcctcactacagatctccaatgaaaagaacctggaacctggcaaacagatcagcagatcttcaggggagcagcaaaacaaaggacgcatagtgtcaccatcgttactgtcagaagaacccctggccccctccagcatagatgctgaaagcaatggagaacagcctgaggagctgaccctggaggaagaaagccctgtgtctcagctctttgagctagagattgaagctttgcccctggataccccttcctctgtggagacggacatttcctcttccaggaagcaatcagaggagcccttcaccactgtcttagagaatggagcaggcatggtctcttctacttccttcaatggaggcgtctctcctcacaactggggagattctggtcccccctgcaaaaaatctcggaaggagaagaagcaaacaggatcagggccattaggaaacagctatgtggaaaggcaaaggtcagtgcatgagaagaatgggaaaaagatatgtaccctgcccagcccaccttcccccttggcttccttggccccagttgctgattcctccacgagggtggactctcccagccatggcctggtgaccagctccctctgcatcccttctccagcccggctgtcccaaaccccccattcacagcctcctcggcctggtacttgcaagacaagtgtggccacacaatgcgatccagaagagatcatcgtgctctcagactctgattagctgcctccccttctccctgcctccagaatgttctgggataacatttggaggaaggtgggaagcagatgactgaggaagggatggactaagctaatccccttttggtggtgtttctttaaaaaaaaaaaaaaagcttaagttttacacagaaacattaataaacaataaagttcttttcttactgta

SEQ ID NO: 52933 - DNA, 2522 bp, Artificial Sequence
  derived and/or modified sequence
ggcggagggaaccatgcgaggttctgagaattgcggcgagggtcgcctcgagagacggtttctgaggaattctgaaatccccaccacttcctccctccgggggatttgatcccctatggccaccgctaacagcatcatcgtgctggatgatgatgacgaagatgaagcagctgctcagccagggccctcccacccactccccaatgcggcctcacctggggcagaagcccctagctcctctgagcctcatggggccagaggaagcagtagttcgggcggcaagaaatgctacaagctggagaatgagaagctgttcgaagagttccttgaactttgtaagatgcagacagcagaccaccctgaggtggtcccattcctctataaccggcagcaacgtgcccactctctgtttttggcctcggcggagttctgcaacatcctctctagggtcctgtctcgggcccggagccggccagccaagctctatgtctacatcaatgagctctgcactgttctcaaggcccactcagccaaaaagaagctgaacttggcccctgccgccaccacctccaatgagccctctgggaataaccctcccacacacctctccttggaccccacaaatgctgaaaacactgcctctcagtctccaaggacccgtggttcccggcggcagatccagcgtttggagcagctgctggcgctctatgtggcagagatccggcggctgcaggaaaaggagttggatctctcagaattggatgacccagactccgcatacctgcaggaggcacggttgaagcgtaagctgatccgcctctttgggcgactatgtgagctgaaagactgctcttcactgaccggccgtgtcatagagcagcgcatcccctaccgtggcacccgctacccagaggttaacaggcgcattgagcggctcatcaacaagccagggcctgataccttccctgactatggggatgtgcttcgggctgtagagaaggcagctgcccgacacagccttggcctcccccgacagcagctccagctcatggctcaggatgccttccgagatgtgggcatcaggttacaggagcgacgtcacctcgatctcatctacaactttggctgccacctcacagatgactataggccaggcgttgaccctgcactatcagatcctgtgttggcccggcgccttcgggaaaaccggagtttggccatgagtcggctggatgaggtcatctccaaatatgcaatgttgcaagacaaaagtgaggagggcgagagaaaaaagagaagagctcggctccaaggcacctcttcccactctgcagacacccccgaagcctccttggattctggtgagggccctagtggaatggcatcccaggggtgcccttctgcctccagagctgagacagatgacgaagacgatgaggagagtgatgaggaagaggaggaggaggaggaagaagaagaggaggaggccacagattctgaagaggaggaggatctggaacagatgcaggagggtcaggaggatgatgaagaggaggacgaagaggaagaagcagcagcaggtaaagatggagacaagagccccatgtcctcactacagatctccaatgaaaagaacctggaacctggcaaacagatcagcagatcttcaggggagcagcaaaacaaaggacgcatagtgtcaccatcgttactgtcagaagaacccctggccccctccagcatagatgctgaaagcaatggagaacagcctgaggagctgaccctggaggaagaaagccctgtgtctcagctctttgagctagagattgaagctttgcccctggataccccttcctctgtggagacggacatttcctcttccaggaagcaatcagaggagcccttcaccactgtcttagagaatggagcaggcatggtctcttctacttccttcaatggaggcgtctctcctcacaactggggagattctggtcccccctgcaaaaaatctcggaaggagaagaagcaaacaggatcagggccattaggaaacagctatgtggaaaggcaaaggtcagtgcatgagaagaatgggaaaaagatatgtaccctgcccagcccaccttcccccttggcttccttggccccagttgctgattcctccacgagggtggactctcccagccatggcctggtgaccagctccctctgcatcccttctccagcccggctgtcccaaaccccccattcacagcctcctcggcctggtacttgcaagacaagtgtggccacacaatgcgatccagaagagatcatcgtgctctcagactctgattagctgcctccccttctccctgcctccagaatgttctgggataacatttggaggaaggtgggaagcagatgactgaggaagggatggactaagctaatccccttttggtggtgtttctttaaaaaaaaaaaaagcttaagttttacacagaaacattaataaacaataaagttcttttcttactgta

SEQ ID NO: 52934 - DNA, 2545 bp, Artificial Sequence
  derived and/or modified sequence
gcggtgggagtgggaaggaaggcggagggaaccatgcgaggttctgagaattgcggcgagggtcgcctcgagagacggtttctgagcaggaattctgaaatccccaccacttcctccctccgggggatttgatcccctatggccaccgctaacagcatcatcgtgctggatgatgatgacgaagatgaagcagctgctcagccagggccctcccacccactccccaatgcggcctcacctggggcagaagcccctagctcctctgagcctcatggggccagaggaagcagtagttcgggcggcaagaaatgctacaagctggagaatgagaagctgttcgaagagttccttgaactttgtaagatgcagacagcagaccaccctgaggtggtcccattcctctataaccggcagcaacgtgcccactctctgtttttggcctcggcggagttctgcaacatcctctctagggtcctgtctcgggcccggagccggccagccaagctctatgtctacatcaatgagctctgcactgttctcaaggcccactcagccaaaaagaagctgaacttggcccctgccgccaccacctccaatgagccctctgggaataaccctcccacacacctctccttggaccccacaaatgctgaaaacactgcctctcagtctccaaggacccgtggttcccggcggcagatccagcgtttggagcagctgctggcgctctatgtggcagagatccggcggctgcaggaaaaggagttggatctctcagaattggatgacccagactccgcatacctgcaggaggcacggttgaagcgtaagctgatccgcctctttgggcgactatgtgagctgaaagactgctcttcactgaccggccgtgtcatagagcagcgcatcccctaccgtggcacccgctacccagaggttaacaggcgcattgagcggctcatcaacaagccagggcctgataccttccctgactatggggatgtgcttcgggctgtagagaaggcagctgcccgacacagccttggcctcccccgacagcagctccagctcatggctcaggatgccttccgagatgtgggcatcaggttacaggagcgacgtcacctcgatctcatctacaactttggctgccacctcacagatgactataggccaggcgttgaccctgcactatcagatcctgtgttggcccggcgccttcgggaaaaccggagtttggccatgagtcggctggatgaggtcatctccaaatatgcaatgttgcaagacaaaagtgaggagggcgagagaaaaaagagaagagctcggctccaaggcacctcttcccactctgcagacacccccgaagcctccttggattctggtgagggccctagtggaatggcatcccaggggtgcccttctgcctccagagctgagacagatgacgaagacgatgaggagagtgatgaggaagaggaggaggaggaggaagaagaagaggaggaggccacagattctgaagaggaggaggatctggaacagatgcaggagggtcaggaggatgatgaagaggaggacgaagaggaagaagcagcagcaggtaaagatggagacaagagccccatgtcctcactacagatctccaatgaaaagaacctggaacctggcaaacagatcagcagatcttcaggggagcagcaaaacaaaggacgcatagtgtcaccatcgttactgtcagaagaacccctggccccctccagcatagatgctgaaagcaatggagaacagcctgaggagctgaccctggaggaagaaagccctgtgtctcagctctttgagctagagattgaagctttgcccctggataccccttcctctgtggagacggacatttcctcttccaggaagcaatcagaggagcccttcaccactgtcttagagaatggagcaggcatggtctcttctacttccttcaatggaggcgtctctcctcacaactggggagattctggtcccccctgcaaaaaatctcggaaggagaagaagcaaacaggatcagggccattaggaaacagctatgtggaaaggcaaaggtcagtgcatgagaagaatgggaaaaagatatgtaccctgcccagcccaccttcccccttggcttccttggccccagttgctgattcctccacgagggtggactctcccagccatggcctggtgaccagctccctctgcatcccttctccagcccggctgtcccaaaccccccattcacagcctcctcggcctggtacttgcaagacaagtgtggccacacaatgcgatccagaagagatcatcgtgctctcagactctgattagctgcctccccttctccctgcctccagaatgttctgggataacatttggaggaaggtgggaagcagatgactgaggaagggatggactaagctaatccccttttggtggtgtttctttaaaaaaaaaaaaagcttaagttttacacagaaacattaataaacaataaagttcttttcttactgta

SEQ ID NO: 52935 - DNA, 2152 bp, Artificial Sequence
  derived and/or modified sequence
gtgacttccggtccgtagtggggcctgcggtgggagtgggaaggaaggcggagggaaccatgcgaggttctgagaattgcggcgagggtcgcctcgagagacggtttctgagttccttgaactttgtaagatgcagacagcagaccaccctgaggtggtcccattcctctataaccggcagcaacgtgcccactctctgtttttggcctcggcggagttctgcaacatcctctctagggtcctgtctcgggcccggagccggccagccaagctctatgtctacatcaatgagctctgcactgttctcaaggcccactcagccaaaaagaagctgaacttggcccctgccgccaccacctccaatgagccctctgggaataaccctcccacacacctctccttggaccccacaaatgctgaaaacactgcctctcagtctccaaggacccgtggttcccggcggcagatccagcgtttggagcagctgctggcgctctatgtggcagagatccggcggctgcaggaaaaggagttggatctctcagaattggatgacccagactccgcatacctgcaggaggcacggttgaagcgtaagctgatccgcctctttgggcgactatgtgagctgaaagactgctcttcactgaccggccgtgtcatagagcagcgcatcccctaccgtggcacccgctacccagaggttaacaggcgcattgagcggctcatcaacaagccagggcctgataccttccctgactatggggatgtgcttcgggctgtagagaaggcagctgcccgacacagccttggcctcccccgacagcagctccagctcatggctcaggatgccttccgagatgtgggcatcaggttacaggagcgacgtcacctcgatctcatctacaactttggctgccacctcacagatgactataggccaggcgttgaccctgcactatcagatcctgtgttggcccggcgccttcgggaaaaccggagtttggccatgagtcggctggatgaggtcatctccaaatacgcaatgttgcaagacaaaagtgaggagggcgagagaaaaaagagaagagctcggctccaaggcacctcttcccactctgcagacacccccgaagcctccttggattctggtgagggccctagtggaatggcatcccaggggtgcccttctgcctccagagctgagacagatgacgaagacgatgaggagagtgatgaggaagaggaggaggaggaggaagaagaagaggaggaggccacagattctgaagaggaggaggatctggaacagatgcaggagggtcaggaggatgatgaagaggaggacgaagaggaagaagcagcagcaggtaaagatggagacaagagccccatgtcctcactacagatctccaatgaaaagaacctggaacctggcaaacagatcagcagatcttcaggggagcagcaaaacaaaggacgcatagtgtcaccatcgttactgtcagaagaacccctggccccctccagcatagatgctgaaagcaatggagaacagcctgaggagctgaccctggaggaagaaagccctgtgtctcagctctttgagctagagattgaagctttgcccctggataccccttcctctgtggagacggacatttcctcttccaggaagcaatcagaggagcccttcaccactgtcttagagaatggagcaggcatggtctcttctacttccttcaatggaggcgtctctcctcacaactggggagattctggtcccccctgcaaaaaatctcggaaggagaagaagcaaacaggatcagggccattaggaaacagctatgtggaaaggcaaaggtcagtgcatgagaagaatgggaaaaagatatgtaccctgcccagcccaccttcccccttggcttccttggccccagttgctgattcctccacgagggtggactctcccagccatggcctggtgaccagctccctctgcatcccttctccagcccggctgtcccaaaccccccattcacagcctcctcggcctggtacttgcaagacaagtgtggccacacaatgcgatccagaagagatcatcgtgctctcagactctgattagctgcctccccttctccctgcctcc

SEQ ID NO: 52936 - protein, 165 aa, Artificial Sequence
  derived and/or modified sequence
MRVAALISGGKDSCYNMMQCIAAGHQIVALANLRPAENQVGSDELDSYMYQTVGHHAIDLYAEAMALPLYRRTIRGRSLDTRQVYTKCEGDEVEDLYELLKLVKGITRMTLLAEYDALNLQDFHMHLKVGSQAIVYRTPNELCTHSKFDKHTFPPFISEIAKCEV

SEQ ID NO: 52937 - DNA, 498 bp, Artificial Sequence
  derived and/or modified sequence
atgagagtggccgccctgatcagcggcggcaaggacagctgctacaacatgatgcagtgcatcgccgccggccaccagatcgtggccctggccaacctgagacccgccgagaaccaggtgggcagcgacgagctggacagctacatgtaccagaccgtgggccaccacgccatcgacctgtacgccgaggccatggccctgcccctgtacagaagaaccatcagaggcagaagcctggacaccagacaggtgtacaccaagtgcgagggcgacgaggtggaggacctgtacgagctgctgaagctggtgaagggcatcaccagaatgaccctgctggccgagtacgacgccctgaacctgcaggacttccacatgcacctgaaggtgggcagccaggccatcgtgtacagaacccccaacgagctgtgcacccacagcaagttcgacaagcacaccttcccccccttcatcagcgagatcgccaagtgcgaggtgtag

SEQ ID NO: 52938 - DNA, 498 bp, Artificial Sequence
  derived and/or modified sequence
atgcgcgtggctgccctgatctccggcggcaaggactcctgttataacatgatgcagtgtatcgccgcgggacaccagattgtcgctttagccaatttgaggcctgccgagaaccaggttggcagcgacgaacttgattcatatatgtatcaaacagttggacaccacgctattgatctgtacgcagaagctatggcgctgcccctgtatcggcgtactattcgcggacggtctctggacacaagacaggtgtataccaagtgcgaaggcgatgaagttgaagacctctacgagctcctaaaattggtgaagggcattacaagaatgaccctgctggccgagtacgatgcccttaaccttcaggactttcacatgcacctgaaagtgggtagtcaggcaattgtatacagaaccccaaacgagctttgcactcactcaaagttcgacaagcacacgtttcctcccttcattagtgaaattgccaagtgcgaggtttag

SEQ ID NO: 52939 - DNA, 498 bp, Artificial Sequence
  derived and/or modified sequence
atgagggtggccgccctgatcagcggcggcaaggacagctgctacaacatgatgcagtgcatcgctgctggccaccagatcgtggccctggccaacctgcggcctgctgagaaccaggtgggcagtgatgagctggacagctacatgtaccagacagtgggccaccacgccatcgacctgtatgcagaggccatggccctgcccctgtacagaaggaccatccggggccgcagcctggacacccggcaggtgtacaccaagtgtgaaggagatgaggtggaggacctgtatgagctgctgaagctggtgaagggcatcaccaggatgaccctgctggccgagtatgatgccctgaacctgcaggacttccacatgcacctgaaggtgggcagccaggccatcgtgtaccgcaccccaaatgagctgtgcacccacagcaagtttgacaagcacaccttcccccccttcatcagcgagatcgccaagtgtgaggtgtag

SEQ ID NO: 52940 - DNA, 498 bp, Artificial Sequence
  derived and/or modified sequence
atgcgggtggccgccctgatcagcggcggcaaggacagctgctacaatatgatgcaatgtatagccgctggccaccagatcgtggcactggcaaatctacgcccagccgaaaaccaagtgggaagtgacgagctggacagctatatgtaccagacggtgggacatcatgccatcgacctgtacgcagaggccatggccttgccattataccgcaggacgatccgaggaagaagtttggacactcggcaagtttacactaaatgtgagggcgatgaggttgaggatttgtacgagctgctgaaactggtgaaaggtataacacgtatgactctcctcgccgaatatgacgccctgaacttacaggattttcatatgcacttaaaagtcgggtcacaggcgattgtttacagaacacctaatgagctctgtacacactccaagttcgacaagcatacttttcctccgttcatctctgagattgcgaaatgcgaggtgtag

SEQ ID NO: 52941 - DNA, 498 bp, Artificial Sequence
  derived and/or modified sequence
atgagggtggctgctttaatttcagggggaaaggactcatgttataacatgatgcagtgcattgctgccggtcaccagatagtggcgctcgctaacctgaggcctgcggagaatcaagtgggcagtgacgaactggatagttatatgtaccaaaccgttggccaccatgctatcgacctgtatgccgaggcaatggctctcccactctatcgacggacaatccggggaagaagtttggatacaaggcaagtgtacactaagtgtgagggtgatgaggtcgaggacctctatgagcttcttaagttagtgaagggcattacacggatgaccctgcttgccgagtatgatgccctgaacttgcaggattttcatatgcatctgaaagttggatcgcaggctattgtgtataggaccccaaacgagctgtgtactcatagcaagttcgataagcatacctttccacctttcattagcgaaatagctaaatgtgaggtctag

SEQ ID NO: 52942 - DNA, 2369 bp, Artificial Sequence
  derived and/or modified sequence
acctcctggctcccgcccgcgctcgccgcacgcacgcgcactgcgcccagcatgagggtcgcggctctgatcagtggtgggaaggacagctgctataatatgatgcagtgcattgctgctgggcatcagatcgttgctttagcaaatctaagaccagctgaaaaccaagtggggtctgatgaactggatagctacatgtatcagacagtggggcaccatgccattgacttgtatgcagaagcaatggctcttcccctctatcgccgaaccataagaggaaggagcttggatacaagacaagtgtacaccaaatgtgaaggtgatgaggttgaagatctctatgagcttttgaaacttgttaagggcatcactagaatgaccttgcttgctgaatatgatgctctgaatctccaagattttcacatgcatttgaaagtgggcagccaggcgattgtttacaggactccaaatgaactgtgcactcacagcaagtttgataaacacacatttcctccttttatcagtgagattgcaaaatgtgaagtatgagtttccagttttactgattcccctcaacccttttcctgtttaaaaacttagacatactaattggatgctgatctgtccctgtttttcattctgcttgctggtagttgacggcttagtttagtacttacctaggcaagatttggcaaaccttcaaaaatgaactttccatgtattcaacttaaaggagattcatcccaaggaatgtaatgtgaacactaattaacattaatgactgctaatcactttgctttttatactcctttaggagcactgctattatccaatgtagttaagtaaaatgcttgtatatgaatcaacaatgttgcatccttttagcagctattgctcacaatcaagctttgcataaattaaagttgactaaaattgattttaatatgctgctcttcttcaatagtaaactaaaatatctagttaaatatcctgcatattaaaaatacattgcctgattttttttgtagtcatcctgtggtagatgaaaagcaatattgcaaatacattttctcacagttcatgacactttctcttagatttcttcaaaattgaacacaactcttcatagtcctatcagcactttgattctgttgtaagcattaattttgttagatcaatgaaaagcaatcagcctatgtttaatttttctgaatttgttcatttacttcctagaggatcttacagattctttagatgatatagtctatttatataaagttggttcataggattgtacattcaacattcattaaaaaaggttgtttattatgtttagtgaattacaggaccattataaaagctttctgtttatttacatgcattcaatgtacctgtgactagaactgccttgccttaggaggaaactaagcaaaacccataaattaataatttaagggagcaatactcaagtagcatttcagttaaaaagtaaagcctcagagtcagtactagccactttagcattgctttactttttgacttttattggctgaaaataacttgttaaactggagcttttgtaataaaatgaaatctacataccatctaaagccccttcccctccttttgatttatgagtaggttgacatattactggagaatttgtaacactttcacagttctgcactttgatttcagagaaggtgctaatctctctggaattttgagagtgacaaaatgagttgtatactgtttttccagggaatttgggttcctttattagaggccttagttttattatggtacctgtattaatgtggatttatccaatatgtgatatggtggtatgattagatatacattaatggaggatttttttttcattgtacatattctacttggtttgatcatattataattctcacagctaatgtccatgtttctacagaggttcagcaattcaggatattattttcaaattaccaaaatgagataatttaactcccttttacttttgcattatttttagtggaaaaaaattaaatggtagtattataagaagctttatgctgtgtatgctagtcttattgtatatatgtactgaaagtacctttgacactgtacttaattggatttaatttcaaagaattgtaacaggaattatgtgagagaatagaaaatatatggaacttaattaagtgctgtccatatgtaaaggtaagattcatgactattgtttgatgtaacttatttattttacatcctgatactgttgtataatagcacaaaatgcatgtctatgaggaaaaacttgctttttctattttactttgagtttttatgtgtaataaaattatgcttaaaatagg

SEQ ID NO: 52943 - protein, 1975 aa, Artificial Sequence
  derived and/or modified sequence
MPGEQMDPTGSQLDSDFSQQDTPCLIIEDSQPESQVLEDDSGSHFSMLSRHLPNLQTHKENPVLDVVSNPEQTAGEERGDGNSGFNEHLKENKVADPVDSSNLDTCGSISQVIEQLPQPNRTSSVLGMSVESAPAVEEEKGEELEQKEKEKEEDTSGNTTHSLGAEDTASSQLGFGVLELSQSQDVEENTVPYEVDKEQLQSVTTNSGYTRLSDVDANTAIKHEEQSNEDIPIAEQSSKDIPVTAQPSKDVHVVKEQNPPPARSEDMPFSPKASVAAMEAKEQLSAQELMESGLQIQKSPEPEVLSTQEDLFDQSNKTVSSDGCSTPSREEGGCSLASTPATTLHLLQLSGQRSLVQDSLSTNSSDLVAPSPDAFRSTPFIVPSSPTEQEGRQDKPMDTSVLSEEGGEPFQKKLQSGEPVELENPPLLPESTVSPQASTPISQSTPVFPPGSLPIPSQPQFSHDIFIPSPSLEEQSNDGKKDGDMHSSSLTVECSKTSEIEPKNSPEDLGLSLTGDSCKLMLSTSEYSQSPKMESLSSHRIDEDGENTQIEDTEPMSPVLNSKFVPAENDSILMNPAQDGEVQLSQNDDKTKGDDTDTRDDISILATGCKGREETVAEDVCIDLTCDSGSQAVPSPATRSEALSSVLDQEEAMEIKEHHPEEGSSGSEVEEIPETPCESQGEELKEENMESVPLHLSLTETQSQGLCLQKEMPKKECSEAMEVETSVISIDSPQKLAILDQELEHKEQEAWEEATSEDSSVVIVDVKEPSPRVDVSCEPLEGVEKCSDSQSWEDIAPEIEPCAENRLDTKEEKSVEYEGDLKSGTAETEPVEQDSSQPSLPLVRADDPLRLDQELQQPQTQEKTSNSLTEDSKMANAKQLSSDAEAQKLGKPSAHASQSFCESSSETPFHFTLPKEGDIIPPLTGATPPLIGHLKLEPKRHSTPIGISNYPESTIATSDVMSESMVETHDPILGSGKGDSGAAPDVDDKLCLRMKLVSPETEASEESLQFNLEKPATGERKNGSTAVAESVASPQKTMSVLSCICEARQENEARSEDPPTTPIRGNLLHFPSSQGEEEKEKLEGDHTIRQSQQPMKPISPVKDPVSPASQKMVIQGPSSPQGEAMVTDVLEDQKEGRSTNKENPSKALIERPSQNNIGIQTMECSLRVPETVSAATQTIKNVCEQGTSTVDQNFGKQDATVQTERGSGEKPVSAPGDDTESLHSQGEEEFDMPQPPHGHVLHRHMRTIREVRTLVTRVITDVYYVDGTEVERKVTEETEEPIVECQECETEVSPSQTGGSSGDLGDISSFSSKASSLHRTSSGTSLSAMHSSGSSGKGAGPLRGKTSGTEPADFALPSSRGGPGKLSPRKGVSQTGTPVCEEDGDAGLGIRQGGKAPVTPRGRGRRGRPPSRTTGTRETAVPGPLGIEDISPNLSPDDKSFSRVVPRVPDSTRRTDVGAGALRRSDSPEIPFQAAAGPSDGLDASSPGNSFVGLRVVAKWSSNGYFYSGKITRDVGAGKYKLLFDDGYECDVLGKDILLCDPIPLDTEVTALSEDEYFSAGVVKGHRKESGELYYSIEKEGQRKWYKRMAVILSLEQGNRLREQYGLGPYEAVTPLTKAADISLDNLVEGKRKRRSNVSSPATPTASSSSSTTPTRKITESPRASMGVLSGKRKLITSEEERSPAKRGRKSATVKPVGAGEFVSPCESGDNTGEPSALEEQRGPLPLNKTLFLGYAFLLTMATTSDKLASRSKLPDGPTGSSEEEEEFLEIPPFNKQYTESQLRAGAGYILEDFNEAQCNTAYQCLLIADQHCRTRKYFLCLASGIPCVSHVWVHDSCHANQLQNYRNYLLPAGYSLEEQRILDWQPRENPFQNLKVLLVSDQQQNFLELWSEILMTGGAASVKQHHSSAHNKDIALGVFDVVVTDPSCPASVLKCAEALQLPVVSQEWVIQCLIVGERIGFKQHPKYKHDYVSH

SEQ ID NO: 52944 - DNA, 5928 bp, Artificial Sequence
  derived and/or modified sequence
atgcccggcgagcagatggaccccaccggcagccagctggacagcgacttcagccagcaggacaccccctgcctgatcatcgaggacagccagcccgagagccaggtgctggaggacgacagcggcagccacttcagcatgctgagcagacacctgcccaacctgcagacccacaaggagaaccccgtgctggacgtggtgagcaaccccgagcagaccgccggcgaggagagaggcgacggcaacagcggcttcaacgagcacctgaaggagaacaaggtggccgaccccgtggacagcagcaacctggacacctgcggcagcatcagccaggtgatcgagcagctgccccagcccaacagaaccagcagcgtgctgggcatgagcgtggagagcgcccccgccgtggaggaggagaagggcgaggagctggagcagaaggagaaggagaaggaggaggacaccagcggcaacaccacccacagcctgggcgccgaggacaccgccagcagccagctgggcttcggcgtgctggagctgagccagagccaggacgtggaggagaacaccgtgccctacgaggtggacaaggagcagctgcagagcgtgaccaccaacagcggctacaccagactgagcgacgtggacgccaacaccgccatcaagcacgaggagcagagcaacgaggacatccccatcgccgagcagagcagcaaggacatccccgtgaccgcccagcccagcaaggacgtgcacgtggtgaaggagcagaaccccccccccgccagaagcgaggacatgcccttcagccccaaggccagcgtggccgccatggaggccaaggagcagctgagcgcccaggagctgatggagagcggcctgcagatccagaagagccccgagcccgaggtgctgagcacccaggaggacctgttcgaccagagcaacaagaccgtgagcagcgacggctgcagcacccccagcagagaggagggcggctgcagcctggccagcacccccgccaccaccctgcacctgctgcagctgagcggccagagaagcctggtgcaggacagcctgagcaccaacagcagcgacctggtggcccccagccccgacgccttcagaagcacccccttcatcgtgcccagcagccccaccgagcaggagggcagacaggacaagcccatggacaccagcgtgctgagcgaggagggcggcgagcccttccagaagaagctgcagagcggcgagcccgtggagctggagaacccccccctgctgcccgagagcaccgtgagcccccaggccagcacccccatcagccagagcacccccgtgttcccccccggcagcctgcccatccccagccagccccagttcagccacgacatcttcatccccagccccagcctggaggagcagagcaacgacggcaagaaggacggcgacatgcacagcagcagcctgaccgtggagtgcagcaagaccagcgagatcgagcccaagaacagccccgaggacctgggcctgagcctgaccggcgacagctgcaagctgatgctgagcaccagcgagtacagccagagccccaagatggagagcctgagcagccacagaatcgacgaggacggcgagaacacccagatcgaggacaccgagcccatgagccccgtgctgaacagcaagttcgtgcccgccgagaacgacagcatcctgatgaaccccgcccaggacggcgaggtgcagctgagccagaacgacgacaagaccaagggcgacgacaccgacaccagagacgacatcagcatcctggccaccggctgcaagggcagagaggagaccgtggccgaggacgtgtgcatcgacctgacctgcgacagcggcagccaggccgtgcccagccccgccaccagaagcgaggccctgagcagcgtgctggaccaggaggaggccatggagatcaaggagcaccaccccgaggagggcagcagcggcagcgaggtggaggagatccccgagaccccctgcgagagccagggcgaggagctgaaggaggagaacatggagagcgtgcccctgcacctgagcctgaccgagacccagagccagggcctgtgcctgcagaaggagatgcccaagaaggagtgcagcgaggccatggaggtggagaccagcgtgatcagcatcgacagcccccagaagctggccatcctggaccaggagctggagcacaaggagcaggaggcctgggaggaggccaccagcgaggacagcagcgtggtgatcgtggacgtgaaggagcccagccccagagtggacgtgagctgcgagcccctggagggcgtggagaagtgcagcgacagccagagctgggaggacatcgcccccgagatcgagccctgcgccgagaacagactggacaccaaggaggagaagagcgtggagtacgagggcgacctgaagagcggcaccgccgagaccgagcccgtggagcaggacagcagccagcccagcctgcccctggtgagagccgacgaccccctgagactggaccaggagctgcagcagccccagacccaggagaagaccagcaacagcctgaccgaggacagcaagatggccaacgccaagcagctgagcagcgacgccgaggcccagaagctgggcaagcccagcgcccacgccagccagagcttctgcgagagcagcagcgagacccccttccacttcaccctgcccaaggagggcgacatcatcccccccctgaccggcgccaccccccccctgatcggccacctgaagctggagcccaagagacacagcacccccatcggcatcagcaactaccccgagagcaccatcgccaccagcgacgtgatgagcgagagcatggtggagacccacgaccccatcctgggcagcggcaagggcgacagcggcgccgcccccgacgtggacgacaagctgtgcctgagaatgaagctggtgagccccgagaccgaggccagcgaggagagcctgcagttcaacctggagaagcccgccaccggcgagagaaagaacggcagcaccgccgtggccgagagcgtggccagcccccagaagaccatgagcgtgctgagctgcatctgcgaggccagacaggagaacgaggccagaagcgaggacccccccaccacccccatcagaggcaacctgctgcacttccccagcagccagggcgaggaggagaaggagaagctggagggcgaccacaccatcagacagagccagcagcccatgaagcccatcagccccgtgaaggaccccgtgagccccgccagccagaagatggtgatccagggccccagcagcccccagggcgaggccatggtgaccgacgtgctggaggaccagaaggagggcagaagcaccaacaaggagaaccccagcaaggccctgatcgagagacccagccagaacaacatcggcatccagaccatggagtgcagcctgagagtgcccgagaccgtgagcgccgccacccagaccatcaagaacgtgtgcgagcagggcaccagcaccgtggaccagaacttcggcaagcaggacgccaccgtgcagaccgagagaggcagcggcgagaagcccgtgagcgcccccggcgacgacaccgagagcctgcacagccagggcgaggaggagttcgacatgccccagcccccccacggccacgtgctgcacagacacatgagaaccatcagagaggtgagaaccctggtgaccagagtgatcaccgacgtgtactacgtggacggcaccgaggtggagagaaaggtgaccgaggagaccgaggagcccatcgtggagtgccaggagtgcgagaccgaggtgagccccagccagaccggcggcagcagcggcgacctgggcgacatcagcagcttcagcagcaaggccagcagcctgcacagaaccagcagcggcaccagcctgagcgccatgcacagcagcggcagcagcggcaagggcgccggccccctgagaggcaagaccagcggcaccgagcccgccgacttcgccctgcccagcagcagaggcggccccggcaagctgagccccagaaagggcgtgagccagaccggcacccccgtgtgcgaggaggacggcgacgccggcctgggcatcagacagggcggcaaggcccccgtgacccccagaggcagaggcagaagaggcagaccccccagcagaaccaccggcaccagagagaccgccgtgcccggccccctgggcatcgaggacatcagccccaacctgagccccgacgacaagagcttcagcagagtggtgcccagagtgcccgacagcaccagaagaaccgacgtgggcgccggcgccctgagaagaagcgacagccccgagatccccttccaggccgccgccggccccagcgacggcctggacgccagcagccccggcaacagcttcgtgggcctgagagtggtggccaagtggagcagcaacggctacttctacagcggcaagatcaccagagacgtgggcgccggcaagtacaagctgctgttcgacgacggctacgagtgcgacgtgctgggcaaggacatcctgctgtgcgaccccatccccctggacaccgaggtgaccgccctgagcgaggacgagtacttcagcgccggcgtggtgaagggccacagaaaggagagcggcgagctgtactacagcatcgagaaggagggccagagaaagtggtacaagagaatggccgtgatcctgagcctggagcagggcaacagactgagagagcagtacggcctgggcccctacgaggccgtgacccccctgaccaaggccgccgacatcagcctggacaacctggtggagggcaagagaaagagaagaagcaacgtgagcagccccgccacccccaccgccagcagcagcagcagcaccacccccaccagaaagatcaccgagagccccagagccagcatgggcgtgctgagcggcaagagaaagctgatcaccagcgaggaggagagaagccccgccaagagaggcagaaagagcgccaccgtgaagcccgtgggcgccggcgagttcgtgagcccctgcgagagcggcgacaacaccggcgagcccagcgccctggaggagcagagaggccccctgcccctgaacaagaccctgttcctgggctacgccttcctgctgaccatggccaccaccagcgacaagctggccagcagaagcaagctgcccgacggccccaccggcagcagcgaggaggaggaggagttcctggagatcccccccttcaacaagcagtacaccgagagccagctgagagccggcgccggctacatcctggaggacttcaacgaggcccagtgcaacaccgcctaccagtgcctgctgatcgccgaccagcactgcagaaccagaaagtacttcctgtgcctggccagcggcatcccctgcgtgagccacgtgtgggtgcacgacagctgccacgccaaccagctgcagaactacagaaactacctgctgcccgccggctacagcctggaggagcagagaatcctggactggcagcccagagagaaccccttccagaacctgaaggtgctgctggtgagcgaccagcagcagaacttcctggagctgtggagcgagatcctgatgaccggcggcgccgccagcgtgaagcagcaccacagcagcgcccacaacaaggacatcgccctgggcgtgttcgacgtggtggtgaccgaccccagctgccccgccagcgtgctgaagtgcgccgaggccctgcagctgcccgtggtgagccaggagtgggtgatccagtgcctgatcgtgggcgagagaatcggcttcaagcagcaccccaagtacaagcacgactacgtgagccactag

SEQ ID NO: 52945 - DNA, 5928 bp, Artificial Sequence
  derived and/or modified sequence
atgcccggcgaacagatggatcctacagggtcccagttggacagcgactttagccagcaagatactccttgtctgatcattgaagacagtcaacctgagtcccaggtgcttgaggacgactccggaagccacttttctatgttgtcgcggcatcttccaaacttacagactcacaaggaaaaccccgtgctggacgtggtgtccaatcccgagcaaaccgcaggtgaggagaggggtgatgggaatagcggattcaatgagcatttgaaggagaataaggtcgcagatcctgtcgacagctctaatttagacacgtgcggctccatcagccaggtgattgaacaacttccgcagcccaacagaaccagtagcgtccttgggatgagcgtggaatcagcccccgccgttgaggaagagaagggggaagagctagagcagaaggagaaggagaaagaggaggacacatctggcaacaccacgcactctctgggtgccgaagacactgcttctagccagttgggatttggcgtcttagaattgtcgcagtctcaggacgtggaggaaaatacagtcccctacgaggtagataaggagcaactgcaaagcgttactacaaattccgggtatacgcggctgagtgacgtcgatgccaatacagcaataaagcatgaggaacagtcaaacgaggacattccaatcgccgagcagtcctcgaaggacatcccagtcaccgctcagcccagtaaggacgtgcatgtggtgaaagagcaaaaccctccacctgcacggtccgaggacatgcccttcagccctaaagcgtccgtagcagccatggaggctaaagagcagctttccgcacaggaactgatggagtccgggctgcagattcagaaaagtcctgaaccagaagtgctgagtactcaggaggacttgtttgatcagtccaataagacggtttctagtgacgggtgctccacacccagtcgcgaggagggcggttgctctttggcttctacacctgcgacaaccctccatttgctgcagttgagcgggcaacgcagtttggtccaagactccttgtcaacgaattcctcagatcttgtcgcaccaagtcccgacgccttccggtctactcccttcattgtcccatcgtcccctactgaacaagaaggtcgccaggacaagccaatggacacctctgtcctgagcgaggagggaggcgagccatttcagaagaagctgcagtcaggcgaacctgttgaacttgagaacccaccactcctgcccgaaagtactgtgtctccccaggctagcacgcccattagtcaatccaccccagtattccctcctggctctctgcccatcccttcacaaccacagttctcgcatgacattttcatcccgagcccctctttggaagaacaatctaatgatggcaaaaaggatggagatatgcacagctctagtcttacagtggagtgttctaagaccagcgagatcgaacctaagaacagtcctgaggatctggggctgagtttgaccggagatagttgtaagctgatgctttcaacaagcgagtactcccagagtcccaaaatggaatctctgtccagccacaggattgacgaggacggcgagaacactcaaatcgaagacacagagcctatgtctcctgtgctcaacagtaagtttgtgccggcagaaaacgattcgatccttatgaatcccgcacaggacggggaggtgcagttaagccagaatgatgataagactaaaggagacgataccgacaccagggatgatatcagcatcttggccacgggatgtaagggtcgcgaagaaacagtggctgaggatgtttgtatcgatctgacatgtgacagtgggtctcaggccgtgccatcccccgctacaagaagcgaggccctgtctagcgtgctggatcaagaggaagccatggagataaaggagcaccatcctgaggagggtagctcgggctcagaggtggaagagattccagagactccatgcgagtctcagggagaagagctaaaagaagagaatatggagagcgttccactgcacttatctctgaccgaaactcagtcccaaggcttgtgccttcagaaggagatgcccaaaaaggaatgttctgaggcaatggaagtggagacttctgtaatctccatcgattcaccacagaaactagcgatcctagatcaggaactggagcataaggagcaggaagcctgggaggaagctactagtgaagactcctccgtggtcattgtggatgttaaagaaccaagcccgcgtgtggacgtctcatgcgagccccttgagggggtagagaaatgtagcgatagccagagttgggaggacattgcacccgagattgaaccttgtgccgagaatcggctcgacacaaaagaggagaagagcgttgagtacgagggagacctgaaaagtggcaccgctgaaacagaacctgtggaacaggattcatcacaaccctccctgcccctggtacgcgccgatgatcccctgaggctagatcaagaactgcaacagcctcagactcaggagaaaacctctaactcactgaccgaggatagcaaaatggcaaacgccaagcagctgtcatccgacgcagaggcccaaaaactgggaaaaccaagtgcacacgccagccagagtttctgcgagtcctcgagcgagacacccttccacttcacccttcccaaagagggcgatataatacctcctctgaccggcgccacgccacccctgattggacacttaaagcttgaacctaagcgccattccacaccaattggaatcagcaattacccagaatctaccattgccacatcagatgtcatgtcagagtctatggtagaaacgcacgaccccatcttggggagtggcaaaggcgattctggtgccgcccccgacgtcgacgataagctctgtctgaggatgaagttggtgagtccagagaccgaggctagcgaggaatccctgcaattcaatcttgagaagcctgcaacgggagaacgtaagaatggttccaccgccgtcgcagagagcgtggcgtctccacagaagacgatgagcgtgctaagttgcatctgtgaagccaggcaggagaacgaagctagatctgaggatcccccgaccacacccattaggggcaatttgctgcactttccatccagccagggagaagaggaaaaggaaaaacttgagggagatcacacaatccgccaatctcagcagcctatgaagccgatcagtccggtgaaggacccggtgagtccggcttcacaaaaaatggtgatccaagggccaagcagcccccaaggggaggccatggttaccgacgtcctggaggatcagaaggagggacgtagtactaacaaggagaacccatccaaagccctcattgagcgcccttcacaaaataatatcggcattcaaacaatggaatgctctctgagagtgcccgagaccgtgagtgccgcaacgcagaccattaaaaacgtgtgtgaacaagggacctccacagtcgatcaaaacttcgggaaacaagacgcaactgttcaaactgaaagaggctctggcgaaaaacctgtgagcgcccctggggatgatacggagagcctgcattcacagggcgaagaagaatttgacatgccgcaacccccacatggccacgtccttcaccggcacatgcgcactattagggaggttaggactctggtaactagggtaatcacagacgtgtactatgttgatggtactgaggtcgaacgcaaggtaacggaggagacggaggagcccatcgttgaatgccaagagtgtgaaacagaggtgagcccctcacagaccgggggctcttctggcgatctgggagatatctcttctttctcgtcgaaggctagctcccttcatcgtaccagctcaggtacgtctctgagtgcgatgcatagctcaggctcatctggaaagggggccggtccgctcagaggcaagacctccgggacagaacccgcggacttcgccctcccttcttcccggggaggccctggtaagctgtccccccgcaagggcgttagccagacaggtacacctgtttgcgaagaagatggtgatgcaggactgggtatcaggcaggggggcaaagcccctgtcactcctcgcggtcgtggaaggcggggtagacctccatcacgcaccacgggaacacgcgaaaccgcagtaccgggtcctctagggattgaagacatttccccgaatctatccccagatgacaagtccttcagccgtgtcgtccctcgcgtccccgacagtaccagaagaacagatgtgggcgccggtgcgctacggcggagcgactcccccgagataccattccaagctgcagccggcccatcggacggtctggacgcgagcagccccggaaattcatttgtgggcttaagggtggttgccaagtggtcgagtaacggctatttttactccggaaaaattacccgagacgttggcgccggtaaatataagctcctgtttgacgatggctacgagtgcgacgtcttaggaaaggatatcctgctctgtgatcctattccgttggatactgaagtgacagccctgtccgaggatgaatacttctccgccggggtggtcaaaggacatcggaaagaaagcggggaactgtattactccattgagaaagaaggacagcgcaaatggtataaacggatggcagtgatcctttccctggaacaaggaaaccggcttcgcgagcagtacgggctcgggccttatgaagccgtgacgccattgactaaggccgccgacatcagcctcgataacctagtagaaggaaagcgcaagagaagaagtaatgtgtcctctcctgccacccctaccgcaagctcaagtagtagtacgacacctacccgaaagattaccgaaagccctagagcttctatgggcgtcctctcaggtaagcgaaagctgatcaccagcgaggaggagcggtcccctgccaaacgggggcgcaagtccgccaccgtgaagcccgtgggggctggtgagtttgtgtctccatgtgaatctggtgacaacactggcgagccaagcgcattagaagaacagcgtggcccactgccattaaataagaccctgttcctgggctacgctttcctgttaacgatggcgaccactagcgacaagttggcgagccgcagtaagttacctgacggtcccacagggagctctgaagaggaggaggagtttttagagatcccaccatttaacaaacagtacaccgagagccaacttagagccggagctggctacatcctcgaagacttcaatgaggcccaatgtaatactgcctaccaatgtttgctgatcgcagaccagcattgcaggactagaaagtactttctatgcttggcgtctggcataccttgcgtgagccacgtgtgggtgcatgactcttgccacgcgaaccagttacagaattacaggaactacctactgccagcggggtactccctggaggagcagaggatcctggattggcagcctcgcgaaaatccttttcaaaatctcaaggtgctattagtctcggatcagcagcagaatttcctggagctttggagtgagattctcatgaccggaggagcagccagcgtgaagcagcaccacagttccgctcataacaaagacatcgcacttggagtctttgatgttgtggttacggacccttcctgccccgcttccgtactgaaatgtgctgaggctctccagctgccagttgtgtctcaggaatgggtcatccaatgcttaattgtgggggaaaggattggctttaagcagcatcctaagtacaagcatgactacgtgtcacactag

SEQ ID NO: 52946 - DNA, 5928 bp, Artificial Sequence
  derived and/or modified sequence
atgcctggagagcagatggaccccaccggcagccagctggacagcgacttcagccagcaggacaccccctgcctgatcatcgaggacagccagcctgagagccaggtgctggaggatgattctggcagccacttctccatgctgagccgccacctgcccaacctgcagacccacaaggagaaccctgtgctggatgtggtgagcaaccctgagcagacagctggggaggagagaggagatggcaacagcggcttcaatgagcacctgaaggagaacaaggtggccgaccctgtggacagcagcaacctggacacctgtggcagcatcagccaggtgattgagcagctgccccagcccaacagaaccagctctgtgctgggcatgtctgtggagagcgccccagctgtggaggaggagaagggggaggagctggagcagaaggagaaggagaaggaggaggacaccagcggcaacaccacccacagcctgggcgctgaggacacagccagcagccagctgggctttggagtgctggagctgagccagagccaggatgtggaggagaacacagtgccctatgaggtggacaaggagcagctgcagagcgtgaccaccaacagcggctacacccggctgagtgatgtggatgccaacacagccatcaagcatgaggagcagagcaatgaagacatccccatcgccgagcagagcagcaaggacatccctgtgacagcccagcccagcaaggatgtgcacgtggtgaaggagcagaaccccccaccagcccggtctgaggacatgcccttcagccccaaggcctctgtggccgccatggaggccaaggagcagctgagcgcccaggagctgatggagagcggcctgcagatccagaagagccctgagcctgaggtgctgagcacccaggaggacctgtttgaccagagcaacaagacagtgtccagtgatggctgcagcacccccagccgggaggagggcggctgcagcctggccagcaccccagccaccaccctgcacctgctgcagctgagcggccagaggagcctggtgcaggacagcctgagcaccaacagcagtgacctggtggcccccagcccagatgccttccgcagcacccccttcatcgtgcccagcagccccacagagcaggagggccggcaggacaagcccatggacacctctgtgctgtctgaggagggcggggagcccttccagaagaagctgcagagcggggagcctgtggagctggagaacccccccctgctgcctgagagcacagtgagcccccaggccagcacccccatcagccagagcacccctgtgtttcctcctggcagcctgcccatccccagccagccccagttcagccatgacatcttcatccccagccccagcctggaggagcagagcaatgatggcaagaaggatggagacatgcacagcagcagcctgactgtggagtgcagcaagaccagcgagattgagcccaagaacagccctgaggacctgggcctgagcctgaccggggacagctgcaagctgatgctgagcaccagcgagtacagccagagccccaagatggagagcctgagcagccacagaattgatgaagatggagagaacacccagatcgaggacacagagcccatgagccctgtgctgaacagcaagtttgtgcctgcagaaaatgacagcatcctgatgaacccagcccaggatggagaggtgcagctgagccagaatgatgacaagaccaagggagatgacacagacaccagagatgacatcagcatcctggccaccggctgcaagggccgggaggagaccgtggccgaggatgtgtgcatcgacctgacctgtgacagcggcagccaggccgtgcccagccctgccaccaggtctgaggccctgagctctgtgctggaccaggaggaggccatggagatcaaggagcaccaccctgaggagggcagcagcggcagcgaggtggaggagatccctgagaccccctgtgagagccagggcgaggagctgaaggaggagaacatggagagcgtgcccctgcacctgagcctgacagagacccagagccagggcctgtgcctgcagaaggagatgcccaagaaggagtgcagcgaggccatggaggtggagaccagcgtcatcagcattgacagcccccagaagctggccatcctggaccaggagctggagcacaaggagcaggaggcctgggaggaggccaccagcgaggacagctctgtggtgattgtggatgtgaaggagcccagcccccgggtggatgtgtcctgtgagcccctggagggcgtggagaagtgcagcgacagccagagctgggaggacatcgcccctgagattgagccctgtgccgagaaccggctggacaccaaggaggagaagtctgtggagtatgaaggagacctgaagtctggaacagctgagacagagcctgtggagcaggacagcagccagcccagcctgcccctggtgcgggcagatgaccccctgcggctggaccaggagctgcagcagccccagacccaggagaagaccagcaacagcctgacagaggacagcaagatggccaatgccaagcagctgagcagtgatgctgaggcccagaagctgggcaagcccagcgcccacgccagccagagcttctgtgagagcagcagcgagacccccttccacttcaccctgcccaaggagggggacatcatcccccccctgaccggggccaccccacccctgattggccacctgaagctggagcccaagaggcacagcacccccatcggcatcagcaactacccagagagcaccatcgccaccagtgatgtgatgtctgagagcatggtggagacccatgaccccatcctgggcagcgggaaaggagacagcggggccgccccagatgtggatgacaagctgtgcctgaggatgaagctggtgtccccagagacagaggccagcgaggagagcctgcagttcaacctggagaagccagccactggagagaggaagaatggcagcacagctgtggccgagagcgtggccagcccccagaagaccatgtctgtgctgagctgcatctgtgaggcccggcaggagaatgaggcccggtctgaggacccccccaccacccccatccggggcaacctgctgcacttccccagcagccagggcgaggaggagaaggagaagctggagggggaccacaccatccggcagagccagcagcccatgaagcccatcagccctgtgaaggaccctgtgtccccagccagccagaagatggtgatccagggccccagcagcccccagggcgaggccatggtgacagatgtgctggaggaccagaaggagggccgcagcaccaacaaggagaaccccagcaaggccctgattgagcggcccagccagaacaacatcggcatccagaccatggagtgcagcctgcgggtgcctgagaccgtgtctgctgccacccagaccatcaagaatgtgtgtgagcagggcaccagcacagtggaccagaactttgggaagcaggatgccaccgtgcagacagagcggggcagcggggagaagcctgtgtctgcccctggagatgacacagagagcctgcacagccagggcgaggaggagtttgacatgccccagccccctcatggccacgtgctgcaccgccacatgaggaccatccgggaggtgaggaccctggtgaccagggtcatcacagatgtgtactacgtggatggaacagaggtggagaggaaggtgacagaggagacagaggagcccatcgtggagtgccaggagtgtgaaacagaggtgagccccagccagacaggaggcagcagcggggacctgggggacatcagcagcttcagcagcaaggccagcagcctgcacaggaccagcagcggcaccagcctgagcgccatgcacagcagcggcagcagtggaaaaggagctggccccctgcggggcaagaccagcggcacagagcctgctgactttgccctgcccagcagcagaggaggccctgggaagctgagccccaggaagggcgtgtcccagacaggcacccctgtgtgtgaggaggatggagatgctggcctgggcatccggcagggcggcaaggcccctgtgaccccccggggccggggcagaagaggccggccccccagcaggaccaccggcacccgggagacagctgtgcccggccccctgggcatcgaggacatcagccccaacctgagcccagatgacaagagcttcagccgggtggtgccccgggtgcctgacagcaccaggagaacagatgtgggcgctggggccctgcggcggagtgacagccctgagatccccttccaggccgccgccggccccagtgatggcctggatgccagcagccctggcaacagctttgtgggcctgcgggtggtggccaagtggagcagcaatggctacttctacagcggcaagatcaccagagatgtgggcgccggcaagtacaagctgctgtttgatgatggctatgaatgtgatgtgctgggcaaggacatcctgctgtgtgaccccatccccctggacacagaggtgacagccctgtctgaagatgagtacttctctgctggggtggtgaagggccacaggaaggagagcggggagctgtactacagcattgagaaggagggccagaggaagtggtacaagaggatggccgtcatcctgagcctggagcagggcaaccggctgcgggagcagtatggcctgggcccctatgaggccgtgacccccctgaccaaggctgctgacatcagcctggacaacctggtggagggcaagaggaagaggaggagcaatgtgagcagccctgccacccccacagccagcagcagcagcagcaccacccccaccaggaagatcacagagagcccccgggcctccatgggcgtgctgagcggcaagaggaagctgatcaccagcgaggaggagaggagccctgccaagaggggcaggaagagcgccaccgtgaagcctgtgggcgctggggagtttgtgagcccctgtgagagcggggacaacacaggagagcccagcgccctggaggagcagaggggccccctgcccctgaacaagaccctcttcctgggctacgccttcctgctgaccatggccaccaccagtgacaagctggccagccgcagcaagctgcctgatggccccaccggcagcagcgaggaggaggaggagttcctggagatcccccccttcaacaagcagtacacagagagccagctgcgggccggggccggctacatcctggaggacttcaatgaggcccagtgcaacacagcctaccagtgcctgctgattgctgaccagcactgcaggaccaggaagtacttcctgtgcctggccagcggcatcccctgtgtgagccacgtgtgggtgcatgacagctgccacgccaaccagctgcagaactacagaaactacctgctgcctgctggctacagcctggaggagcagaggatcctggactggcagccccgggagaaccccttccagaacctgaaggtgctgctggtgtctgaccagcagcagaacttcctggagctgtggagcgagatcctgatgactggaggagctgcctctgtgaagcagcaccacagcagcgcccacaacaaggacatcgccctgggcgtgtttgatgtggtggtgacagaccccagctgcccagcctctgtgctgaagtgtgccgaggccctgcagctgcctgtggtgtcccaggagtgggtgatccagtgcctgattgtgggggagcgcatcggcttcaagcagcaccccaagtacaagcatgactatgtgagccactag

SEQ ID NO: 52947 - DNA, 5928 bp, Artificial Sequence
  derived and/or modified sequence
atgcccggcgagcagatggaccccaccggcagccagctggacagcgacttttcacagcaggatacaccatgcttgattatcgaggattcgcagcccgaaagccaggttttagaggatgatagtgggtcacatttctccatgctctctcggcacctccctaacctccagacccataaagaaaatcctgtgctggacgttgtgagcaatcccgagcagaccgctggagaagaacgcggcgatggaaactccggctttaacgaacatttgaaagagaataaagtagctgaccccgtagactcctctaatctggatacctgcggtagcatctctcaggtgattgaacagctgccccagcccaatagaaccagcagtgtgttgggaatgtcagtggagtccgcacccgcggtggaggaggagaagggagaggaattagagcagaaggagaaggagaaagaagaagatactagcggtaataccactcattcactgggcgccgaagacaccgctagctcccagctagggttcggcgtcttagagctaagtcaatcacaggatgtggaagagaacactgtgccctatgaggtggacaaagagcagttgcagtcagttacaacaaactcaggctacacgcgcttgtcagacgtggatgctaacaccgcgatcaaacacgaagagcagtccaatgaagacatccctattgcggaacagtcttctaaggatattccggttactgcccagccatctaaagatgtgcacgtggtaaaagagcaaaatcctcctccagctcggtctgaggacatgcccttcagccccaaggccagtgtggctgcaatggaagctaaggagcaattgtccgcccaggagcttatggagtcaggtcttcaaattcaaaaaagtccagaaccagaagtgctgtcaacccaggaagacctgttcgaccagagcaacaaaacggtgagctctgacgggtgcagtacacctagtcgcgaggagggagggtgttcgttggctagcacaccagcaaccaccctccaccttctgcagctgtcgggccagcggtcccttgtacaagacagcctgtctactaactcctccgacctggtggctccttccccggatgcatttaggtccaccccgtttatcgtcccctccagtccaacagaacaggaggggcgtcaggacaagcctatggacaccagcgtgctgtccgaggagggcggcgagccctttcaaaaaaagctccaatccggtgaaccggtcgagctggagaacccacctttactcccggagtctaccgtttcgccccaagcctctacgcctatcagccagtcaacccccgtgttccccccaggcagcttaccaatcccatcccagccccaattttcacacgacatcttcatcccatccccgtcactcgaggagcagtccaacgacggtaagaaggatggggatatgcattcatcaagcctgaccgtcgaatgctccaagacatccgagatagagccgaagaattcaccggaggacttaggactaagtttgacaggcgactcctgtaagttgatgctcagcactagcgagtactctcagtctccgaagatggaaagcctgtcctcccacaggattgatgaggatggggagaatacccaaattgaggacaccgaacctatgagccctgtactcaactcgaagttcgtgcccgctgaaaacgattccatacttatgaatcccgcacaagacggggaggttcaactttctcagaacgacgataagactaagggggacgacactgatacccgggacgacatctctatccttgccacgggctgtaagggacgggaggagacggtggctgaggatgtgtgcattgacttgacctgtgactccggtagccaggctgtcccctctcctgcgacccggtctgaggcactttcttctgtgttagaccaagaggaggctatggagattaaggagcaccaccccgaagaggggagtagcggcagtgaggtggaggagattcccgagaccccctgcgagtcccagggagaggaactgaaggaagaaaatatggagagcgtgcctctgcatttgtccctgaccgaaacacaatcgcagggcctgtgtctgcagaaagagatgcccaaaaaagaatgtagtgaggccatggaggtggaaaccagcgttataagcatcgattcgccgcagaaactcgcaatcctggatcaggaactggagcacaaggagcaagaggcttgggaagaggctacatcagaggactcatccgtagtgatcgtggacgtgaaggagccctccccaagggttgacgtgagctgcgagccgttagagggggtggagaaatgctccgactcccaaagctgggaggatatagctcctgagattgagccctgtgctgagaacaggctggatactaaggaagaaaagtctgtggagtatgagggcgacctgaaatcaggtaccgctgagaccgaaccagtggagcaggattctagccagccatccctgccgctggtgagggccgacgaccctttgcgcttggatcaggagctgcagcagcctcagacccaggaaaagacatccaactctctcaccgaggattctaagatggctaatgcaaaacagctttcgagcgacgcagaggcccagaaactcggcaaaccgagtgcccacgccagccagagcttttgcgagagcagtagcgaaacccccttccacttcactttacccaaggaaggagatattatccctccactcaccggtgccacaccccctctgatcgggcatctgaagttggaaccaaaaagacattccactcctatcggaatatctaattaccctgagtccaccatcgctaccagcgacgtgatgtcagaatctatggttgagacacatgatcccatacttgggagcggaaagggcgattcaggagccgctcccgacgtggatgataagctgtgtctccggatgaaactggtttcaccagaaacggaggcaagcgaagagtcgctgcagttcaatctggaaaagcccgccacgggtgaacgtaagaatggatcgaccgcagtggctgagagcgtcgcatctccacaaaagacaatgtcggtactgtcttgtatatgcgaggccagacaggagaatgaagccaggtcagaagatcctcctactactcctattagaggaaatctcctgcattttccttcaagccagggtgaagaggaaaaggagaagctggaaggtgatcatactattcgccagtctcagcagccaatgaagcccatcagccctgttaaggatccagtgagtccagcttcgcagaagatggtgattcaaggaccatccagcccacagggggaggccatggtgacagatgtgctagaagatcaaaaagaagggagaagtaccaataaagaaaacccaagtaaagcccttattgagcggccatcccagaataacatcggaatccagaccatggagtgcagcctgcgtgtcccagagaccgtcagcgctgcgacacagaccatcaagaatgtctgcgagcaagggacctctacagtcgaccagaacttcggcaagcaggatgcgaccgtgcagactgagagggggtccggagagaagcctgtttccgctcctggcgatgatactgagtccctccactcccagggcgaagaagaattcgacatgccgcagcctcctcatggacacgtcctccacagacatatgcgtaccataagagaagttagaactctggtgacaagggtgattaccgacgtgtactacgtggacggtactgaggtggagagaaaggtgaccgaagaaacggaggaaccgatcgtcgaatgtcaggaatgtgaaacagaagtgtccccatcacagacggggggcagcagcggcgacctgggtgatatcagctctttcagctctaaggcttccagccttcatagaaccagcagtgggacctccctcagcgcaatgcacagctctggtagcagtggcaaaggcgcaggcccgttacgggggaagactagcggaacggaacccgctgacttcgccctgccttcaagccgtggcgggcccgggaaactgagccctagaaaaggggtttcccagactggaactcctgtctgtgaagaggatggcgatgctggcctaggaatccgccagggtggcaaggcccccgtcaccccaagaggccgggggaggcgcgggaggccgccttccaggacaacaggcactagggagactgcagtacctggcccgttagggatcgaggacatcagcccaaatttgtcaccagacgacaagtccttttcgagagtggtcccacgagtccccgattcgacacggcgcacggatgtgggcgcaggagccttgcgcagatccgacagcccagaaattccttttcaagcggcagccggtccctccgatgggttagacgcctcgagtcctgggaatagctttgtggggctgagagtcgtagcaaaatggagctccaacgggtacttttatagcggcaaaataacaagagacgtgggagctggcaagtataaattactgttcgacgacggctacgagtgtgacgttctcggcaaggacattttattgtgtgacccaatccctctggacactgaggtaaccgccctgagtgaagatgagtactttagcgccggtgtcgtcaaaggccacagaaaggagtcaggtgagctgtactactcgattgaaaaagagggacaacgaaaatggtataagcgcatggccgtaatcttgagcctggagcagggaaatagacttagagaacaatacggattgggcccgtatgaagctgtaactcctcttaccaaagccgcagacatttccctagataacttggttgagggcaagcgcaagcgacggtcaaacgtcagttcgcccgcgacaccaactgcaagttccagcagcagtaccacgcccacacgaaagatcaccgagtccccacgtgcatccatgggcgtgctgtcagggaagcggaaactgataacttctgaagaagaacggagccccgccaaaagagggcggaaaagcgcaacagtgaagcccgtaggcgcaggggaatttgtatctccctgtgagtctggtgacaacactggtgagccctccgctctggaggagcagcggggccctttacctttaaacaagaccctattcctcggctatgcctttctgcttaccatggcgacgacgtctgataagttggcctcccggtccaagctgccagacgggccaactggaagctctgaggaagaagaagaattcctcgaaatacctcccttcaataagcagtacaccgagtcacaattgcgggccggggccgggtacattctggaggatttcaacgaggcccaatgcaatacagcgtatcaatgtttgctaatcgcagatcaacattgtcgtacccgaaagtattttttgtgtttggctagcggaataccttgcgtttctcatgtgtgggtgcacgactcctgccacgctaaccaactccagaactatagaaattatctgctccctgcaggctattctctggaagaacagagaattctggattggcagcctcgcgagaaccctttccaaaatctcaaggtgctgctagtgtccgatcaacagcagaactttcttgagttgtggtcggagatcttgatgacaggcggagcggcatcagtgaaacaacatcatagtagcgcccacaacaaagacatcgcccttggggtcttcgatgtcgtggttacggacccctcctgtccagcctctgtgctaaagtgcgcagaagcactgcagctgccggtcgtgtctcaggaatgggtgatccagtgtttaattgttggggagagaattgggttcaagcagcaccctaagtacaaacacgattatgtgtcccactag

SEQ ID NO: 52948 - DNA, 5927 bp, Artificial Sequence
  derived and/or modified sequence
atgccgggagaacagatggatccaactggtagccagctcgatagcgacttcagtcagcaagatactccctgcctgattatagaggatagtcagcctgaaagccaagtccttgaggatgactcgggctcccatttctcaatgctgtctcgacatttaccaaatctgcaaacacacaaggagaatcctgtgctggatgtggtgtcgaaccccgaacagaccgccggtgaagagcggggtgacggaaacagcggcttcaacgaacatctcaaagagaataaagttgccgaccctgtcgattcaagcaatctggacacatgcggatctatctcacaggtgattgagcagttaccccagccaaatagaacctccagtgtgttggggatgtccgtcgagagtgctcctgccgtagaagaagaaaagggcgaagaattggagcagaaggagaaagaaaaggaggaggacacttccggtaacaccacacactctctaggcgctgaggacaccgcctcatcacagctgggcttcggcgttttagaacttagccagtcacaggatgtggaggagaatacagtgccttacgaagtggataaggaacagctgcaatccgtgactacaaatagcggatacactcgcctgtctgacgtggatgcgaacacagccattaagcatgaggagcagagcaacgaggatattccaatcgctgaacagtcttcaaaagacatccccgtgacagcccagccatctaaggacgtccatgtggttaaagaacagaatcccccacccgctagaagtgaggacatgccttttagtcctaaggccagcgtagcagcaatggaagcaaaggagcaactgagcgcacaggagttaatggagtccggattgcaaatacagaagtctccggaacctgaagtgttgtccacacaggaagatctttttgaccagtctaataagaccgtctcaagcgacggctgttcaaccccttcccgggaggaaggaggttgttccctcgccagcactccagccaccaccctccacctgctacagctgtccggtcagcggtccttagttcaggacagtctcagcaccaactccagtgacctcgtggcccctagccccgatgccttccgctccacaccatttatcgtgccctcctctccgactgagcaggagggaagacaggataagcccatggacacctccgtactcagcgaggaagggggagaaccctttcagaagaaattgcagtcaggcgagccagtggaactggaaaatccacccttactaccagagagcaccgtgtcaccccaggcgagcacccccatatcgcagagtactcctgtcttccctcccggatccctcccaatacctagccaaccccagttttcgcacgatatattcatcccgagccccagtctcgaggagcaatcaaatgatggcaagaaagacggggacatgcactcttccagtttaacagtcgagtgttcaaagacctcagaaatcgagccaaaaaattctcccgaggacctggggctgagccttactggcgactcttgcaagcttatgctctccaccagcgagtactctcaatctccgaaaatggagtctctgagctcacatagaattgatgaagacggcgaaaatacccagatcgaggacaccgaaccaatgtctccagtgctgaactcgaaattcgttcccgcagagaatgattccatcctcatgaaccccgctcaggatggggaagtgcagttgtctcaaaacgacgacaaaacaaagggagacgataccgacacaagagatgatatctccatcctcgcaaccgggtgcaagggcagagaggagactgtggccgaggacgtgtgcatcgatcttacatgtgacagcggatcacaggcagtgcctagtccagcaacccggagcgaggctttgtcttcggtattagatcaggaggaggcaatggaaatcaaggagcatcaccccgaggaagggtccagcgggagcgaagtagaggagattcccgagactccctgtgaaagccaaggggaagagctcaaggaggagaacatggagtcagtgccactgcatctctctttgaccgaaacccagagccaaggactgtgcctccagaaggaaatgcctaagaaggagtgctcagaggccatggaagtagagactagtgtgatctctatagactcgcctcaaaagctggcaattctcgatcaggaactggagcataaagagcaggaggcatgggaagaagctacaagcgaagacagtagtgttgttatcgtggacgtcaaagaaccatcccccagggtcgatgtaagctgtgaaccccttgaaggagtcgaaaagtgctccgacagccagagctgggaggacatcgccccagaaattgagccgtgcgcagaaaatcgcctggacacaaaagaggagaagtctgttgaatacgaaggggatctgaagtctggcaccgccgaaacagaaccagtggagcaggactcatcccagccttccttgccacttgtgagagcagatgatccacttcgtctagaccaggaactccagcagccccagactcaggagaagacaagtaattctttaaccgaggactccaagatggcaaacgcaaaacagttaagctcagacgcagaggctcagaaactcgggaaaccctccgcacacgcctcccagagtttctgtgaatcctcctcagagaccccctttcattttactctgcctaaggaaggggacattatccctccgctcactggagcaacgccgccacttattggtcaccttaaactggagccaaaacgccatagcaccccaattggcatctcaaattatccagaatctaccatagctacctcagatgtcatgagcgagtccatggttgagacacacgatcctattctgggatcaggcaaaggagattccggcgctgcccctgatgtcgatgacaagttgtgcttgcgaatgaagttggtgagtcccgaaacggaggcatcagaagagtccctgcagtttaatttggagaagccagcaactggagaaagaaaaaatgggagcaccgcagtggcggagagtgtggcatccccccagaaaacgatgagcgttctctcgtgtatttgtgaggccaggcaggagaatgaggccaggtccgaggatcccccaactacgccgatcagaggaaacctgctgcacttcccttcaagccagggcgaggaagagaaagaaaagctggaaggggatcacacgattcgacagagtcagcagcctatgaaaccaatcagtcctgtcaaagacccggtgagccccgctagccagaagatggtaattcaaggcccttcttccccccagggcgaggccatggttactgacgtgctagaggaccagaaggagggcagatccactaacaaagagaacccctccaaagccttgatcgaacgcccatcacagaacaatattggaatacagacaatggagtgttctttacgagttcctgaaacggtgtcagccgcaacccagaccatcaaaaacgtgtgcgaacaggggacctctacagttgaccaaaacttcggcaagcaggatgccacagtgcagaccgaaagagggagcggagaaaaacccgtgagcgcccctggcgacgataccgagtccttacactctcagggggaggaagaatttgacatgcctcaacccccacacggtcatgttctgcacagacacatgcggactatcagagaggtccgcacactcgtgacacgtgttatcaccgacgtctactacgtcgacggtaccgaagtcgaaagaaaggtcaccgaagaaacagaggagcccatcgtggagtgtcaggaatgcgagacagaagtgtcccctagccagactggcggtagctccggggacctaggggatatctcgtccttcagtagcaaagcttccagtctccatcgtacttctagcggtacctcactcagcgcgatgcatagctccgggagctcaggaaaaggcgcaggccctttgagaggtaagacatccgggaccgagccggctgatttcgctctgccaagtagtcgagggggaccgggtaagctcagcccacgcaagggtgtgtcccaaactgggacgcctgtgtgcgaagaagatggtgacgctggactggggattcgccagggcggaaaggccccagtgaccccccgagggcgtggccgaagaggcagacccccaagccgaaccactggcactcgagaaactgctgtgccaggtcctttaggcatagaagacatctcccctaacctctcccccgatgacaagtctttctctcgggtcgttcccagagtgcccgattcaactagacgaacagatgtgggagctggggctctccgccgttccgattcaccagagattccgttccaggctgctgctggccctagcgatgggctggacgcgagcagccccggaaattcttttgttggcctgcgcgtcgtggcaaagtggagcagcaatggctacttctattccggcaagatcacacgcgacgtcggcgctggcaagtacaaattactcttcgacgatggttacgagtgcgacgtcctcggtaaagacatcttactgtgtgatcctatccccctggacactgaagttacagcactttccgaggatgagtatttttccgccggtgtggtaaagggacaccggaaggaaagcggggagctttactactcgattgaaaaggaggggcaacgtaaatggtacaagagaatggccgtgatcctctccctcgagcagggcaataggcttagggagcagtatggcctcggcccatatgaggcagtgacacccctgacaaaggccgctgatatttctcttgataacctggtcgagggtaagaggaagaggcgttctaacgtgtcatctcctgctaccccaactgcgtcctcctcatccagcaccacccctacccgaaaaataaccgagagcccgcgagcgagtatgggtgtgctttctggcaagagaaagctgatcacatcagaggaagagcgcagcccagctaagcgcggtcgaaagtctgctacagtcaagcctgtcggcgctggggaatttgtatcgccctgcgagagtggtgacaatactggcgagccgagcgcattggaagaacaacggggacctctgccgctgaacaagacactatttctgggttacgctttccttcttacaatggcgaccacaagtgataagctagcctctcggagtaaattgcctgacgggcctactggctcctctgaggaggaagaagagtttctggagattccaccctttaacaagcagtacaccgagagccagttgcgggctggagccggttacattctggaagactttaatgaggcgcagtgcaacaccgcttatcagtgcttgcttattgctgaccagcattgccgcactcgcaaatacttcctgtgtctggcgtcgggcattccttgcgtgtcccacgtgtgggtgcacgactcctgccatgctaaccagctgcaaaactatcggaactatcttttgccagctgggtacagtctggaggagcagcggatcctggactggcagcccagggaaaacccctttcagaacctgaaggtgctcctggttagcgaccaacaacagaatttccttgaactgtggtctgagatcctcatgactggcggagccgcatcagtcaagcaacaccactcgagcgctcacaacaaggatatcgccttaggtgtgtttgatgtggtcgtcaccgatccctcttgcccagcaagtgtgctgaaatgtgccgaagcactccaactcccggtcgtctcgcaggagtgggtgatccagtgcctgatcgtgggagaacgcatcggctttaaacagcatccaaagtataagcacgattacgtctcccacta

SEQ ID NO: 52949 - DNA, 6210 bp, Artificial Sequence
  derived and/or modified sequence
gagttcgcggccggtggcggcggtggcgacagcggcgacctagggatcgatctggagggacttggggagcgtgcagagacctctagctcgagcgcgagggacctcccgccgggatgcctggggagcagatggaccctactggaagtcagttggattcagatttctctcagcaagatactccttgcctgataattgaagattctcagcctgaaagccaggttctagaggatgattctggttctcacttcagtatgctatctcgacaccttcctaatctccagacgcacaaagaaaatcctgtgttggatgttgtgtccaatcctgaacaaacagctggagaagaacgaggagacggtaatagtgggttcaatgaacatttgaaagaaaacaaggttgcagaccctgtggattcttctaacttggacacatgtggttccatcagtcaggtcattgagcagttacctcagccaaacaggacaagcagtgttctgggaatgtcagtggaatctgctcctgctgtggaggaagagaagggagaagagttggaacagaaggagaaagagaaggaagaagatacttcaggcaatactacacattcccttggtgctgaagatactgcctcatcacagttgggttttggggttctggaactctcccagagccaggatgttgaggaaaatactgtgccatatgaagtggacaaagagcagctacaatcagtaaccaccaactctggttataccaggctgtctgatgtggatgctaatactgcaattaagcatgaagaacagtccaacgaagatatccccatagcagaacagtccagcaaggacatccctgtgacagcacagcccagtaaggatgtacatgttgtaaaagagcaaaatccaccacctgcaaggtcagaggacatgccttttagccccaaagcatctgttgctgctatggaagcaaaagaacagttgtctgcacaagaacttatggaaagtggactgcagattcagaagtcaccagagcctgaggttttgtcaactcaggaagacttgtttgaccagagcaataaaacagtatcttctgatggttgctctactccttcaagggaggaaggtgggtgttctttggcttccactcctgccaccactctgcatctcctgcagctctctggtcagaggtcccttgttcaggacagtctttccacgaattcttcagatcttgttgctccttctcctgatgctttccgatctactccttttatcgttcctagcagtcccacagagcaagaagggagacaagataagccaatggacacgtcagtgttatctgaagaaggaggagagccttttcagaagaaacttcaaagtggtgaaccagtggagttagaaaacccccctctcctgcctgagtccactgtatcaccacaagcctcaacaccaatatctcagagcacaccagtcttccctcctgggtcacttcctatcccatcccagcctcagttttctcatgacatttttattccttccccaagtctggaagaacaatcaaatgatgggaagaaagatggagatatgcatagttcatctttgacagttgagtgttctaaaacttcagagattgaaccaaagaattcccctgaggatcttgggctatctttgacaggggattcttgcaagttgatgctttctacaagtgaatatagtcagtccccaaagatggagagcttgagttctcacagaattgatgaagatggagaaaacacacagattgaggatacggaacccatgtctccagttctcaattctaaatttgttcctgctgaaaatgatagtatcctgatgaatccagcacaggatggtgaagtacaactgagtcagaatgatgacaaaacaaagggagatgatacagacaccagggatgacattagtattttagccactggttgcaagggcagagaagaaacggtagcagaagatgtttgtattgatctcacttgtgattcggggagtcaggcagttccgtcaccagctactcgatctgaggcactttctagtgtgttagatcaggaggaagctatggaaattaaagaacaccatccagaggaggggtcttcagggtctgaggtggaagaaatccctgagacaccttgtgaaagtcaaggagaggaactcaaagaagaaaatatggagagtgttccgttgcacctttctctgactgaaactcagtcccaagggttgtgtcttcaaaaggaaatgccaaaaaaagaatgctcagaagctatggaagttgaaaccagtgtgattagtattgattcccctcaaaagttggcaatacttgaccaagaattggaacataaggaacaggaagcttgggaagaagctacttcagaggactccagtgttgtcattgtagatgtgaaagagccatctcccagagttgatgtttcttgtgaacctttggagggagtggagaagtgctcagattcccagtcatgggaggatattgctccagaaatagaaccatgtgctgagaatagattagacaccaaggaagaaaagagtgtagaatatgaaggagatctgaaatcagggactgcagaaacagaacctgtagagcaagattcttcacagccttccttacctttagtgagagcagatgatcctttaagacttgaccaggagttgcagcagccccaaactcaggagaaaacaagtaattcattaacagaagactcaaaaatggctaatgcaaagcagctaagctcagatgcagaggcccagaagctggggaagccctctgcccatgcctcacaaagcttctgtgaaagttctagtgaaaccccatttcatttcactttgcctaaagaaggtgatatcatcccaccattgactggtgcaaccccacctcttattgggcacctaaaattggagcccaagagacacagtactcctattggtattagcaactatccagaaagcaccatagcaaccagtgatgtcatgtctgaaagcatggtggagacccatgatcccatacttgggagtggaaaaggggattctggggctgccccagacgtggatgataaattatgtctaagaatgaaactggttagtcctgagactgaggcgagtgaagagtctttgcagttcaacctggaaaagcctgcaactggtgaaagaaaaaatggatctactgctgttgctgagtctgttgccagtccccagaagaccatgtctgtgttgagctgtatctgtgaagccaggcaagagaatgaggctcgaagtgaggatccccccaccacacccatcagggggaacttgctccactttccaagttctcaaggagaagaggagaaagaaaaattggagggtgaccatacaatcaggcagagtcaacagcctatgaagcccattagtcctgtcaaggaccctgtttctcctgcttcccagaagatggtcatacaagggccatccagtcctcaaggagaggcaatggtgacagatgtgctagaagaccagaaagaaggacggagtactaataaggaaaatcctagtaaggccttgattgaaaggcccagccaaaataacataggaatccaaaccatggagtgttccttgagggtcccagaaactgtttcagcagcaacccagactataaagaatgtgtgtgagcaggggaccagtacagtggaccagaactttggaaagcaagatgccacagttcagactgagagggggagtggtgagaaaccagtcagtgctcctggggatgatacagagtcgctccatagccagggagaagaagagtttgatatgcctcagcctccacatggccatgtcttacatcgtcacatgagaacaatccgggaagtacgcacacttgtcactcgtgtcattacagatgtgtattatgtggatggaacagaagtagaaagaaaagtaactgaggagactgaagagccaattgtagagtgtcaggagtgtgaaactgaagtttccccttcacagactgggggctcctcaggtgacctgggggatatcagctccttctcctccaaggcatccagcttacaccgcacatcaagtgggacaagtctctcagctatgcacagcagtggaagctcagggaaaggagccggaccactcagagggaaaaccagcgggacagaacccgcagattttgccttacccagctcccgaggaggcccaggaaaactgagtcctagaaaaggggtcagtcagacagggacgccagtgtgtgaggaggatggtgatgcaggccttggcatcagacagggagggaaggctccagtcacgcctcgtgggcgtgggcgaaggggccgcccaccttctcggaccactggaaccagagaaacagctgtgcctggccccttgggcatagaggacatttcacctaacttgtcaccagatgataaatccttcagccgtgtcgtgccccgagtgccagactccaccagacgaacagatgtgggtgctggtgctttgcgtcgtagtgactctccagaaattcctttccaggctgctgctggcccttctgatggcttagatgcctcctctccaggaaatagctttgtagggctccgtgttgtagccaagtggtcatccaatggctacttttactctgggaaaatcacacgagatgtcggagctgggaagtataaattgctctttgatgatgggtacgaatgtgatgtgttgggcaaagacattctgttatgtgaccccatcccgctggacactgaagtgacggccctctcggaggatgagtatttcagtgcaggagtggtgaaaggacataggaaggagtctggggaactgtactacagcattgaaaaagaaggccaaagaaagtggtataagcgaatggctgtcatcctgtccttggagcaaggaaacagactgagagagcagtatgggcttggcccctatgaagcagtaacacctcttacaaaggcagcagatatcagcttagacaatttggtggaagggaagcggaaacggcgcagtaacgtcagctccccagccacccctactgcctccagtagcagcagcacaacccctacccgaaagatcacagaaagtcctcgtgcctccatgggagttctctcaggcaaaagaaaacttatcacttctgaagaggaacggtcccctgccaagcgaggtcgcaagtctgccacagtaaaacctgtaggggcaggagagtttgtgagcccctgtgagagtggagacaacaccggtgaaccctctgccctggaagagcagagagggcctttgcctctcaacaagaccttgtttctgggctacgcatttctccttaccatggccacaaccagtgacaagttggccagccgctccaaactgccagatggtcctacaggaagcagtgaagaagaggaggaatttttggaaattcctcctttcaacaagcagtatacagaatcccagcttcgagcaggagctggctatatccttgaagatttcaatgaagcccagtgtaacacagcttaccagtgtcttctaattgcggatcagcattgtcgaacccggaagtacttcctgtgccttgccagtgggattccttgtgtgtctcatgtctgggtccatgatagttgccatgccaaccagctccagaactaccgtaattatctgttgccagctgggtacagccttgaggagcaaagaattctggactggcaaccccgtgaaaatcctttccagaatctgaaggtactcttggtatcagaccaacagcagaacttcctggagctctggtctgagatcctcatgactggtggtgcagcctctgtgaagcagcaccattcaagtgcccataacaaagatattgctttaggggtatttgatgtggtggtgacggacccctcatgcccagcctcggtgctgaagtgtgctgaagcattgcagctgcctgtggtgtcacaagagtgggtgatccagtgcctcattgttggggagagaattggattcaagcagcatccaaaatataaacacgattatgtttctcactaaagatacttggtcttactggttttattccctgctatcgtggagattgtgttttaaccaggttttaaatgtgtcttgtgtgtaactggattccttgcatggatcttgtatatagttttatttgctgaacttttatgataaaataaatgttgaatctctttggttgtagtaa

SEQ ID NO: 52950 - protein, 1977 aa, Artificial Sequence
  derived and/or modified sequence
MPGEQMDPTGSQLDSDFSQQDTPCLIIEDSQPESQVLEDDSGSHFSMLSRHLPNLQTHKENPVLDVVSNPEQTAGEERGDGNSGFNEHLKENKVADPVDSSNLDTCGSISQVIEQLPQPNRTSSVLGMSVESAPAVEEEKGEELEQKEKEKEEDTSGNTTHSLGAEDTASSQLGFGVLELSQSQDVEENTVPYEVDKEQLQSVTTNSGYTRLSDVDANTAIKHEEQSNEDIPIAEQSSKDIPVTAQPSKDVHVVKEQNPPPARSEDMPFSPKASVAAMEAKEQLSAQELMESGLQIQKSPEPEVLSTQEDLFDQSNKTVSSDGCSTPSREEGGCSLASTPATTLHLLQLSGQRSLVQDSLSTNSSDLVAPSPDAFRSTPFIVPSSPTEQEGRQDKPMDTSVLSEEGGEPFQKKLQSGEPVELENPPLLPESTVSPQASTPISQSTPVFPPGSLPIPSQPQFSHDIFIPSPSLEEQSNDGKKDGDMHSSSLTVECSKTSEIEPKNSPEDLGLSLTGDSCKLMLSTSEYSQSPKMESLSSHRIDEDGENTQIEDTEPMSPVLNSKFVPAENDSILMNPAQDGEVQLSQNDDKTKGDDTDTRDDISILATGCKGREETVAEDVCIDLTCDSGSQAVPSPATRSEALSSVLDQEEAMEIKEHHPEEGSSGSEVEEIPETPCESQGEELKEENMESVPLHLSLTETQSQGLCLQKEMPKKECSEAMEVETSVISIDSPQKLAILDQELEHKEQEAWEEATSEDSSVVIVDVKEPSPRVDVSCEPLEGVEKCSDSQSWEDIAPEIEPCAENRLDTKEEKSVEYEGDLKSGTAETEPVEQDSSQPSLPLVRADDPLRLDQELQQPQTQEKTSNSLTEDSKMANAKQLSSDAEAQKLGKPSAHASQSFCESSSETPFHFTLPKEGDIIPPLTGATPPLIGHLKLEPKRHSTPIGISNYPESTIATSDVMSESMVETHDPILGSGKGDSGAAPDVDDKLCLRMKLVSPETEASEESLQFNLEKPATGERKNGSTAVAESVASPQKTMSVLSCICEARQENEARSEDPPTTPIRGNLLHFPSSQGEEEKEKLEGDHTIRQSQQPMKPISPVKDPVSPASQKMVIQGPSSPQGEAMVTDVLEDQKEGRSTNKENPSKALIERPSQNNIGIQTMECSLRVPETVSAATQTIKNVCEQGTSTVDQNFGKQDATVQTERGSGEKPVSAPGDDTESLHSQGEEEFDMPQPPHGHVLHRHMRTIREVRTLVTRVITDVYYVDGTEVERKVTEETEEPIVECQECETEVSPSQTGGSSGDLGDISSFSSKASSLHRTSSGTSLSAMHSSGSSGKGAGPLRGKTSGTEPADFALPSSRGGPGKLSPRKGVSQTGTPVCEEDGDAGLGIRQGGKAPVTPRGRGRRGRPPSRTTGTRETAVPGPLGIEDISPNLSPDDKSFSRVVPRVPDSTRRTDVGAGALRRSDSPEIPFQAAAGPSDGLDASSPGNSFVGLRVVAKWSSNGYFYSGKITRDVGAGKYKLLFDDGYECDVLGKDILLCDPIPLDTEVTALSEDEYFSAGVVKGHRKESGELYYSIEKEGQRKWYKRMAVILSLEQGNRLREQYGLGPYEAVTPLTKAADISLDNLVEGKRKRRSNVSSPATPTASSSSSTTPTRKITESPRASMGVLSGKRKLITSEEERSPAKRGRKSATVKPGAVGAGEFVSPCESGDNTGEPSALEEQRGPLPLNKTLFLGYAFLLTMATTSDKLASRSKLPDGPTGSSEEEEEFLEIPPFNKQYTESQLRAGAGYILEDFNEAQCNTAYQCLLIADQHCRTRKYFLCLASGIPCVSHVWVHDSCHANQLQNYRNYLLPAGYSLEEQRILDWQPRENPFQNLKVLLVSDQQQNFLELWSEILMTGGAASVKQHHSSAHNKDIALGVFDVVVTDPSCPASVLKCAEALQLPVVSQEWVIQCLIVGERIGFKQHPKYKHDYVSH

SEQ ID NO: 52951 - DNA, 5919 bp, Artificial Sequence
  derived and/or modified sequence
atggaccccaccggcagccagctggacagcgacttcagccagcaggacaccccctgcctgatcatcgaggacagccagcccgagagccaggtgctggaggacgacagcggcagccacttcagcatgctgagcagacacctgcccaacctgcagacccacaaggagaaccccgtgctggacgtggtgagcaaccccgagcagaccgccggcgaggagagaggcgacggcaacagcggcttcaacgagcacctgaaggagaacaaggtggccgaccccgtggacagcagcaacctggacacctgcggcagcatcagccaggtgatcgagcagctgccccagcccaacagaaccagcagcgtgctgggcatgagcgtggagagcgcccccgccgtggaggaggagaagggcgaggagctggagcagaaggagaaggagaaggaggaggacaccagcggcaacaccacccacagcctgggcgccgaggacaccgccagcagccagctgggcttcggcgtgctggagctgagccagagccaggacgtggaggagaacaccgtgccctacgaggtggacaaggagcagctgcagagcgtgaccaccaacagcggctacaccagactgagcgacgtggacgccaacaccgccatcaagcacgaggagcagagcaacgaggacatccccatcgccgagcagagcagcaaggacatccccgtgaccgcccagcccagcaaggacgtgcacgtggtgaaggagcagaaccccccccccgccagaagcgaggacatgcccttcagccccaaggccagcgtggccgccatggaggccaaggagcagctgagcgcccaggagctgatggagagcggcctgcagatccagaagagccccgagcccgaggtgctgagcacccaggaggacctgttcgaccagagcaacaagaccgtgagcagcgacggctgcagcacccccagcagagaggagggcggctgcagcctggccagcacccccgccaccaccctgcacctgctgcagctgagcggccagagaagcctggtgcaggacagcctgagcaccaacagcagcgacctggtggcccccagccccgacgccttcagaagcacccccttcatcgtgcccagcagccccaccgagcaggagggcagacaggacaagcccatggacaccagcgtgctgagcgaggagggcggcgagcccttccagaagaagctgcagagcggcgagcccgtggagctggagaacccccccctgctgcccgagagcaccgtgagcccccaggccagcacccccatcagccagagcacccccgtgttcccccccggcagcctgcccatccccagccagccccagttcagccacgacatcttcatccccagccccagcctggaggagcagagcaacgacggcaagaaggacggcgacatgcacagcagcagcctgaccgtggagtgcagcaagaccagcgagatcgagcccaagaacagccccgaggacctgggcctgagcctgaccggcgacagctgcaagctgatgctgagcaccagcgagtacagccagagccccaagatggagagcctgagcagccacagaatcgacgaggacggcgagaacacccagatcgaggacaccgagcccatgagccccgtgctgaacagcaagttcgtgcccgccgagaacgacagcatcctgatgaaccccgcccaggacggcgaggtgcagctgagccagaacgacgacaagaccaagggcgacgacaccgacaccagagacgacatcagcatcctggccaccggctgcaagggcagagaggagaccgtggccgaggacgtgtgcatcgacctgacctgcgacagcggcagccaggccgtgcccagccccgccaccagaagcgaggccctgagcagcgtgctggaccaggaggaggccatggagatcaaggagcaccaccccgaggagggcagcagcggcagcgaggtggaggagatccccgagaccccctgcgagagccagggcgaggagctgaaggaggagaacatggagagcgtgcccctgcacctgagcctgaccgagacccagagccagggcctgtgcctgcagaaggagatgcccaagaaggagtgcagcgaggccatggaggtggagaccagcgtgatcagcatcgacagcccccagaagctggccatcctggaccaggagctggagcacaaggagcaggaggcctgggaggaggccaccagcgaggacagcagcgtggtgatcgtggacgtgaaggagcccagccccagagtggacgtgagctgcgagcccctggagggcgtggagaagtgcagcgacagccagagctgggaggacatcgcccccgagatcgagccctgcgccgagaacagactggacaccaaggaggagaagagcgtggagtacgagggcgacctgaagagcggcaccgccgagaccgagcccgtggagcaggacagcagccagcccagcctgcccctggtgagagccgacgaccccctgagactggaccaggagctgcagcagccccagacccaggagaagaccagcaacagcctgaccgaggacagcaagatggccaacgccaagcagctgagcagcgacgccgaggcccagaagctgggcaagcccagcgcccacgccagccagagcttctgcgagagcagcagcgagacccccttccacttcaccctgcccaaggagggcgacatcatcccccccctgaccggcgccaccccccccctgatcggccacctgaagctggagcccaagagacacagcacccccatcggcatcagcaactaccccgagagcaccatcgccaccagcgacgtgatgagcgagagcatggtggagacccacgaccccatcctgggcagcggcaagggcgacagcggcgccgcccccgacgtggacgacaagctgtgcctgagaatgaagctggtgagccccgagaccgaggccagcgaggagagcctgcagttcaacctggagaagcccgccaccggcgagagaaagaacggcagcaccgccgtggccgagagcgtggccagcccccagaagaccatgagcgtgctgagctgcatctgcgaggccagacaggagaacgaggccagaagcgaggacccccccaccacccccatcagaggcaacctgctgcacttccccagcagccagggcgaggaggagaaggagaagctggagggcgaccacaccatcagacagagccagcagcccatgaagcccatcagccccgtgaaggaccccgtgagccccgccagccagaagatggtgatccagggccccagcagcccccagggcgaggccatggtgaccgacgtgctggaggaccagaaggagggcagaagcaccaacaaggagaaccccagcaaggccctgatcgagagacccagccagaacaacatcggcatccagaccatggagtgcagcctgagagtgcccgagaccgtgagcgccgccacccagaccatcaagaacgtgtgcgagcagggcaccagcaccgtggaccagaacttcggcaagcaggacgccaccgtgcagaccgagagaggcagcggcgagaagcccgtgagcgcccccggcgacgacaccgagagcctgcacagccagggcgaggaggagttcgacatgccccagcccccccacggccacgtgctgcacagacacatgagaaccatcagagaggtgagaaccctggtgaccagagtgatcaccgacgtgtactacgtggacggcaccgaggtggagagaaaggtgaccgaggagaccgaggagcccatcgtggagtgccaggagtgcgagaccgaggtgagccccagccagaccggcggcagcagcggcgacctgggcgacatcagcagcttcagcagcaaggccagcagcctgcacagaaccagcagcggcaccagcctgagcgccatgcacagcagcggcagcagcggcaagggcgccggccccctgagaggcaagaccagcggcaccgagcccgccgacttcgccctgcccagcagcagaggcggccccggcaagctgagccccagaaagggcgtgagccagaccggcacccccgtgtgcgaggaggacggcgacgccggcctgggcatcagacagggcggcaaggcccccgtgacccccagaggcagaggcagaagaggcagaccccccagcagaaccaccggcaccagagagaccgccgtgcccggccccctgggcatcgaggacatcagccccaacctgagccccgacgacaagagcttcagcagagtggtgcccagagtgcccgacagcaccagaagaaccgacgtgggcgccggcgccctgagaagaagcgacagccccgagatccccttccaggccgccgccggccccagcgacggcctggacgccagcagccccggcaacagcttcgtgggcctgagagtggtggccaagtggagcagcaacggctacttctacagcggcaagatcaccagagacgtgggcgccggcaagtacaagctgctgttcgacgacggctacgagtgcgacgtgctgggcaaggacatcctgctgtgcgaccccatccccctggacaccgaggtgaccgccctgagcgaggacgagtacttcagcgccggcgtggtgaagggccacagaaaggagagcggcgagctgtactacagcatcgagaaggagggccagagaaagtggtacaagagaatggccgtgatcctgagcctggagcagggcaacagactgagagagcagtacggcctgggcccctacgaggccgtgacccccctgaccaaggccgccgacatcagcctggacaacctggtggagggcaagagaaagagaagaagcaacgtgagcagccccgccacccccaccgccagcagcagcagcagcaccacccccaccagaaagatcaccgagagccccagagccagcatgggcgtgctgagcggcaagagaaagctgatcaccagcgaggaggagagaagccccgccaagagaggcagaaagagcgccaccgtgaagcccggcgccgtgggcgccggcgagttcgtgagcccctgcgagagcggcgacaacaccggcgagcccagcgccctggaggagcagagaggccccctgcccctgaacaagaccctgttcctgggctacgccttcctgctgaccatggccaccaccagcgacaagctggccagcagaagcaagctgcccgacggccccaccggcagcagcgaggaggaggaggagttcctggagatcccccccttcaacaagcagtacaccgagagccagctgagagccggcgccggctacatcctggaggacttcaacgaggcccagtgcaacaccgcctaccagtgcctgctgatcgccgaccagcactgcagaaccagaaagtacttcctgtgcctggccagcggcatcccctgcgtgagccacgtgtgggtgcacgacagctgccacgccaaccagctgcagaactacagaaactacctgctgcccgccggctacagcctggaggagcagagaatcctggactggcagcccagagagaaccccttccagaacctgaaggtgctgctggtgagcgaccagcagcagaacttcctggagctgtggagcgagatcctgatgaccggcggcgccgccagcgtgaagcagcaccacagcagcgcccacaacaaggacatcgccctgggcgtgttcgacgtggtggtgaccgaccccagctgccccgccagcgtgctgaagtgcgccgaggccctgcagctgcccgtggtgagccaggagtgggtgatccagtgcctgatcgtgggcgagagaatcggcttcaagcagcaccccaagtacaagcacgactacgtgagccactag

SEQ ID NO: 52952 - DNA, 5934 bp, Artificial Sequence
  derived and/or modified sequence
atgcccggcgagcagatggaccccaccggcagccagctggacagcgacttcagccagcaggacaccccctgcctgatcatcgaggacagccagcccgagagccaggtgctggaggacgacagcggcagccacttcagcatgctgagcagacacctgcccaacctgcagacccacaaggagaaccccgtgctggacgtggtgagcaaccccgagcagaccgccggcgaggagagaggcgacggcaacagcggcttcaacgagcacctgaaggagaacaaggtggccgaccccgtggacagcagcaacctggacacctgcggcagcatcagccaggtgatcgagcagctgccccagcccaacagaaccagcagcgtgctgggcatgagcgtggagagcgcccccgccgtggaggaggagaagggcgaggagctggagcagaaggagaaggagaaggaggaggacaccagcggcaacaccacccacagcctgggcgccgaggacaccgccagcagccagctgggcttcggcgtgctggagctgagccagagccaggacgtggaggagaacaccgtgccctacgaggtggacaaggagcagctgcagagcgtgaccaccaacagcggctacaccagactgagcgacgtggacgccaacaccgccatcaagcacgaggagcagagcaacgaggacatccccatcgccgagcagagcagcaaggacatccccgtgaccgcccagcccagcaaggacgtgcacgtggtgaaggagcagaaccccccccccgccagaagcgaggacatgcccttcagccccaaggccagcgtggccgccatggaggccaaggagcagctgagcgcccaggagctgatggagagcggcctgcagatccagaagagccccgagcccgaggtgctgagcacccaggaggacctgttcgaccagagcaacaagaccgtgagcagcgacggctgcagcacccccagcagagaggagggcggctgcagcctggccagcacccccgccaccaccctgcacctgctgcagctgagcggccagagaagcctggtgcaggacagcctgagcaccaacagcagcgacctggtggcccccagccccgacgccttcagaagcacccccttcatcgtgcccagcagccccaccgagcaggagggcagacaggacaagcccatggacaccagcgtgctgagcgaggagggcggcgagcccttccagaagaagctgcagagcggcgagcccgtggagctggagaacccccccctgctgcccgagagcaccgtgagcccccaggccagcacccccatcagccagagcacccccgtgttcccccccggcagcctgcccatccccagccagccccagttcagccacgacatcttcatccccagccccagcctggaggagcagagcaacgacggcaagaaggacggcgacatgcacagcagcagcctgaccgtggagtgcagcaagaccagcgagatcgagcccaagaacagccccgaggacctgggcctgagcctgaccggcgacagctgcaagctgatgctgagcaccagcgagtacagccagagccccaagatggagagcctgagcagccacagaatcgacgaggacggcgagaacacccagatcgaggacaccgagcccatgagccccgtgctgaacagcaagttcgtgcccgccgagaacgacagcatcctgatgaaccccgcccaggacggcgaggtgcagctgagccagaacgacgacaagaccaagggcgacgacaccgacaccagagacgacatcagcatcctggccaccggctgcaagggcagagaggagaccgtggccgaggacgtgtgcatcgacctgacctgcgacagcggcagccaggccgtgcccagccccgccaccagaagcgaggccctgagcagcgtgctggaccaggaggaggccatggagatcaaggagcaccaccccgaggagggcagcagcggcagcgaggtggaggagatccccgagaccccctgcgagagccagggcgaggagctgaaggaggagaacatggagagcgtgcccctgcacctgagcctgaccgagacccagagccagggcctgtgcctgcagaaggagatgcccaagaaggagtgcagcgaggccatggaggtggagaccagcgtgatcagcatcgacagcccccagaagctggccatcctggaccaggagctggagcacaaggagcaggaggcctgggaggaggccaccagcgaggacagcagcgtggtgatcgtggacgtgaaggagcccagccccagagtggacgtgagctgcgagcccctggagggcgtggagaagtgcagcgacagccagagctgggaggacatcgcccccgagatcgagccctgcgccgagaacagactggacaccaaggaggagaagagcgtggagtacgagggcgacctgaagagcggcaccgccgagaccgagcccgtggagcaggacagcagccagcccagcctgcccctggtgagagccgacgaccccctgagactggaccaggagctgcagcagccccagacccaggagaagaccagcaacagcctgaccgaggacagcaagatggccaacgccaagcagctgagcagcgacgccgaggcccagaagctgggcaagcccagcgcccacgccagccagagcttctgcgagagcagcagcgagacccccttccacttcaccctgcccaaggagggcgacatcatcccccccctgaccggcgccaccccccccctgatcggccacctgaagctggagcccaagagacacagcacccccatcggcatcagcaactaccccgagagcaccatcgccaccagcgacgtgatgagcgagagcatggtggagacccacgaccccatcctgggcagcggcaagggcgacagcggcgccgcccccgacgtggacgacaagctgtgcctgagaatgaagctggtgagccccgagaccgaggccagcgaggagagcctgcagttcaacctggagaagcccgccaccggcgagagaaagaacggcagcaccgccgtggccgagagcgtggccagcccccagaagaccatgagcgtgctgagctgcatctgcgaggccagacaggagaacgaggccagaagcgaggacccccccaccacccccatcagaggcaacctgctgcacttccccagcagccagggcgaggaggagaaggagaagctggagggcgaccacaccatcagacagagccagcagcccatgaagcccatcagccccgtgaaggaccccgtgagccccgccagccagaagatggtgatccagggccccagcagcccccagggcgaggccatggtgaccgacgtgctggaggaccagaaggagggcagaagcaccaacaaggagaaccccagcaaggccctgatcgagagacccagccagaacaacatcggcatccagaccatggagtgcagcctgagagtgcccgagaccgtgagcgccgccacccagaccatcaagaacgtgtgcgagcagggcaccagcaccgtggaccagaacttcggcaagcaggacgccaccgtgcagaccgagagaggcagcggcgagaagcccgtgagcgcccccggcgacgacaccgagagcctgcacagccagggcgaggaggagttcgacatgccccagcccccccacggccacgtgctgcacagacacatgagaaccatcagagaggtgagaaccctggtgaccagagtgatcaccgacgtgtactacgtggacggcaccgaggtggagagaaaggtgaccgaggagaccgaggagcccatcgtggagtgccaggagtgcgagaccgaggtgagccccagccagaccggcggcagcagcggcgacctgggcgacatcagcagcttcagcagcaaggccagcagcctgcacagaaccagcagcggcaccagcctgagcgccatgcacagcagcggcagcagcggcaagggcgccggccccctgagaggcaagaccagcggcaccgagcccgccgacttcgccctgcccagcagcagaggcggccccggcaagctgagccccagaaagggcgtgagccagaccggcacccccgtgtgcgaggaggacggcgacgccggcctgggcatcagacagggcggcaaggcccccgtgacccccagaggcagaggcagaagaggcagaccccccagcagaaccaccggcaccagagagaccgccgtgcccggccccctgggcatcgaggacatcagccccaacctgagccccgacgacaagagcttcagcagagtggtgcccagagtgcccgacagcaccagaagaaccgacgtgggcgccggcgccctgagaagaagcgacagccccgagatccccttccaggccgccgccggccccagcgacggcctggacgccagcagccccggcaacagcttcgtgggcctgagagtggtggccaagtggagcagcaacggctacttctacagcggcaagatcaccagagacgtgggcgccggcaagtacaagctgctgttcgacgacggctacgagtgcgacgtgctgggcaaggacatcctgctgtgcgaccccatccccctggacaccgaggtgaccgccctgagcgaggacgagtacttcagcgccggcgtggtgaagggccacagaaaggagagcggcgagctgtactacagcatcgagaaggagggccagagaaagtggtacaagagaatggccgtgatcctgagcctggagcagggcaacagactgagagagcagtacggcctgggcccctacgaggccgtgacccccctgaccaaggccgccgacatcagcctggacaacctggtggagggcaagagaaagagaagaagcaacgtgagcagccccgccacccccaccgccagcagcagcagcagcaccacccccaccagaaagatcaccgagagccccagagccagcatgggcgtgctgagcggcaagagaaagctgatcaccagcgaggaggagagaagccccgccaagagaggcagaaagagcgccaccgtgaagcccggcgccgtgggcgccggcgagttcgtgagcccctgcgagagcggcgacaacaccggcgagcccagcgccctggaggagcagagaggccccctgcccctgaacaagaccctgttcctgggctacgccttcctgctgaccatggccaccaccagcgacaagctggccagcagaagcaagctgcccgacggccccaccggcagcagcgaggaggaggaggagttcctggagatcccccccttcaacaagcagtacaccgagagccagctgagagccggcgccggctacatcctggaggacttcaacgaggcccagtgcaacaccgcctaccagtgcctgctgatcgccgaccagcactgcagaaccagaaagtacttcctgtgcctggccagcggcatcccctgcgtgagccacgtgtgggtgcacgacagctgccacgccaaccagctgcagaactacagaaactacctgctgcccgccggctacagcctggaggagcagagaatcctggactggcagcccagagagaaccccttccagaacctgaaggtgctgctggtgagcgaccagcagcagaacttcctggagctgtggagcgagatcctgatgaccggcggcgccgccagcgtgaagcagcaccacagcagcgcccacaacaaggacatcgccctgggcgtgttcgacgtggtggtgaccgaccccagctgccccgccagcgtgctgaagtgcgccgaggccctgcagctgcccgtggtgagccaggagtgggtgatccagtgcctgatcgtgggcgagagaatcggcttcaagcagcaccccaagtacaagcacgactacgtgagccactag

SEQ ID NO: 52953 - DNA, 5919 bp, Artificial Sequence
  derived and/or modified sequence
atggatccaacaggcagccagttggatagcgacttttctcaacaagacaccccttgcctgatcattgaggattcccagcccgaaagccaggtgctggaagatgattccgggtctcactttagtatgttatctaggcacctccccaatcttcagacccacaaagaaaatcccgtgctcgacgtggtgagtaatcctgagcaaacagccggagaggaacgtggcgatggtaactcagggtttaacgaacacctgaaagaaaacaaggtcgctgatccggtggactcttccaacctggatacctgtggatcaatctcacaggtgatcgagcagttaccacagcccaaccgtaccagctctgtgctcgggatgtctgtggagtcagccccagccgtcgaggaggaaaagggtgaggagctggaacagaaagagaaggaaaaagaggaagatacgtccggtaatacgacgcactcgctgggcgccgaggatactgcaagtagtcaactgggattcggggttttggagctgtcacagagtcaagatgtcgaggagaacacagtcccatacgaggttgacaaagagcagcttcagtccgttactaccaacagcggctacacgaggctgtctgacgtggacgccaataccgccatcaaacacgaggagcagtcaaacgaggacatccccatcgccgagcaaagctccaaagatattcccgtgactgcccaaccctcgaaagacgttcacgtcgtgaaagagcagaacccgcctcctgctcgatctgaagatatgccgttttctcctaaggccagtgtggccgccatggaggcaaaggagcagctctcggcccaggagctgatggagtccggcttacaaatccagaagtccccagagccagaggttctgtccacccaggaagacttgtttgaccaaagcaataagaccgtatcgtccgacggctgctccacaccatccagggaggaagggggatgctctctggcctctaccccagccaccacccttcacctcctgcagctctctgggcagcgatctttggtacaggattcactgtcaaccaactcatcagatttagtagcaccctcacccgacgcattccggagcactcccttcattgtgccatctagtccgaccgaacaggaagggaggcaagataaacccatggacacaagtgtactgtccgaggagggcggagagccatttcagaagaagctgcagtcaggagaacctgtcgaactggagaacccaccactgctgcccgaatcaactgtgagccctcaagcctctacacccatatcccagtcgaccccagtatttcctccagggagcctgcccatcccctcccagcctcagtttagccacgatatctttatcccctccccgtccctagaagaacagtccaatgacggcaaaaaagatggggacatgcactcttcctctctgaccgtagaatgttcaaagacgtccgagattgagcctaagaattcacctgaagatctggggctgtccctgacaggagattcctgtaaattaatgctgtctacctctgagtattcccagtcccccaaaatggaatccctgagctctcacaggatagatgaagacggcgagaatacccagatcgaggatactgagcccatgagcccagtgttgaactcaaaatttgtgccagcggagaacgactcgattctgatgaaccccgcccaggatggggaggtgcagctgagtcagaatgacgacaaaaccaaaggagatgatacggacacccgtgatgacatctccattctggccaccggttgtaagggtcgtgaggaaaccgtcgccgaagacgtgtgtatagatctcacctgcgattccggctcgcaggcagttcctagccctgcgactcgcagcgaggcactcagctcggtattggaccaggaggaagcaatggagattaaagagcaccatccagaggagggaagttccggctccgaagttgaggagattccagaaactccatgcgaatcccaaggcgaggagctgaaagaagagaacatggaatcggtcccactgcatctgtcattaacggaaactcaaagtcagggcctgtgtctacaaaaagagatgcccaagaaggagtgtagcgaggcgatggaagtagagacgtccgtcatttccatagattctccccagaagctggcaattcttgaccaggagcttgaacacaaggaacaagaagcatgggaagaagccacatccgaggatagttcagtggtcattgtcgacgtgaaagaaccgagccccagagtggatgtcagctgcgagccgctcgaaggcgtggaaaagtgctcggattcacaatcctgggaagatattgctcctgagatcgagccttgtgctgaaaaccggctggacactaaggaagaaaagtcagtggaatacgagggtgatctgaagagcgggactgcagaaacagagcctgtggagcaagattcttctcagccttcgttaccgctggtccgtgcagacgatcccctcaggctggatcaggaacttcaacagccacagacgcaggaaaagacctccaattcactcactgaagattccaagatggctaatgccaagcagctgtctagcgatgccgaggcgcagaaactgggtaaaccaagtgctcacgcaagccaaagcttttgcgagagttccagcgaaacccctttccacttcacgctgccaaaggaaggcgacattattccacccctaaccggagccacccctccgctcatcggccacctgaaactggaacccaagcgacactcaactccaatcggcatctcgaactaccctgaatccacgatcgcaactagcgacgtgatgtcggaaagcatggtggaaacacatgatccgatccttggctctggcaagggcgactcaggggctgcgcctgatgtggatgacaagctttgtcttaggatgaagctggtctcacccgagactgaggcatcagaggagagcctgcagttcaacctggaaaagcccgcaacaggggaacgaaagaatgggagcaccgctgtggcagagtccgtggcaagcccacagaagacaatgagtgttctgtcctgcatttgtgaggccaggcaggagaacgaagccaggtctgaggacccccctaccaccccgatacgaggcaacctgctgcactttccatcctctcagggggaagaggaaaaagagaaactggagggggatcacaccatccgccagagccagcagcccatgaagcctatttctcccgtgaaggaccccgtgtctccggcgtcacaaaaaatggtcattcaaggaccatcttccccccagggagaagctatggtgactgatgtattggaggaccaaaaggagggccgctccactaataaggagaacccctcaaaggcactgattgaacggccaagccagaacaatatcggaatccagacaatggagtgctcgctgagggtccctgagacagtgtccgccgctacccagacaattaaaaacgtgtgtgagcagggcacatctacggtggatcagaattttggtaagcaggacgctaccgtccagaccgagaggggctctggcgagaagcccgtctctgcccccggtgacgatacagagagcctgcattcacaaggcgaggaagagttcgacatgcctcagccgcctcacggccacgtcttgcacagacatatgagaaccattagggaggttaggactttagtcacaagggtgatcacagacgtatattacgtggacgggaccgaggtggagcggaaggtgaccgaggaaactgaggaacctatcgtcgagtgccaggaatgcgagacggaggtgagtccatcccagactggcggttctagtggcgacctgggggacatctcctctttcagttcaaaggcctctagccttcaccgcacctctagcgggacatctctgagcgctatgcacagctcaggctctagcggcaaaggggccggtcccttgcgtggtaaaactagcggaaccgagcctgccgatttcgcactgccatcatccaggggagggccaggtaagctcagcccacgcaaaggggtgagccagacagggacccccgtttgtgaggaagacggggacgccggactggggatcaggcagggcggaaaggcgccagtaacaccgagaggccgcgggcgcagagggcgccccccatcccgtactacgggcactcgcgagacagctgtgccggggcccttgggcattgaggatatttcccctaatctgtcaccggacgataagtccttcagccgcgtcgtcccccgtgtcccagacagcacaaggcgtactgacgtgggggctggcgcactccgccggtccgatagccctgaaataccctttcaagccgctgccggaccaagcgatgggttagatgcttcatctcctgggaattcctttgtcggattgagggtggttgcgaaatggagctccaatggctacttctattcaggcaagattacgcgcgatgttggggcaggcaaatacaagcttctcttcgatgatggctatgaatgcgatgtgctgggaaaggacattttgttgtgtgacccaattcctctggacactgaagttaccgccctgtctgaagatgagtatttcagtgccggcgtggtgaagggccatcggaaggagtctggtgaactatactacagcatagagaaggagggccaacgcaagtggtataagaggatggctgtcatcttgtccctggaacaagggaatcgccttcgcgaacagtacggactggggccatacgaggctgtcacgcctttaactaaagctgccgacatcagtctggataacttagttgaaggaaaaaggaagaggcgttccaatgtgtccagccccgctacaccaacagccagcagctcatcgtcaacgacaccgacccggaagatcaccgaatctccccgcgcgagcatgggagtgctctccggaaaaagaaagttaatcaccagtgaggaggaaaggtcacccgcgaagagaggccgcaaatccgccaccgtcaagcctggtgcggtgggtgccggagagtttgtttccccatgcgaaagcggcgataacactggcgagcctagcgcactggaagagcagcggggccccctgccactaaataaaactctttttttgggttacgctttcttgctgacgatggctactacctctgataagctggccagtaggagtaaactccctgatggacctaccgggtcttctgaagaagaagaggagttcctggagatccctccatttaacaagcaatacaccgagtcccagctgcgggcaggggctggttatatcctggaggacttcaatgaggcacaatgcaatacagcctaccagtgcctgctcattgctgaccagcattgtaggactaggaagtactttctttgcctggcttctggaattccctgtgtttcacacgtttgggtccacgactcttgtcacgcaaaccaactgcagaactatagaaattatttgttgccagccggctattcccttgaggagcagcgcatcttagactggcaacctcgggaaaaccccttccaaaatcttaaggtgctcttggtgagcgaccaacagcagaatttcctcgaactatggagtgaaattcttatgaccggcggagcagcttcagttaaacagcaccacagctccgcacataacaaggatattgccctcggcgtgtttgacgttgtggtcaccgacccaagctgcccagccagcgtgctgaaatgtgcagaagctctgcagctccccgtggtgtcgcaagaatgggtcatccagtgcctgatcgtgggcgagagaataggcttcaagcaacacccaaaatacaagcacgactacgtctctcactag

SEQ ID NO: 52954 - DNA, 5934 bp, Artificial Sequence
  derived and/or modified sequence
atgccgggtgagcagatggacccaactgggtcacagcttgactctgactttagtcaacaggatactccatgccttatcatcgaagacagccaaccagagagccaggtgctcgaggacgacagtggctcacatttttcaatgctttcccggcatctgccgaatttgcagacacataaagagaacccagtcctggacgtggtctcaaatcctgagcaaacggccggcgaggagaggggtgatggcaactcgggcttcaatgagcacctgaaagaaaacaaagtggcagaccctgtcgatagctccaatctggacacctgtggatccatttcccaagtgattgagcaattacctcagcccaatcgcacttcctcagtgctgggcatgtcggttgagtccgctcctgccgtggaggaggaaaagggcgaagagctggagcagaaagaaaaggaaaaagaggaggataccagcggaaacacaacacatagtctgggggctgaggatacggccagctcgcagctcggcttcggcgttctggaactatcgcaatctcaggatgtcgaggagaatacggtgccttacgaggttgataaagagcaactccagtcagtcacaaccaacagtggctacactcgcttatccgacgtagacgccaacactgcaattaaacacgaggagcagtcaaacgaagatattcccattgcggagcagagcagtaaagatatcccagtgactgctcaaccatctaaagatgtacacgtggtaaaggaacagaacccaccacctgccagatccgaagatatgccattcagtccaaaagcctctgttgccgccatggaagccaaggagcaactgagcgcacaggagcttatggagtctggcctgcaaatccaaaaatccccggagcctgaggtactctctacacaggaggatctctttgatcagagcaacaagacagtgagttccgacggatgctccaccccctcccgggaggagggaggctgttctcttgcttctaccccagcaactaccctccatttgctgcagctatctggccagaggtccttggtgcaggatagtctaagcacaaactccagtgatctggtggccccttcacctgatgccttcagatcaacaccttttattgtaccttctagtcctaccgaacaggagggcaggcaagataaacccatggatacttctgttctgtcggaagaggggggcgaaccttttcagaagaaattgcagagtggagagcctgtggaacttgaaaatccaccgctgctgccagagtccactgtgtctccgcaggccagtactcccatcagtcaatccactcctgtatttccccctgggtcactcccgatcccctcacagccccagttttctcacgatatatttataccctctccttctctggaggagcagagcaacgacgggaaaaaagatggagacatgcactcaagcagcctgacagtggaatgtagcaagaccagtgaaattgagcccaagaatagccccgaagacctgggtctgtcccttacaggcgattcctgtaagctgatgctgtcaacctcggagtatagccagtcccctaagatggagtctctgagctctcacaggattgatgaggacggcgagaatactcagatcgaagacacagaacccatgtcaccagtgcttaattcaaagttcgtccctgcggaaaatgattctatactgatgaaccctgcccaggacggagaggtgcagctctctcagaacgacgataagacaaagggagatgacacagacaccagagatgatatcagtattctagccacaggttgcaaagggagagaggagaccgtcgctgaagatgtttgtattgacctaacatgcgactctggctctcaggcagtgcccagcccagcaactcggagtgaagccctgagctcagtcttagatcaggaagaggccatggaaatcaaggagcaccacccggaagaaggatcgagcggatcagaggtcgaagagattccagagacaccatgtgaatcccagggggaagagctgaaggaggagaacatggaatcagtaccactgcatctgagccttaccgagactcagtcccagggcctctgtcttcagaaggagatgccaaagaaggagtgctcggaggctatggaagtggaaacttcagtgattagcatcgactcacctcaaaagttggctattctggatcaggagttagagcataaggagcaggaagcgtgggaggaagccacaagtgaggacagcagtgtagtaatcgtagacgtaaaggaaccctccccacgggtagacgtctcatgtgagccacttgagggagtggaaaaatgctcagactcgcagagctgggaggacattgcaccggagatcgagccgtgtgcagaaaataggctggataccaaggaggaaaaatcagtcgagtatgaaggcgatctgaagtcagggactgcggaaaccgagcctgtcgaacaggatagttcccagccatcccttcccctggtaagagctgatgatcccctgaggttagaccaagaactgcagcagcctcagactcaggaaaagacgagcaacagtctgaccgaagattctaagatggccaatgctaagcagctctcgtcagacgcggaggcacagaagctaggaaaacctagcgcacatgcatcccagtccttctgcgagagctcttccgaaaccccattccacttcacactgccaaaagagggcgatatcattccccccctcaccggggccacgccacctctgattgggcacctgaagctcgagcccaaaagacactcaacccctatcggcatttccaactatcccgagagtacaatagctacgagcgatgtaatgagtgaaagtatggtagagacccacgaccctattctgggctcaggcaaaggggatagcggggccgcaccggacgtagatgacaagctgtgtctgaggatgaaattagtgtccccagaaacagaggcgagcgaggaatccttgcaatttaacctcgaaaagcccgctaccggcgaaaggaagaatggtagtacagctgtggccgagtccgtggcttcccctcagaaaaccatgtccgttttaagttgcatctgcgaagcccggcaagagaacgaagccagatcggaagatccccctacgacacctatcagaggaaatttactccactttccttcctcccagggtgaggaggaaaaggagaagttagagggggaccacactataagacagagccagcaaccgatgaaacccatctctcccgttaaagaccccgtctcaccggcaagccaaaaaatggtcattcagggaccttcatcccctcagggggaggcaatggtaactgacgtgctggaagatcagaaagagggtcgcagcacaaataaggaaaacccgagcaaggcgctaatcgagaggccgtcccagaataacatcggcatccagacaatggaatgttcccttcgcgtgcccgaaacggtgtctgctgctacacagaccataaagaatgtgtgcgaacagggaacttccactgttgaccagaattttggtaaacaggatgcaacagtccaaaccgagagaggaagcggtgaaaaaccagtgtcagctcctggggacgatactgagagccttcactcccagggggaagaggaattcgacatgccccaaccaccccacggtcatgttctgcacaggcacatgcgcactattcgggaggtccgaaccctggttactcgggtcataaccgatgtctattatgtcgacggtactgaagtggagcgcaaagtgacggaggaaaccgaagaacccatcgtagagtgtcaagagtgtgaaaccgaagtgagcccctctcagaccggtggttcatcaggcgacctaggagatatctcttccttttcctccaaggctagtagcttgcaccggacctcttcaggaacttccctctccgccatgcatagctctggcagttccggaaagggcgccggcccactccggggtaagacctctggcaccgaacctgctgattttgccctgccgagcagtcgaggtggccccggaaaacttagtcctcgcaaaggcgtgtcccagaccgggacccccgtttgtgaagaggatggcgatgccggactggggatcagacaaggaggcaaggcgcctgtcaccccccgcggccgaggacggcgtggccggcccccgagtaggacaaccgggacgcgcgaaacagctgtacctggaccccttggcattgaggatatatctcccaatctgagtccagatgataaatcattttctagggttgtgccacgcgttcctgactcaactcggcggaccgacgtgggtgcgggagctctcaggcgatctgactcaccagaaattccctttcaggctgcagccggcccttccgatgggctggatgcatcgagtcctggcaacagcttcgtcggactgagagttgtcgctaagtggagctcgaatggctatttctactctggcaaaatcacaagagatgtcggcgccgggaagtacaaactactgtttgatgacggctacgaatgcgacgtcttgggcaaagatatcctcctttgcgatcctattccactggacaccgaagtgacagccctctctgaagacgagtacttctctgcgggcgtcgtgaagggccatcgtaaggagagcggagagctgtactacagcatcgagaaagagggccagcgtaagtggtacaagaggatggcagtaatcctttcccttgagcaaggaaaccggttgagggagcagtatgggcttggaccatacgaggcagtgacccctctgactaaagcggcagatatttcactggataatctggtcgaaggaaaaaggaagcgaagaagcaacgtgagttcccccgctacacccacagcgtcctctagttcctccaccacccctacaaggaaaatcaccgaatctccccgggctagtatgggtgttttaagcggaaagcgaaagctgattacgtcggaggaggaaagatcgccagccaagaggggacgcaagtccgccaccgtcaaaccaggagccgtgggcgctggcgaatttgtcagcccctgcgaatccggggacaatacaggtgaaccttcagccctggaggagcagaggggtccactgccacttaataagacgctctttctcgggtacgcctttctgctcaccatggccacgaccagtgataaactggcatccaggagtaagctacccgatgggcctacaggctcctctgaggaggaggaggaattcctagagatcccaccctttaataaacagtacaccgagtcacaactcagggctggcgctggctatattctggaggactttaatgaagcacaatgtaataccgcatatcagtgtctactcatcgctgaccagcactgtaggacaaggaagtactttctgtgcctcgcatctggcattccttgcgtcagccatgtgtgggtacacgactcatgccacgctaatcagctgcaaaattacaggaactatctgctgcctgctggctattcactggaggaacagcggatactagattggcaaccccgcgagaaccctttccaaaatctcaaggtgcttcttgtgtccgatcagcagcagaactttttggaactctggtctgaaatcctcatgacagggggtgcggcttcagtgaaacagcaccacagcagtgcacacaataaggacatcgcgctgggtgttttcgatgtggtggtcactgacccctcctgcccggcatccgtgctcaagtgtgcagaagccctccagcttcccgtcgtgtctcaggagtgggtgatccagtgtcttattgtaggcgaaagaatcggctttaaacagcatcctaaatacaagcacgactacgtctcccattag

SEQ ID NO: 52955 - DNA, 5919 bp, Artificial Sequence
  derived and/or modified sequence
atggaccccaccggcagccagctggacagcgacttcagccagcaggacaccccctgcctgatcatcgaggacagccagcctgagagccaggtgctggaggatgacagcggcagccacttctccatgctgagccgccacctgcccaacctgcagacccacaaggaaaatcctgtgctggatgtggtgagcaaccctgagcagacagctggggaggagagaggagatggcaacagcggcttcaatgagcacctgaaggagaacaaggtggccgaccctgtggacagcagcaacctggacacctgtggcagcatcagccaggtgattgagcagctgccccagcccaacagaaccagctctgtgctgggcatgtctgtggagagcgccccagctgtggaggaggagaagggggaggagctggagcagaaggagaaggagaaggaggaggacaccagcggcaacaccacccacagcctgggcgctgaggacacagccagcagccagctgggcttcggcgtgctggagctgagccagagccaggatgtggaggagaacacagtgccctatgaggtggacaaggagcagctgcagagcgtgaccaccaacagcggctacacccggctgagtgatgtggatgccaacacagccatcaagcatgaggagcagagcaatgaagacatccccatcgccgagcagagcagcaaggacatccctgtgacagcccagcccagcaaggatgtgcacgtggtgaaggagcagaaccccccaccagcccggtctgaggacatgcccttcagccccaaggcctctgtggccgccatggaggccaaggagcagctgagcgcccaggagctgatggagagcggcctgcagatccagaagagccctgagcctgaggtgctgagcacccaggaggacctgtttgaccagagcaacaagacagtgtccagtgatggctgcagcacccccagccgggaggagggcggctgcagcctggccagcaccccagccaccaccctgcacctgctgcagctgagcggccagaggagcctggtgcaggacagcctgagcaccaacagcagtgacctggtggcccccagcccagatgccttccgcagcacccccttcatcgtgcccagcagccccacagagcaggagggccggcaggacaagcccatggacacctctgtgctgtctgaggagggcggggagcccttccagaagaagctgcagagcggggagcctgtggagctggagaacccccccctgctgcctgagagcacagtgagcccccaggccagcacccccatcagccagagcacccctgtgttccccccaggcagcctgcccatccccagccagccccagttcagccatgacatcttcatccccagccccagcctggaggagcagagcaatgatggcaagaaggatggagacatgcacagcagcagcctgactgtggagtgcagcaagaccagcgagattgagcccaagaacagccctgaggacctgggcctgagcctgactggagacagctgcaagctgatgctgagcaccagcgagtacagccagagccccaagatggagagcctgagcagccacagaattgatgaagatggagagaacacccagatcgaggacacagagcccatgagccctgtgctgaacagcaagtttgtgcctgcagaaaatgacagcatcctgatgaacccagcccaggatggagaggtgcagctgagccagaatgatgacaagaccaagggagatgacacagacaccagagatgacatcagcatcctggccaccggctgcaagggccgggaggagaccgtggctgaagatgtgtgcatcgacctgacctgtgacagcggcagccaggccgtgcccagccctgccaccaggtctgaggccctgagctctgtgctggaccaggaggaggccatggagatcaaggagcaccaccctgaggagggcagcagcggcagcgaggtggaggagatccctgagaccccctgtgagagccagggcgaggagctgaaggaggagaacatggagagcgtgcccctgcacctgagcctgacagagacccagagccagggcctgtgcctgcagaaggagatgcccaagaaggaatgttctgaggccatggaggtggagaccagcgtcatcagcattgacagcccccagaagctggccatcctggaccaggagctggagcacaaggagcaggaggcctgggaggaggccaccagcgaggacagctctgtggtgattgtggatgtgaaggagcccagcccccgggtggatgtgtcctgtgagcccctggagggcgtggagaagtgcagcgacagccagagctgggaggacatcgcccctgagattgagccctgtgctgaaaatcggctggacaccaaggaggagaagtctgtggagtatgaaggagacctgaagagcggcacagctgagacagagcctgtggagcaggacagcagccagcccagcctgcccctggtgcgggcagatgaccccctgcggctggaccaggagctgcagcagccccagacccaggagaagaccagcaacagcctgacagaggacagcaagatggccaatgccaagcagctgagcagtgatgctgaggcccagaagctgggcaagcccagcgcccacgccagccagagcttctgtgagagcagcagcgagacccccttccacttcaccctgcccaaggagggggacatcatcccccccctgactggagccaccccacccctcatcggccacctgaagctggagcccaagaggcacagcacccccatcggcatcagcaactacccagagagcaccatcgccaccagtgatgtgatgtctgagagcatggtggagacccatgaccccatcctgggcagcggcaagggggacagcggggccgccccagatgtggatgacaagctgtgcctgaggatgaagctggtgtccccagagacagaggccagcgaggagagcctgcagttcaacctggagaagccagccaccggggagaggaagaatggcagcacagctgtggccgagagcgtggccagcccccagaagaccatgtctgtgctgagctgcatctgtgaggcccggcaggagaatgaggcccggagtgaagatcctcccaccacccccatccggggcaacctgctgcacttccccagcagccagggcgaggaggagaaggagaagctggagggggaccacaccatccggcagagccagcagcccatgaagcccatcagccctgtgaaggaccctgtgtccccagccagccagaagatggtgatccagggccccagcagcccccagggcgaggccatggtgacagatgtgctggaggaccagaaggagggccgcagcaccaacaaggagaaccccagcaaggccctgattgaaagacccagccagaacaacatcggcatccagaccatggagtgcagcctgcgggtgcctgagaccgtgtctgctgccacccagaccatcaagaatgtgtgtgagcagggcaccagcacagtggaccagaactttgggaagcaggatgccaccgtgcagacagagcggggcagcggggagaagcctgtgtctgcccctggagatgacacagagagcctgcacagccagggcgaggaggagtttgacatgccccagcccccccacggccacgtgctgcaccgccacatgaggaccatccgggaggtgaggaccctggtgaccagggtcatcacagatgtgtactacgtggatggaacagaggtggagaggaaggtgacagaggagacagaggagcccatcgtggagtgccaggagtgtgaaacagaggtgagccccagccagacaggaggcagcagcggggacctgggggacatcagcagcttcagcagcaaggccagcagcctgcacaggaccagcagcggcaccagcctgagcgccatgcacagcagcggcagcagcggcaagggggccggccccctgcggggcaagaccagcggcacagagcctgctgactttgccctgcccagcagccggggcggccctgggaagctgagccccaggaaaggagtgtcccagacaggcacccctgtgtgtgaagaagatggagatgctggcctgggcatccggcagggcggcaaggcccctgtgaccccccggggccggggccggcggggccggccccccagcaggaccaccggcacccgggagacagctgtgcccggccccctgggcatcgaggacatcagccccaacctgagcccagatgacaagagcttcagccgggtggtgccccgggtgcctgacagcaccaggagaacagatgtgggcgctggggccctgcggcggagtgacagccctgagatccccttccaggccgctgctggccccagtgatggcctggatgccagcagccctggcaacagctttgtgggcctgcgggtggtggccaagtggagcagcaatggctacttctacagcggcaagatcaccagagatgtgggcgctgggaagtacaagctgctgtttgatgatggctatgaatgtgatgtgctgggcaaggacatcctgctgtgtgaccccatccccctggacacagaggtgacagccctgtctgaagatgagtacttctctgctggggtggtgaagggccacaggaaggagagcggggagctgtactacagcattgagaaggagggccagaggaagtggtacaagaggatggctgtgatcctgagcctggagcagggcaaccggctgcgggagcagtatggcctgggcccctatgaagctgtgacccccctgaccaaggctgctgacatcagcctggacaacctggtggagggcaagaggaagagaagaagcaatgtgagcagccctgccacccccacagccagcagcagcagcagcaccacccccaccaggaagatcacagagagcccccgggcctccatgggcgtgctgagcggcaagaggaagctgatcaccagcgaggaggagaggagccctgccaagaggggcaggaagagcgccaccgtgaagccaggagctgtgggcgctggggagtttgtgagcccctgtgagagcggggacaacacaggagagcccagcgccctggaggagcagaggggccccctgcccctgaacaagaccctcttcctgggctacgccttcctgctgaccatggccaccaccagtgacaagctggccagccgcagcaagctgcctgatggccccaccggcagcagcgaggaggaggaggagttcctggagatcccccccttcaacaagcagtacacagagagccagctgcgggccggggccggctacatcctggaggacttcaatgaggcccagtgcaacacagcctaccagtgcctgctgattgctgaccagcactgcaggaccaggaagtacttcctgtgcctggccagcggcatcccctgtgtgagccacgtgtgggtgcatgacagctgccacgccaaccagctgcagaactacagaaactacctgctgcctgctggctacagcctggaggagcagaggatcctggactggcagccccgggagaaccccttccagaacctgaaggtgctgctggtgtctgaccagcagcagaacttcctggagctgtggagcgagatcctgatgactggaggagctgcctctgtgaagcagcaccacagcagcgcccacaacaaggacatcgccctgggcgtgtttgatgtggtggtgacagaccccagctgcccagcctctgtgctgaagtgtgccgaggccctgcagctgcctgtggtgtcccaggagtgggtgatccagtgcctgattgtgggggagagaattggcttcaagcagcaccccaagtacaagcatgactatgtgagccactag

SEQ ID NO: 52956 - DNA, 5934 bp, Artificial Sequence
  derived and/or modified sequence
atgcctggagagcagatggaccccaccggcagccagctggacagcgacttcagccagcaggacaccccctgcctgatcatcgaggacagccagcctgagagccaggtgctggaggatgattctggcagccacttctccatgctgagccgccacctgcccaacctgcagacccacaaggagaaccctgtgctggatgtggtgagcaaccctgagcagacagctggggaggagagaggagatggcaacagcggcttcaatgagcacctgaaggagaacaaggtggccgaccctgtggacagcagcaacctggacacctgtggcagcatcagccaggtgattgagcagctgccccagcccaacagaaccagctctgtgctgggcatgtctgtggagagcgccccagctgtggaggaggagaagggggaggagctggagcagaaggagaaggagaaggaggaggacaccagcggcaacaccacccacagcctgggcgctgaggacacagccagcagccagctgggctttggagtgctggagctgagccagagccaggatgtggaggagaacacagtgccctatgaggtggacaaggagcagctgcagagcgtgaccaccaacagcggctacacccggctgagtgatgtggatgccaacacagccatcaagcatgaggagcagagcaatgaagacatccccatcgccgagcagagcagcaaggacatccctgtgacagcccagcccagcaaggatgtgcacgtggtgaaggagcagaaccccccaccagcccggtctgaggacatgcccttcagccccaaggcctctgtggccgccatggaggccaaggagcagctgagcgcccaggagctgatggagagcggcctgcagatccagaagagccctgagcctgaggtgctgagcacccaggaggacctgtttgaccagagcaacaagacagtgtccagtgatggctgcagcacccccagccgggaggagggcggctgcagcctggccagcaccccagccaccaccctgcacctgctgcagctgagcggccagaggagcctggtgcaggacagcctgagcaccaacagcagtgacctggtggcccccagcccagatgccttccgcagcacccccttcatcgtgcccagcagccccacagagcaggagggccggcaggacaagcccatggacacctctgtgctgtctgaggagggcggggagcccttccagaagaagctgcagagcggggagcctgtggagctggagaacccccccctgctgcctgagagcacagtgagcccccaggccagcacccccatcagccagagcacccctgtgtttcctcctggcagcctgcccatccccagccagccccagttcagccatgacatcttcatccccagccccagcctggaggagcagagcaatgatggcaagaaggatggagacatgcacagcagcagcctgactgtggagtgcagcaagaccagcgagattgagcccaagaacagccctgaggacctgggcctgagcctgaccggggacagctgcaagctgatgctgagcaccagcgagtacagccagagccccaagatggagagcctgagcagccacagaattgatgaagatggagagaacacccagatcgaggacacagagcccatgagccctgtgctgaacagcaagtttgtgcctgcagaaaatgacagcatcctgatgaacccagcccaggatggagaggtgcagctgagccagaatgatgacaagaccaagggagatgacacagacaccagagatgacatcagcatcctggccaccggctgcaagggccgggaggagaccgtggccgaggatgtgtgcatcgacctgacctgtgacagcggcagccaggccgtgcccagccctgccaccaggtctgaggccctgagctctgtgctggaccaggaggaggccatggagatcaaggagcaccaccctgaggagggcagcagcggcagcgaggtggaggagatccctgagaccccctgtgagagccagggcgaggagctgaaggaggagaacatggagagcgtgcccctgcacctgagcctgacagagacccagagccagggcctgtgcctgcagaaggagatgcccaagaaggagtgcagcgaggccatggaggtggagaccagcgtcatcagcattgacagcccccagaagctggccatcctggaccaggagctggagcacaaggagcaggaggcctgggaggaggccaccagcgaggacagctctgtggtgattgtggatgtgaaggagcccagcccccgggtggatgtgtcctgtgagcccctggagggcgtggagaagtgcagcgacagccagagctgggaggacatcgcccctgagattgagccctgtgccgagaaccggctggacaccaaggaggagaagtctgtggagtatgaaggagacctgaagtctggaacagctgagacagagcctgtggagcaggacagcagccagcccagcctgcccctggtgcgggcagatgaccccctgcggctggaccaggagctgcagcagccccagacccaggagaagaccagcaacagcctgacagaggacagcaagatggccaatgccaagcagctgagcagtgatgctgaggcccagaagctgggcaagcccagcgcccacgccagccagagcttctgtgagagcagcagcgagacccccttccacttcaccctgcccaaggagggggacatcatcccccccctgaccggggccaccccacccctgattggccacctgaagctggagcccaagaggcacagcacccccatcggcatcagcaactacccagagagcaccatcgccaccagtgatgtgatgtctgagagcatggtggagacccatgaccccatcctgggcagcgggaaaggagacagcggggccgccccagatgtggatgacaagctgtgcctgaggatgaagctggtgtccccagagacagaggccagcgaggagagcctgcagttcaacctggagaagccagccactggagagaggaagaatggcagcacagctgtggccgagagcgtggccagcccccagaagaccatgtctgtgctgagctgcatctgtgaggcccggcaggagaatgaggcccggtctgaggacccccccaccacccccatccggggcaacctgctgcacttccccagcagccagggcgaggaggagaaggagaagctggagggggaccacaccatccggcagagccagcagcccatgaagcccatcagccctgtgaaggaccctgtgtccccagccagccagaagatggtgatccagggccccagcagcccccagggcgaggccatggtgacagatgtgctggaggaccagaaggagggccgcagcaccaacaaggagaaccccagcaaggccctgattgagcggcccagccagaacaacatcggcatccagaccatggagtgcagcctgcgggtgcctgagaccgtgtctgctgccacccagaccatcaagaatgtgtgtgagcagggcaccagcacagtggaccagaactttgggaagcaggatgccaccgtgcagacagagcggggcagcggggagaagcctgtgtctgcccctggagatgacacagagagcctgcacagccagggcgaggaggagtttgacatgccccagccccctcatggccacgtgctgcaccgccacatgaggaccatccgggaggtgaggaccctggtgaccagggtcatcacagatgtgtactacgtggatggaacagaggtggagaggaaggtgacagaggagacagaggagcccatcgtggagtgccaggagtgtgaaacagaggtgagccccagccagacaggaggcagcagcggggacctgggggacatcagcagcttcagcagcaaggccagcagcctgcacaggaccagcagcggcaccagcctgagcgccatgcacagcagcggcagcagtggaaaaggagctggccccctgcggggcaagaccagcggcacagagcctgctgactttgccctgcccagcagcagaggaggccctgggaagctgagccccaggaagggcgtgtcccagacaggcacccctgtgtgtgaggaggatggagatgctggcctgggcatccggcagggcggcaaggcccctgtgaccccccggggccggggcagaagaggccggccccccagcaggaccaccggcacccgggagacagctgtgcccggccccctgggcatcgaggacatcagccccaacctgagcccagatgacaagagcttcagccgggtggtgccccgggtgcctgacagcaccaggagaacagatgtgggcgctggggccctgcggcggagtgacagccctgagatccccttccaggccgccgccggccccagtgatggcctggatgccagcagccctggcaacagctttgtgggcctgcgggtggtggccaagtggagcagcaatggctacttctacagcggcaagatcaccagagatgtgggcgccggcaagtacaagctgctgtttgatgatggctatgaatgtgatgtgctgggcaaggacatcctgctgtgtgaccccatccccctggacacagaggtgacagccctgtctgaagatgagtacttctctgctggggtggtgaagggccacaggaaggagagcggggagctgtactacagcattgagaaggagggccagaggaagtggtacaagaggatggccgtcatcctgagcctggagcagggcaaccggctgcgggagcagtatggcctgggcccctatgaggccgtgacccccctgaccaaggctgctgacatcagcctggacaacctggtggagggcaagaggaagaggaggagcaatgtgagcagccctgccacccccacagccagcagcagcagcagcaccacccccaccaggaagatcacagagagcccccgggcctccatgggcgtgctgagcggcaagaggaagctgatcaccagcgaggaggagaggagccctgccaagaggggcaggaagagcgccaccgtgaagccaggagctgtgggcgctggggagtttgtgagcccctgtgagagcggggacaacacaggagagcccagcgccctggaggagcagaggggccccctgcccctgaacaagaccctcttcctgggctacgccttcctgctgaccatggccaccaccagtgacaagctggccagccgcagcaagctgcctgatggccccaccggcagcagcgaggaggaggaggagttcctggagatcccccccttcaacaagcagtacacagagagccagctgcgggccggggccggctacatcctggaggacttcaatgaggcccagtgcaacacagcctaccagtgcctgctgattgctgaccagcactgcaggaccaggaagtacttcctgtgcctggccagcggcatcccctgtgtgagccacgtgtgggtgcatgacagctgccacgccaaccagctgcagaactacagaaactacctgctgcctgctggctacagcctggaggagcagaggatcctggactggcagccccgggagaaccccttccagaacctgaaggtgctgctggtgtctgaccagcagcagaacttcctggagctgtggagcgagatcctgatgactggaggagctgcctctgtgaagcagcaccacagcagcgcccacaacaaggacatcgccctgggcgtgtttgatgtggtggtgacagaccccagctgcccagcctctgtgctgaagtgtgccgaggccctgcagctgcctgtggtgtcccaggagtgggtgatccagtgcctgattgtgggggagcgcatcggcttcaagcagcaccccaagtacaagcatgactatgtgagccactag

SEQ ID NO: 52957 - DNA, 5919 bp, Artificial Sequence
  derived and/or modified sequence
atggaccccaccggcagccagctggacagcgacttcagccagcaggatacaccatgcctcattattgaagattctcaaccagaaagtcaggtgctggaagacgactcaggatctcacttctctatgctgagccgccacttgccaaatctacagacacataaagagaaccccgtacttgatgtggtctcaaatcccgaacagacagccggagaagagcgcggagacggaaactccggatttaatgaacacctcaaagaaaataaggtggcagacccggtggacagtagcaatctggatacgtgcggatccatcagtcaggtgatagaacagctgcctcaacctaacaggacctctagcgtactaggaatgtccgtggagtcagcccctgccgtggaagaggagaagggcgaggagctagagcagaaggagaaggaaaaagaggaagatacctcaggaaataccactcatagtttgggtgctgaggacaccgctagctcccagttgggctttggggtgttagaactaagccagtcccaggatgtggaggaaaacaccgtgccgtacgaagtggataaggagcaattacagtcagttacgacgaattcagggtacactaggctttccgatgttgacgcgaacaccgcaatcaaacacgaagagcagtccaatgaagatatcccaatcgccgagcagtctagcaaggacattcccgtgacagctcagcctagcaaagacgtgcatgtcgtgaaggaacagaaccctcctcccgcgcgtagtgaagacatgccattctctcctaaggcttctgtcgcggcgatggaggccaaggaacaactttccgcccaagaactgatggagtctggcctccagatacagaaatcccctgaacctgaggtgctctctacccaggaggacctgtttgaccagtctaataagacggtgagcagtgacggctgctcaaccccttccagagaagaggggggatgctctctcgcttctaccccagctactacccttcatctcttgcaactatccggtcagcgatcccttgtgcaggattctctatcgacaaactccagcgacctcgtcgctccatcaccagatgcatttcgatccacaccatttattgtaccctcctcccctacggagcaggaaggtaggcaggacaagcccatggatacaagcgtgctgagcgaagagggaggagaaccatttcagaaaaaactgcagtctggcgaacccgtggagctggagaatccaccacttttgcctgaatctacagtctccccacaggcctcaactccaatttcccaaagcaccccggtctttccccctggctcgctgccaatcccaagtcagcctcagttttcacacgacattttcattccaagccccagcctggaggaacagagcaatgacggcaagaaggacggggacatgcactcaagttcactgactgtggagtgtagcaagacctccgaaatcgaaccgaagaattcgccagaagacctcggtctatcgttgacaggtgatagctgcaaactgatgctgagtacctcagaatacagccagagcccaaagatggagagcttgagttcacaccggatagacgaagacggggaaaacacccagattgaggatactgaacccatgtctccagtgctgaacagtaagtttgtgccagcggagaacgactccatcctcatgaatcccgctcaggatggcgaggtgcagttgtcgcagaacgacgacaagactaagggagacgatactgacacccgcgacgacatctccattctggcaactggctgtaaaggcagagaagagactgttgctgaggacgtgtgcatagacctcacctgcgactctggaagccaggccgtcccctcccccgcaactcggtctgaggccctgtcttctgttctcgatcaggaggaggcgatggaaatcaaggagcaccaccctgaggaaggatcttcaggctccgaggtggaagagataccagaaaccccgtgcgagtctcagggggaggagctcaaagaggagaatatggaatcagtgcctttgcacctcagtcttaccgagacccagtcccagggcctttgtctccagaaggaaatgcctaagaaggaatgtagtgaggccatggaggtggagacaagcgtgatcagtatcgacagtccacagaagctagcaattctcgatcaggaactggagcacaaggagcaggaagcgtgggaggaagcgacgagcgaggattcttcagtagtgatcgttgacgtgaaagaacccagtcctagagttgacgtcagctgcgaaccactcgagggtgttgagaaatgtagtgattcacagtcctgggaggatatcgccccggagatcgaaccctgtgctgagaatcgtctggataccaaggaagaaaaatcagttgagtacgaaggcgatctgaaaagcgggaccgcagaaacggaacctgtggagcaagacagtagtcagccatctctccccttggtgcgtgctgatgacccacttagactggatcaggagctgcagcagccccagacacaggaaaaaacctcgaacagcctaaccgaagattccaaaatggcgaacgcaaagcaactgtccagcgacgccgaagctcagaagcttggtaaacctagcgcacatgcttcacaatcgttctgcgagagtagctccgagacaccattccactttaccttgcctaaggaaggcgatatcatcccgccacttacaggagccaccccgcccctgattgggcatctgaaattagagccgaagaggcatagcacacctattgggatctccaactatcccgagtcaaccatcgcaacatccgatgtcatgtcagagtcaatggtcgagacccatgaccctattcttgggtctggaaaaggggacagtggcgcagcacccgacgttgatgacaagttgtgtctcagaatgaaattggtttccccagagaccgaggcttctgaggaatccctccagtttaatctggagaagccagcgacaggggagcgcaagaacggaagcactgcagtcgcagagagcgtcgcatcaccccagaaaactatgtctgtcctgtcatgcatttgcgaagctcgccaggaaaatgaggcacggagcgaagatccgcccactactcccatccgtggtaatctgctccatttcccttcaagccagggggaagaagaaaaagaaaagctggagggagatcataccatccgacagtcccagcaacccatgaagcctatttcccctgtgaaggaccctgtcagcccagcctcacagaagatggtgatacagggtccaagtagtccccagggagaagccatggtgactgacgttctcgaggaccagaaagaaggaagatccactaacaaagaaaatccctccaaggccctgatagaacgccctagtcagaataacattggaatccagacaatggagtgttctctgcgggtgcccgagaccgtgtcagccgctacccaaactattaagaatgtgtgtgaacagggaacctctactgtggatcagaattttggcaagcaagacgccaccgttcagacagagcgtggaagtggggagaaacccgtgagcgccccaggagatgataccgagtctctccactcccaaggcgaggaggagttcgatatgccccagccacctcacggacacgtgcttcataggcatatgagaaccattcgggaagttcgcaccctagtgacacgcgtgatcaccgacgtgtattatgtggatgggaccgaggttgaaagaaaagtgacagaggagactgaggaacctatcgtggaatgtcaggagtgtgagacagaagtctcaccctcccagacaggcgggagctccggcgaccttggtgacatcagcagcttctcatccaaggcttcaagtctgcaccggacctcctcaggaacatccctctcagcaatgcactctagcggatcctcgggaaagggggccggtcctctccggggtaagacctctggcacagaacctgccgattttgcattaccctccagtagggggggacccgggaaactgtccccacgaaagggggtcagccaaaccgggacaccagtttgtgaggaggatggggatgcaggactggggatacgacaaggtgggaaagctccggtcaccccacggggtagaggcaggcggggacgaccgccatctaggactacgggtactagagagaccgccgtaccaggacctttaggaatagaagatatttcccctaatctttcccctgatgacaagtcttttagccgggtcgtgcctagagtccccgatagtacccgtcgcactgatgtcggtgctggcgcgctgcgccgtagtgattcacctgaaattccctttcaggccgctgcaggtccctccgatggcctcgacgcgtcctcccctggcaactccttcgtggggcttcgcgtagtcgccaagtggtcgtctaatggctatttctattctgggaaaatcacaagagatgtcggcgccggaaaatataaactgctttttgatgatggctacgagtgtgatgtgctgggaaaggatattttgctatgtgaccctatcccactggatacagaggtgaccgctcttagcgaggacgaatatttcagcgcaggggtggttaaggggcatagaaaagagtccggggaactgtattacagtattgaaaaagagggccagaggaaatggtataagaggatggccgtgatcctctctctggagcagggcaatcgcttaagagagcagtatggcctggggccatacgaggccgttaccccactgaccaaagctgctgatataagccttgataatctcgtggagggaaaaaggaagcgacggagcaacgttagctcccctgccacccccaccgcctcctcctcaagctctacaacccctaccaggaagattacagaatccccacgcgccagcatgggcgttctctctgggaagcggaagctgatcactagcgaagaggaaagatcaccagcaaagcgggggaggaagtctgccactgtcaaacctggagccgtgggcgcaggcgagtttgtttctccctgcgagtcgggggacaacacgggtgagccatccgccctggaggaacagagaggccccttaccccttaacaaaacactgtttttgggctacgctttcctgttaactatggctaccacttcagacaagctggcttcacggagcaagctacccgatggccccaccggctcatccgaagaggaggaggagttcctggagatccctccctttaacaagcaatacactgagtcacagctgcgggccggagccggctacatattggaggacttcaatgaggctcagtgtaacacggcctatcagtgtctcctcatcgccgaccagcattgtcgcacccgaaaatacttcctgtgcctcgcgagtgggattccgtgtgtgagccacgtgtgggtgcacgacagctgccacgctaatcagttgcagaactataggaactacctgctgcctgccggctactctttggaggaacaacgcatcctggactggcagcccagagagaacccttttcaaaacttaaaagtgctcctggtttcagaccaacaacaaaacttcttagagctgtggtcggagattcttatgacaggcggagctgccagcgtcaagcaacatcattcttccgctcataataaagatatcgcgttgggagtgtttgacgtggtcgtgactgaccccagttgccctgcctctgtattgaaatgcgctgaggctcttcaattgcccgtggtttcccaggaatgggttattcagtgtctgatcgtcggtgagcgaatcgggttcaagcagcaccccaagtataagcatgattacgtgtcccattag

SEQ ID NO: 52958 - DNA, 5934 bp, Artificial Sequence
  derived and/or modified sequence
atgcccggcgagcagatggaccccaccggcagccagctggacagcgacttctcacaacaggacacaccctgtctgatcattgaggatagccaacctgagtctcaagtgttagaggacgattcaggatctcacttttcaatgctgtcccgacatttgcctaacttacagacacacaaggagaatcccgtactcgacgtggtatctaaccccgaacagactgccggtgaggagcgcggggatggaaacagcgggtttaatgaacacctgaaagaaaataaggtggctgacccggtcgatagctccaacctcgacacttgcggatccatctcgcaggtgatcgaacaacttccccagccaaacaggacgtcttccgtccttggcatgagcgttgagagcgcccctgcagtggaagaagagaagggcgaggaattagaacagaaagagaaagaaaaggaagaggatacaagtggaaacaccacccacagtctcggtgctgaagacaccgcttcctctcagctcggattcggcgtactggagctctctcagagtcaggatgtggaggagaacactgttccctatgaggtagataaagaacaattgcaatctgtcacaacaaatagcggctacactaggctttctgatgtagatgctaataccgctataaagcatgaagaacagagtaacgaggacataccaatcgccgaacagtcatctaaagatatccccgttaccgcccagccttcaaaagatgtgcacgtagtcaaggaacaaaatccgccacccgcccggagcgaggatatgcctttttcccccaaggcatccgtagccgcaatggaggccaaggagcaattatctgcccaggaattaatggagagtgggctccagatacagaaaagcccggagccagaggtactgtcgacacaggaggaccttttcgatcagagtaataaaaccgttagttctgacgggtgcagcactccgtcccgtgaggaaggtggctgctctctggctagcactccggctactacattgcacctcctccaattgtccggccaaaggtctctggtccaggattccctgtctacaaactcttcagatttggttgctccatctccggatgcatttcgatccactccctttattgtgcctagttcacctacagagcaggagggccgtcaggacaagcctatggacacctccgtgctgagtgaggaggggggagaaccattccagaagaaactacagtctggcgaacctgttgagctcgaaaacccaccactgctacccgaatccacagtgtcaccgcaggcttccactcccatatcacagtccacaccagtcttcccacctggttcactccctattccgagccagcctcagtttagccacgacatattcattccatcaccatccttggaggagcagagcaacgacggtaaaaaggatggcgacatgcacagctcgtcactgactgtagagtgtagtaaaacgagtgagatagagcctaaaaacagcccagaagacctggggttaagtctgactggcgactcatgcaagctgatgctaagcacctccgagtactctcagtcgccgaagatggagagcttgtcgtctcatagaatcgacgaagacggtgaaaacacacagatcgaggacacagagcccatgagtcccgtgttaaacagcaagtttgtgccagccgagaatgattcaatactgatgaacccagcccaggacggagaagtgcagctaagccagaatgacgataagacgaagggtgatgacaccgacactcgagacgatatctccattctcgcgaccggctgtaaaggacgcgaggagacagtggccgaagacgtgtgtatcgacctgacctgcgatagtggctcccaggctgtgccatcccccgctactagatcagaagcgctcagcagcgtactcgaccaggaggaagctatggagatcaaggaacatcatcctgaagagggctcctcagggtcagaggtggaggaaattcctgagacaccctgtgaaagccagggagaggagcttaaggaggaaaatatggagagtgtgcccctgcacctgagcctaactgaaacccagagtcaagggctgtgcttgcaaaaggagatgcccaagaaagaatgctcagaggccatggaggtggagactagtgtgatttcaatcgactctccgcagaagctggctattctagaccaggagctggaacacaaagagcaggaggcttgggaggaagctaccagtgaggattcatctgtcgttattgttgatgtcaaagagcctagcccccgggtagacgtgtcatgcgaacccctggaaggagtcgagaagtgctctgacagccagtcttgggaggacatcgctcctgagatagaaccatgtgcggagaatcgcttggacacaaaggaggaaaaatcggtggagtacgagggcgatcttaagtccgggacggcagagaccgagcctgttgaacaggattctagccagccatcgctgcccttggtgagggctgacgaccccttgaggttagaccaggagctccaacagcctcagacccaggagaaaaccagtaactcactgaccgaagactccaagatggctaacgcaaagcaattgagttctgatgcggaagcgcagaaattggggaaaccaagtgcacacgcctcacagtcgttttgcgagagcagttctgagaccccattccacttcacacttccaaaggaaggcgatattatacctccattaacaggggccacgcctccgctgatcggtcacttgaagttggaacctaagaggcattcgacccctattggaatctctaactatcctgaatcaactatcgccacctcagacgtaatgtcagagtccatggtggaaacccatgaccccatcctgggatccggcaaaggcgattccggagccgcccctgatgtcgatgacaaactatgtttaagaatgaagctcgttagcccggaaacagaggccagcgaggagagcctgcagttcaacctggagaagcctgcgactggagaacggaagaacggatcaacagccgtggctgagagcgtcgcaagcccgcagaaaacaatgagtgtgctttcctgtatttgtgaagctcgccaggagaacgaggctaggagcgaggacccaccaaccacccccattagagggaatctgctgcacttcccctctagccagggcgaggaagaaaaagagaaactggaaggcgatcacaccatcagacagtcccagcagcccatgaaaccaatttctccagtgaaagatccagtttcccctgccagtcagaaaatggtcattcagggtcccagctccccccagggtgaagccatggtgacagacgttctggaggaccagaaagaggggcgatccacgaacaaggaaaatcctagtaaagccttaattgagcggccctcacagaacaacatcggcatccagacaatggagtgcagtctccgggtgccagagactgtgtcggccgcaacccaaacaatcaaaaacgtgtgtgaacagggtacatccaccgtagatcagaacttcggtaagcaagacgctaccgtccagaccgaacggggctctggcgagaaacctgttagcgctcctggcgatgatacggagtccttgcattcacaaggagaagaggaatttgacatgccccaacctcctcacgggcatgttctgcatcggcacatgagaaccatccgtgaagtacgcacgcttgtcacacgagtcatcacagatgtctactacgtggacggcaccgaagttgagaggaaggtcacagaagagacggaggaaccaatagttgaatgccaggaatgcgaaactgaggtctcacctagccagacagggggatcctcgggcgacctgggggatatctcaagcttctcctccaaggcatcaagcttacacaggacttcctctggaaccagcctgtccgccatgcacagctcggggagcagcggtaaaggcgcagggcctctccggggaaagactagcggaacagagccagcagactttgccctccctagctctcgtggtgggcccggtaaactgagtcccagaaaaggtgtctcccagactgggactcccgtttgtgaagaggacggagacgcaggcctcggcattaggcagggagggaaggccccagtaacgccacgaggacggggaaggcggggccgcccaccgtcacgaactaccgggactagagagacagcagtcccagggcctcttggcatagaggacatcagtcccaaccttagtccagatgacaagtctttctcgagagtcgtaccccgggtcccggattctaccaggagaaccgacgttggagccggcgccctgagaaggtctgactcaccagagattccctttcaggcagcggcaggaccatctgacggtctagatgcgtctagcccagggaattcctttgtgggactgcgagtggtcgcaaaatggagcagcaatggatacttctacagcgggaaaattacccgagacgtcggggccggcaagtacaaactgctgtttgatgacgggtacgagtgcgacgtacttgggaaggacatcctgttgtgtgatcctatcccgctggacacagaagtcacagccctctcagaggatgagtacttcagcgccggggtggtgaaagggcaccgtaaagaatctggagagctgtactattcaattgaaaaagagggccaacgcaaatggtacaagcgaatggccgttattctgtctttggagcaaggcaatcggctgcgtgaacagtatggcctagggccctacgaggccgtgacacccctgacaaaagccgccgatatcagcctggataacctcgtggagggcaaaaggaaacgaaggagcaacgttagttctcctgccactcctacagctagcagtagtagttccacaaccccaaccaggaagataaccgaatctcctcgggccagtatgggcgtgttaagtggcaagaggaagcttattacaagcgaggaagaaagatctcctgccaagagggggcggaaatccgcgacagtaaagcccggtgcagtgggggccggggaatttgtctctccatgcgaaagtggcgacaacaccggtgaaccaagcgctctcgaagaacagcggggtcccctgccattgaacaagacccttttccttgggtacgccttcctgctcactatggctacaacctcagataagctagccagtagatctaagcttcctgatgggcccaccggaagctctgaagaagaagaggagttcctggagatcccacctttcaataagcaatatacagagtcccagcttagggcgggggccggctacatactggaggatttcaatgaggcgcaatgtaacacagcgtaccaatgtctgctgatagccgatcagcattgtcggacacgaaagtactttctgtgcttggccagtggtattccttgcgtgagtcatgtctgggtgcacgattcttgtcatgctaaccaactgcagaattatcggaactatctcctgccggccggttattctctggaggagcagaggatcctggactggcaaccgcgggaaaacccgtttcaaaatttaaaagtacttttagtcagtgatcaacagcaaaacttcctggagctgtggagcgagatcttgatgacgggtggcgcagcctccgtaaaacagcaccacagcagcgctcacaacaaggatattgccctgggtgttttcgacgtcgtggttacagatccttcatgccccgcctcagttctcaagtgcgcggaggcgctgcagctgcccgtagtttcacaggaatgggtgattcagtgcctgattgttggcgaaaggattggattcaagcaacacccaaagtataagcatgactatgtgagtcattag

SEQ ID NO: 52959 - DNA, 5919 bp, Artificial Sequence
  derived and/or modified sequence
atggatccaactggatctcagctggattctgacttctcacaacaagacaccccatgccttattattgaggattctcaaccagagagccaggtcctggaagacgactccgggagtcatttttccatgttatcccgtcacctgcctaacctacagacacacaaagagaacccagtgctcgacgtggtgagcaatccagagcagactgccggagaagaaaggggagacgggaactctggatttaatgaacacctgaaagaaaacaaggtcgccgaccccgttgacagctcaaatctggatacttgtggctctatctctcaggtcatcgagcagctgcctcagcccaataggaccagttctgttttgggcatgtctgtggagagcgcaccagccgtcgaggaagagaaaggcgaggagcttgagcaaaaagagaaagaaaaggaagaagacacatccggcaacaccacccactccctcggcgcagaagacaccgcttcatcccaattgggatttggggtgctggaattgagtcaaagccaagatgtggaggaaaacaccgtgccgtacgaagtcgataaggaacagttgcagtccgttacaacaaattcagggtacactcggttgtctgatgtggacgcgaacacagccatcaaacatgaggagcaaagcaacgaagacatccctatcgcagagcagtccagtaaagatatccccgtgacagcccagccttctaaggacgtgcacgtagtcaaggagcagaacccccctcccgcaaggagcgaagatatgcctttctcgccaaaggcatctgtagcggctatggaagccaaagagcaactctccgcgcaagagctgatggagtccggtctgcagattcagaagagtcccgagccagaggttttgtccacccaggaggacctgttcgatcagtctaacaaaactgtgtccagtgacggctgcagcacccctagccgggaagagggtggatgttcactcgcctcaacacctgctacaacccttcacctgctgcagctgagtggtcaaaggtctctcgtgcaggactctctgagcaccaacagctccgatctggtcgccccaagcccagatgcgttccgaagcacacccttcattgtgccaagttccccaacagaacaggaaggcaggcaggacaagccgatggacaccagtgtgctgtccgaagaaggcggtgaaccgtttcagaagaagttacaaagcggagagcccgtggagctcgagaatccaccgttgctcccagagtctacagtttcaccacaagccagcaccccaatctctcagagcaccccagtgtttcccccaggtagtctacccatcccctctcagccccagttttctcatgatatctttatccctagcccgagtttagaagaacagagcaacgatggtaaaaaggacggtgatatgcatagcagctcactaaccgtggaatgttctaaaacaagcgagatcgagcctaagaattccccagaagatctgggactctctttaacgggcgattcctgcaagctgatgctctccaccagcgaatatagccagtcaccgaagatggagtcccttagctctcacagaatcgacgaggatggcgagaatacccagatcgaggatacggaacctatgtcacccgtcctcaatagtaagtttgtccctgctgagaacgattctatcctcatgaatccagctcaggacggagaggtccagcttagtcagaacgatgataaaacaaagggtgacgacacggacactcgtgatgatatttccattctggcaacaggctgcaaaggcagggaggagaccgtagctgaagacgtctgtatagacttgacttgcgacagcggtagccaggcggtgccatcccccgctactcggtctgaggctctgagctctgtgctggaccaggaggaggctatggaaatcaaggagcatcaccctgaggagggaagttccggctcagaagtggaagaaattcccgagaccccctgcgaaagccagggggaggaactgaaggaggagaatatggagtcagtgcccctgcatctatcactaacagaaactcagtcacaggggctgtgcctccaaaaagagatgccaaagaaggagtgctcagaggctatggaagttgagacctcagttattagtatagattctccccagaaattagctattctggaccaggagctggagcataaagagcaggaggcttgggaggaagctacttctgaggactctagcgtggtcattgttgatgtgaaggagccctccccacgcgttgacgtgtcatgcgagccacttgagggagtggagaagtgctccgatagtcagtcgtgggaagacatagcaccggagattgagccgtgtgcagagaatagactggacaccaaagaagaaaagtcagtggaatacgagggcgatctgaagtccggcactgccgagacagagccagtggaacaagactcctcccagccatcgttgcctcttgtccgggctgacgacccgctgaggcttgatcaggagttgcagcagccccaaacccaagaaaaaaccagcaattctcttaccgaggatagtaaaatggctaacgcaaagcagctgtcttccgacgcagaggcacagaagctaggcaagcccagcgcccatgcctcccagtcgttttgtgaatcatccagcgaaaccccctttcattttacactgcccaaagagggcgacatcattccccctctcaccggcgctactccacccctgatcggccacctgaaattagagccaaagcggcattcaacaccgatcggcattagtaactatcctgagtcaaccattgcgacttccgatgtgatgagcgagtccatggtggagacccatgaccctatccttgggagcggcaagggtgactcaggcgctgccccagatgtagacgacaagctctgccttagaatgaagcttgtgagccccgaaaccgaagcctccgaggagtctctccagttcaacctggagaaacctgctacaggcgagcggaaaaacggttccacagctgtagctgaatctgtggcgtctccgcagaaaaccatgtctgtcttaagttgcatttgtgaggcccgtcaggaaaacgaagccaggtcggaggatccgccaaccacccccatccggggtaaccttcttcattttccgtcctcccagggggaggaggagaaagagaagctcgagggtgatcacacgattcgacagtcccagcaacctatgaagcctatctccccagttaaggaccctgtttcgcccgctagccagaagatggtgatccaggggccatcctcccctcagggcgaggcaatggtgacggatgtcctggaggaccagaaggaaggcaggtctaccaataaagaaaacccatcgaaagcattgattgaaagaccctcccagaacaatattggcatccagaccatggaatgcagcctgcgggttcctgagacagtgtccgccgcaactcagaccatcaagaatgtatgcgaacaggggacatctaccgttgatcagaattttggaaagcaggacgctactgtgcagactgaacggggaagcggcgaaaagcctgtgtctgcccctggggatgatactgagagcctgcacagccagggcgaagaggagttcgacatgccgcagccccctcacggccacgtcctccaccgtcatatgcggacaattcgcgaagtgcgtacactggtgacccgcgtaataacagatgtgtactatgtggatggcactgaggtagaaaggaaggtgacagaggagaccgaggaacctatcgtggagtgtcaagagtgcgaaaccgaagtaagccccagccagacaggtgggagttccggggatctgggcgacattagctcttttagctccaaagccagttcccttcatcggacaagttcaggaaccagcctttcggccatgcattctagcggttcaagtggtaagggggctgggccactcagggggaagaccagtgggacggaacctgccgatttcgctctgcctagttcacgcggaggaccaggcaagctgagcccaagaaagggcgtgagccagaccgggactcctgtgtgtgaggaagacggagatgccggtctggggattaggcagggcggaaaggcacccgttactccacgaggacgcggaagaagaggtcgtccccctagcaggaccaccggaactagggaaaccgctgtgcctggaccactcggaattgaggatatttcccccaatctgagcccagatgacaagtccttctcgagggtcgtgccaagggtgccagacagtactaggaggactgacgtgggagctggcgcactccggagaagcgactccccggaaatacccttccaggccgctgctggacctagcgacgggctcgacgcaagttctccaggcaattcctttgtgggactcagggtcgttgctaagtggtcatctaatggctatttctacagcggcaaaattaccagagacgtaggcgctggaaaatataaactgctgttcgatgacggttacgaatgtgacgttctcgggaaagatattctgctctgtgatcctatccccctggatacagaggtgacagcactgtcagaggacgaatacttttccgctggcgtcgttaaaggccaccgtaaggagagcggggagctatattacagtattgagaaagagggccagagaaaatggtacaagagaatggcagtaatcctatccctggaacagggcaatcgcctgcgcgagcagtacggcctcggaccctatgaagccgtcactcctctcacaaaagctgcggatatctcattagacaacctggtcgagggaaagaggaagaggaggagtaatgtttccagccctgcaactccgaccgcctcctcaagtagttccactactccgacccgtaagattacagaaagccctcgcgcttctatgggcgtcctgagcgggaagcgcaagctcattacatcggaggaagagagatcgccagccaagcggggtcgtaaatcggccacagttaaacccggagctgttggtgccggagagttcgtttccccatgtgagtcgggtgacaataccggtgaacctagtgctctggaggaacagcgcggtcccctgccgctgaataaaaccctgttcttaggctacgcctttcttctgactatggccacgacctccgataaactggcaagccgttcaaagctgcctgatggcccaacgggcagttccgaggaggaggaggagttcctggaaattcctcctttcaataaacagtacacggagtcccagcttagagcaggcgctggatacatcctggaagattttaatgaggcacaatgtaataccgcctaccagtgcctgctgatagccgatcagcattgcagaacccggaagtactttttatgcctggccagcgggattccttgcgtgtctcatgtctgggtacatgacagttgtcatgccaaccagctccaaaactaccgcaactacttgttgcccgctggatactccctggaagagcaacgcatcctggattggcagccacgggagaaccccttccagaatttgaaggtcttgctggtttctgatcaacagcaaaacttccttgaattgtggtccgaaattctgatgaccggaggtgctgccagcgtgaaacagcaccactcaagcgcccataataaggacatagccctcggagttttcgatgtcgtggtcacagatcccagctgccccgctagtgtcctcaagtgcgcagaggcccttcagctgcccgtcgtcagtcaggagtgggtcattcagtgcttgattgtcggggagcgcatcggcttcaagcagcacccgaaatacaagcatgattatgtgagccactaa

SEQ ID NO: 52960 - DNA, 5933 bp, Artificial Sequence
  derived and/or modified sequence
atgccgggtgagcaaatggatccaacaggatcacagctagatagcgatttcagccagcaggacacaccatgcctgatcattgaagacagtcaacctgaatcccaggtattagaggacgatagtggctcccacttctctatgttgtcccggcatctgcccaacctgcagacacacaaggagaacccggtactcgatgtcgtctccaatccagagcagaccgcaggcgaagagcgaggagacggtaactccggcttcaatgagcaccttaaggagaacaaggtggcagatcccgtggattcctcaaacctggatacctgcggcagtatcagtcaagtgattgagcagctccctcagcccaaccgcacaagctccgtgcttggcatgtcagttgagtctgccccagctgtggaagaggaaaaaggcgaagagctcgaacagaaagagaaggagaaggaagaggatacctccgggaacaccacccactctttaggagccgaagacacagcatcaagtcaactcggattcggagtgctagaactttcccagagccaggacgtcgaggaaaataccgttccttacgaagttgacaaggaacagctgcagagtgttaccaccaacagtggctatacgaggctgtccgatgtagatgccaataccgcaattaaacacgaagaacagagcaacgaagatatccctattgccgaacagagctccaaagacattccggtcactgcgcaaccatctaaggacgtgcacgtggtcaaagaacagaacccgccaccggcacggagtgaggacatgccattttctcctaaggcaagcgtggccgcaatggaagccaaggaacaactgtccgctcaagaactgatggaatccggtctgcaaatacagaagtcacctgaaccagaggtgctgtccacccaggaagacctctttgaccagtccaacaagacagtgagttccgatggttgtagcacaccttccagagaggaggggggttgtagcttagcttcaacccccgcaacaacactacacctgctgcagctatctggccagagaagcctcgtccaggatagccttagcacgaatagtagcgaccttgttgctccgagtcctgatgcgtttagatcaacacctttcattgtgccatcttcccccaccgagcaggagggccgacaggataagccaatggacacgtcagttctgtctgaggagggcggagaaccttttcaaaaaaaactgcagtcgggagagccagtggagctggagaatcctcccctgttgcctgaaagcaccgtgagtccacaggctagtacaccaatttcgcagtcaacaccagtgtttccacctggtagtctccctatcccctctcaaccacagttttcccatgatatttttatcccctcccctagcttggaggagcaaagcaatgacggcaagaaggacggcgacatgcactcctcaagcctgactgttgagtgttctaagacctctgaaattgagccaaagaactctcctgaggatttagggctcagcctcacaggggattcctgcaagttgatgctaagcacatcggagtattctcagagtcccaaaatggaaagtcttagctcacatcgcattgacgaagatggcgagaatacccagattgaagatacagagccaatgtccccggtcctcaatagcaaatttgtgccggcagagaatgatagtatcttaatgaatccagcacaggacggcgaagtgcagctgtcccagaacgacgacaagaccaaaggagacgacactgatactcgcgacgatatctcaatcctggctacaggatgtaaagggagagaggagaccgtagccgaggatgtgtgcattgacctgacttgtgacagtggttcacaggccgtcccatcacctgccacccggagcgaagccctcagctccgttttagatcaggaggaagccatggaaatcaaggagcaccaccctgaggaagggagttcgggttcagaagtagaagaaatccccgagacaccttgtgagtctcaaggcgaagaacttaaggaggagaatatggaaagcgtcccgctacacctgtccctcaccgagactcagtcacaggggctgtgcctgcaaaaagaaatgcccaagaaggagtgcagcgaagcaatggaggtggaaacatctgtgatctctatagattcccctcagaaactcgcaattcttgatcaagagctggaacacaaggagcaagaggcatgggaggaggcaactagcgaggacagctcagttgtgattgtggatgtcaaggagccttctccacgagtggatgtgagctgcgaacctctcgaaggcgtggagaagtgctcagatagccagagttgggaggatatagctccggaaatcgagccttgcgccgaaaatcgactcgacactaaagaagagaaatctgtggaatatgagggtgatctcaagtctggtacggctgagaccgagcccgtcgagcaggatagcagccagccaagcctccctttggttagagccgatgaccccctgaggttggatcaggaactccagcagccacagacccaagaaaaaacttccaattccctgacagaagactctaaaatggctaacgccaagcagctgtcttctgatgccgaagcacaaaaattggggaagccctcggcacatgcaagccaatccttctgtgaaagcagcagcgagacaccattccactttactctgccaaaggagggtgacattatccctcctctcactggcgcaacacctcctctcattgggcacctaaagttagaacctaagcgccatagtactccgattggcattagcaattacccggagtctaccattgcaaccagcgatgttatgagcgagtccatggtggagactcacgaccctatccttggctccgggaagggcgattccggggctgctcctgacgtggacgataagctgtgtctccggatgaaactggtctctcctgagacggaggcgagtgaagaatcgctgcagttcaatttggagaaaccggctaccggggaacgaaagaacggttctaccgccgtggccgagtcagtggccagtcctcagaagaccatgtcggtgctcagctgcatatgtgaagcaaggcaggagaatgaggcgagaagtgaagacccgcctaccacccccattcgcggtaaccttttacacttcccttcctcccagggcgaggaggagaaagagaagttggagggggaccatactatcagacaaagccagcagcctatgaaacctatctcccctgtcaaagaccctgtaagccccgctagtcaaaagatggtaatacagggcccaagctcacctcagggcgaagccatggtcactgatgtactggaagaccagaaagaagggagatccaccaacaaagaaaacccaagcaaggcattgatagagcgcccttcacagaacaacattggcattcagacaatggagtgcagcctccgcgtgcccgaaactgtatcggctgccacacagaccattaaaaacgtgtgcgaacagggcacttccactgtagatcagaacttcggcaagcaggatgcaacggtccagaccgagagagggagcggcgaaaagcctgtctcagcccctggagacgacacagaaagccttcactcgcaaggggaagaggaattcgatatgccgcaacccccacacggccacgtactgcaccggcacatgcgaactatacgcgaggtgcgcactctggttactagagtaattactgacgtgtattatgtggacggcacagaggtcgagaggaaggtgacagaagagacagaggagccaatcgtcgaatgtcaggagtgcgaaaccgaggtctcaccctcacaaacgggcggatccagcggggacctaggggatatcagctctttcagcagcaaagcgtccagccttcacagaacatccagcgggacctccctttccgccatgcatagctctgggtcatcggggaagggggctggccctctaaggggtaagacaagcggaaccgagcccgctgattttgcgctgcccagcagtaggggaggtccaggaaagttgtctccacgcaaaggcgtttctcagactggtacaccagtctgcgaagaggacggcgacgctggcctgggaattcgtcaggggggaaaggctccagtaaccccacggggtcggggacgtcgcggacgaccaccaagtagaacaaccggtacacgagaaacagctgtgcccggacccttgggcatcgaggatattagccccaacctttcacctgatgataagagtttcagccgggtggtccctcgtgtaccagactctacaagaaggacagatgttggtgctggagccttgcgcaggtcagatagccccgaaatcccatttcaggcggctgcagggccttcggatggtctcgatgcctccagccccggaaactcattcgtcggcctaagagtagtcgcgaaatggtccagtaatggctatttctacagcggcaagatcactcgcgacgtgggcgctggcaagtacaagctgctgttcgacgacggttacgagtgtgatgtgctgggtaaagacattcttctctgtgaccccatcccgcttgatactgaggtgaccgctctaagcgaagatgagtattttagcgcaggggttgtgaagggccacagaaaggagtccggcgagctatattactctatagagaaagaggggcagcgaaagtggtacaagcgaatggcggtaattttatctctggagcaaggtaaccgcttgagagagcagtatggcctcggaccctacgaagctgtcactccactaactaaggccgcagatatctccctggacaacctcgttgaggggaaaagaaaaaggagatctaatgtgtcctctcctgctacccctacagcgtccagttccagttctacaactcctacaaggaagattaccgagtctcctcgagcatccatgggagtcctaagcggaaaacggaaactcatcaccagtgaggaggagaggagtccagcaaagcgcggacgcaaaagtgctacagtcaagcccggagcggttggtgcaggcgaatttgtatccccatgcgaaagcggcgataacactggggaaccatccgccctggaggagcaaagaggacctctcccactgaacaagacattattcctgggctacgcctttttattgactatggcgacgacttctgataaactggccagcagatcaaaactgcccgacggacccactggatcttccgaggaggaggaggagtttcttgaaattcccccatttaacaagcaatacaccgagagccaattgagggccggtgctggatacatcctcgaagatttcaatgaggctcagtgtaatacggcctatcagtgtctgcttattgcggaccaacactgcagaacccgtaagtactttttatgtttggccagtggcataccttgtgtgtcacacgtctgggttcacgacagctgtcatgccaaccagctgcagaactacaggaactacttacttccagccggttactccctggaggaacagaggatcctagactggcaaccacgcgaaaaccccttccaaaacctcaaagttctccttgtgtctgatcaacagcagaactttctcgaactgtggtccgagatcctaatgacagggggagccgcttccgtgaagcaacaccatagctccgcgcataataaagatatcgccctaggcgtgtttgacgtggtggtgacggatccaagctgccccgcaagtgtcttgaaatgcgctgaggcccttcaactgcccgtggtgtctcaggaatgggtgatccagtgtctcatcgtaggcgagcggattggctttaagcagcacccgaagtacaagcatgattacgtgagccacta

SEQ ID NO: 52961 - DNA, 6346 bp, Artificial Sequence
  derived and/or modified sequence
gaggggagccatcttgtccctctctgcctccgagtttgtatcgttgcctccatctgtgtctgtgtgtctgtattatcgttgtttggcgtgtttttttttttttttgttttttgtcactgcctgcctgggtcctgcccgaggtctccatcctcggtttccctgtccttgccccgggccctgggagtgctctggaaggctgcgcagtattggaggggacagaatgaccttccggccttgagtccctggggagcagatggaccctactggaagtcagttggattcagatttctctcagcaagatactccttgcctgataattgaagattctcagcctgaaagccaggttctagaggatgattctggttctcacttcagtatgctatctcgacaccttcctaatctccagacgcacaaagaaaatcctgtgttggatgttgtgtccaatcctgaacaaacagctggagaagaacgaggagacggtaatagtgggttcaatgaacatttgaaagaaaacaaggttgcagaccctgtggattcttctaacttggacacatgtggttccatcagtcaggtcattgagcagttacctcagccaaacaggacaagcagtgttctgggaatgtcagtggaatctgctcctgctgtggaggaagagaagggagaagagttggaacagaaggagaaagagaaggaagaagatacttcaggcaatactacacattcccttggtgctgaagatactgcctcatcacagttgggttttggggttctggaactctcccagagccaggatgttgaggaaaatactgtgccatatgaagtggacaaagagcagctacaatcagtaaccaccaactctggttataccaggctgtctgatgtggatgctaatactgcaattaagcatgaagaacagtccaacgaagatatccccatagcagaacagtccagcaaggacatccctgtgacagcacagcccagtaaggatgtacatgttgtaaaagagcaaaatccaccacctgcaaggtcagaggacatgccttttagccccaaagcatctgttgctgctatggaagcaaaagaacagttgtctgcacaagaacttatggaaagtggactgcagattcagaagtcaccagagcctgaggttttgtcaactcaggaagacttgtttgaccagagcaataaaacagtatcttctgatggttgctctactccttcaagggaggaaggtgggtgttctttggcttccactcctgccaccactctgcatctcctgcagctctctggtcagaggtcccttgttcaggacagtctttccacgaattcttcagatcttgttgctccttctcctgatgctttccgatctactccttttatcgttcctagcagtcccacagagcaagaagggagacaagataagccaatggacacgtcagtgttatctgaagaaggaggagagccttttcagaagaaacttcaaagtggtgaaccagtggagttagaaaacccccctctcctgcctgagtccactgtatcaccacaagcctcaacaccaatatctcagagcacaccagtcttccctcctgggtcacttcctatcccatcccagcctcagttttctcatgacatttttattccttccccaagtctggaagaacaatcaaatgatgggaagaaagatggagatatgcatagttcatctttgacagttgagtgttctaaaacttcagagattgaaccaaagaattcccctgaggatcttgggctatctttgacaggggattcttgcaagttgatgctttctacaagtgaatatagtcagtccccaaagatggagagcttgagttctcacagaattgatgaagatggagaaaacacacagattgaggatacggaacccatgtctccagttctcaattctaaatttgttcctgctgaaaatgatagtatcctgatgaatccagcacaggatggtgaagtacaactgagtcagaatgatgacaaaacaaagggagatgatacagacaccagggatgacattagtattttagccactggttgcaagggcagagaagaaacggtagcagaagatgtttgtattgatctcacttgtgattcggggagtcaggcagttccgtcaccagctactcgatctgaggcactttctagtgtgttagatcaggaggaagctatggaaattaaagaacaccatccagaggaggggtcttcagggtctgaggtggaagaaatccctgagacaccttgtgaaagtcaaggagaggaactcaaagaagaaaatatggagagtgttccgttgcacctttctctgactgaaactcagtcccaagggttgtgtcttcaaaaggaaatgccaaaaaaagaatgctcagaagctatggaagttgaaaccagtgtgattagtattgattcccctcaaaagttggcaatacttgaccaagaattggaacataaggaacaggaagcttgggaagaagctacttcagaggactccagtgttgtcattgtagatgtgaaagagccatctcccagagttgatgtttcttgtgaacctttggagggagtggagaagtgctcagattcccagtcatgggaggatattgctccagaaatagaaccatgtgctgagaatagattagacaccaaggaagaaaagagtgtagaatatgaaggagatctgaaatcagggactgcagaaacagaacctgtagagcaagattcttcacagccttccttacctttagtgagagcagatgatcctttaagacttgaccaggagttgcagcagccccaaactcaggagaaaacaagtaattcattaacagaagactcaaaaatggctaatgcaaagcagctaagctcagatgcagaggcccagaagctggggaagccctctgcccatgcctcacaaagcttctgtgaaagttctagtgaaaccccatttcatttcactttgcctaaagaaggtgatatcatcccaccattgactggtgcaaccccacctcttattgggcacctaaaattggagcccaagagacacagtactcctattggtattagcaactatccagaaagcaccatagcaaccagtgatgtcatgtctgaaagcatggtggagacccatgatcccatacttgggagtggaaaaggggattctggggctgccccagacgtggatgataaattatgtctaagaatgaaactggttagtcctgagactgaggcgagtgaagagtctttgcagttcaacctggaaaagcctgcaactggtgaaagaaaaaatggatctactgctgttgctgagtctgttgccagtccccagaagaccatgtctgtgttgagctgtatctgtgaagccaggcaagagaatgaggctcgaagtgaggatccccccaccacacccatcagggggaacttgctccactttccaagttctcaaggagaagaggagaaagaaaaattggagggtgaccatacaatcaggcagagtcaacagcctatgaagcccattagtcctgtcaaggaccctgtttctcctgcttcccagaagatggtcatacaagggccatccagtcctcaaggagaggcaatggtgacagatgtgctagaagaccagaaagaaggacggagtactaataaggaaaatcctagtaaggccttgattgaaaggcccagccaaaataacataggaatccaaaccatggagtgttccttgagggtcccagaaactgtttcagcagcaacccagactataaagaatgtgtgtgagcaggggaccagtacagtggaccagaactttggaaagcaagatgccacagttcagactgagagggggagtggtgagaaaccagtcagtgctcctggggatgatacagagtcgctccatagccagggagaagaagagtttgatatgcctcagcctccacatggccatgtcttacatcgtcacatgagaacaatccgggaagtacgcacacttgtcactcgtgtcattacagatgtgtattatgtggatggaacagaagtagaaagaaaagtaactgaggagactgaagagccaattgtagagtgtcaggagtgtgaaactgaagtttccccttcacagactgggggctcctcaggtgacctgggggatatcagctccttctcctccaaggcatccagcttacaccgcacatcaagtgggacaagtctctcagctatgcacagcagtggaagctcagggaaaggagccggaccactcagagggaaaaccagcgggacagaacccgcagattttgccttacccagctcccgaggaggcccaggaaaactgagtcctagaaaaggggtcagtcagacagggacgccagtgtgtgaggaggatggtgatgcaggccttggcatcagacagggagggaaggctccagtcacgcctcgtgggcgtgggcgaaggggccgcccaccttctcggaccactggaaccagagaaacagctgtgcctggccccttgggcatagaggacatttcacctaacttgtcaccagatgataaatccttcagccgtgtcgtgccccgagtgccagactccaccagacgaacagatgtgggtgctggtgctttgcgtcgtagtgactctccagaaattcctttccaggctgctgctggcccttctgatggcttagatgcctcctctccaggaaatagctttgtagggctccgtgttgtagccaagtggtcatccaatggctacttttactctgggaaaatcacacgagatgtcggagctgggaagtataaattgctctttgatgatgggtacgaatgtgatgtgttgggcaaagacattctgttatgtgaccccatcccgctggacactgaagtgacggccctctcggaggatgagtatttcagtgcaggagtggtgaaaggacataggaaggagtctggggaactgtactacagcattgaaaaagaaggccaaagaaagtggtataagcgaatggctgtcatcctgtccttggagcaaggaaacagactgagagagcagtatgggcttggcccctatgaagcagtaacacctcttacaaaggcagcagatatcagcttagacaatttggtggaagggaagcggaaacggcgcagtaacgtcagctccccagccacccctactgcctccagtagcagcagcacaacccctacccgaaagatcacagaaagtcctcgtgcctccatgggagttctctcaggcaaaagaaaacttatcacttctgaagaggaacggtcccctgccaagcgaggtcgcaagtctgccacagtaaaacctggtgcagtaggggcaggagagtttgtgagcccctgtgagagtggagacaacaccggtgaaccctctgccctggaagagcagagagggcctttgcctctcaacaagaccttgtttctgggctacgcatttctccttaccatggccacaaccagtgacaagttggccagccgctccaaactgccagatggtcctacaggaagcagtgaagaagaggaggaatttttggaaattcctcctttcaacaagcagtatacagaatcccagcttcgagcaggagctggctatatccttgaagatttcaatgaagcccagtgtaacacagcttaccagtgtcttctaattgcggatcagcattgtcgaacccggaagtacttcctgtgccttgccagtgggattccttgtgtgtctcatgtctgggtccatgatagttgccatgccaaccagctccagaactaccgtaattatctgttgccagctgggtacagccttgaggagcaaagaattctggactggcaaccccgtgaaaatcctttccagaatctgaaggtactcttggtatcagaccaacagcagaacttcctggagctctggtctgagatcctcatgactggtggtgcagcctctgtgaagcagcaccattcaagtgcccataacaaagatattgctttaggggtatttgatgtggtggtgacggacccctcatgcccagcctcggtgctgaagtgtgctgaagcattgcagctgcctgtggtgtcacaagagtgggtgatccagtgcctcattgttggggagagaattggattcaagcagcatccaaaatataaacacgattatgtttctcactaaagatacttggtcttactggttttattccctgctatcgtggagattgtgttttaaccaggttttaaatgtgtcttgtgtgtaactggattccttgcatggatcttgtatatagttttatttgctgaacttttatgataaaataaatgttgaatctctttggttgtagtaactggg

SEQ ID NO: 52962 - DNA, 6231 bp, Artificial Sequence
  derived and/or modified sequence
gtgacgggaaagggggagttcgcggccggtggcggcggtggcgacagcggcgacctagggatcgatctggagggacttggggagcgtgcagagacctctagctcgagcgcgagggacctcccgccgggatgcctggggagcagatggaccctactggaagtcagttggattcagatttctctcagcaagatactccttgcctgataattgaagattctcagcctgaaagccaggttctagaggatgattctggttctcacttcagtatgctatctcgacaccttcctaatctccagacgcacaaagaaaatcctgtgttggatgttgtgtccaatcctgaacaaacagctggagaagaacgaggagacggtaatagtgggttcaatgaacatttgaaagaaaacaaggttgcagaccctgtggattcttctaacttggacacatgtggttccatcagtcaggtcattgagcagttacctcagccaaacaggacaagcagtgttctgggaatgtcagtggaatctgctcctgctgtggaggaagagaagggagaagagttggaacagaaggagaaagagaaggaagaagatacttcaggcaatactacacattcccttggtgctgaagatactgcctcatcacagttgggttttggggttctggaactctcccagagccaggatgttgaggaaaatactgtgccatatgaagtggacaaagagcagctacaatcagtaaccaccaactctggttataccaggctgtctgatgtggatgctaatactgcaattaagcatgaagaacagtccaacgaagatatccccatagcagaacagtccagcaaggacatccctgtgacagcacagcccagtaaggatgtacatgttgtaaaagagcaaaatccaccacctgcaaggtcagaggacatgccttttagccccaaagcatctgttgctgctatggaagcaaaagaacagttgtctgcacaagaacttatggaaagtggactgcagattcagaagtcaccagagcctgaggttttgtcaactcaggaagacttgtttgaccagagcaataaaacagtatcttctgatggttgctctactccttcaagggaggaaggtgggtgttctttggcttccactcctgccaccactctgcatctcctgcagctctctggtcagaggtcccttgttcaggacagtctttccacgaattcttcagatcttgttgctccttctcctgatgctttccgatctactccttttatcgttcctagcagtcccacagagcaagaagggagacaagataagccaatggacacgtcagtgttatctgaagaaggaggagagccttttcagaagaaacttcaaagtggtgaaccagtggagttagaaaacccccctctcctgcctgagtccactgtatcaccacaagcctcaacaccaatatctcagagcacaccagtcttccctcctgggtcacttcctatcccatcccagcctcagttttctcatgacatttttattccttccccaagtctggaagaacaatcaaatgatgggaagaaagatggagatatgcatagttcatctttgacagttgagtgttctaaaacttcagagattgaaccaaagaattcccctgaggatcttgggctatctttgacaggggattcttgcaagttgatgctttctacaagtgaatatagtcagtccccaaagatggagagcttgagttctcacagaattgatgaagatggagaaaacacacagattgaggatacggaacccatgtctccagttctcaattctaaatttgttcctgctgaaaatgatagtatcctgatgaatccagcacaggatggtgaagtacaactgagtcagaatgatgacaaaacaaagggagatgatacagacaccagggatgacattagtattttagccactggttgcaagggcagagaagaaacggtagcagaagatgtttgtattgatctcacttgtgattcggggagtcaggcagttccgtcaccagctactcgatctgaggcactttctagtgtgttagatcaggaggaagctatggaaattaaagaacaccatccagaggaggggtcttcagggtctgaggtggaagaaatccctgagacaccttgtgaaagtcaaggagaggaactcaaagaagaaaatatggagagtgttccgttgcacctttctctgactgaaactcagtcccaagggttgtgtcttcaaaaggaaatgccaaaaaaagaatgctcagaagctatggaagttgaaaccagtgtgattagtattgattcccctcaaaagttggcaatacttgaccaagaattggaacataaggaacaggaagcttgggaagaagctacttcagaggactccagtgttgtcattgtagatgtgaaagagccatctcccagagttgatgtttcttgtgaacctttggagggagtggagaagtgctcagattcccagtcatgggaggatattgctccagaaatagaaccatgtgctgagaatagattagacaccaaggaagaaaagagtgtagaatatgaaggagatctgaaatcagggactgcagaaacagaacctgtagagcaagattcttcacagccttccttacctttagtgagagcagatgatcctttaagacttgaccaggagttgcagcagccccaaactcaggagaaaacaagtaattcattaacagaagactcaaaaatggctaatgcaaagcagctaagctcagatgcagaggcccagaagctggggaagccctctgcccatgcctcacaaagcttctgtgaaagttctagtgaaaccccatttcatttcactttgcctaaagaaggtgatatcatcccaccattgactggtgcaaccccacctcttattgggcacctaaaattggagcccaagagacacagtactcctattggtattagcaactatccagaaagcaccatagcaaccagtgatgtcatgtctgaaagcatggtggagacccatgatcccatacttgggagtggaaaaggggattctggggctgccccagacgtggatgataaattatgtctaagaatgaaactggttagtcctgagactgaggcgagtgaagagtctttgcagttcaacctggaaaagcctgcaactggtgaaagaaaaaatggatctactgctgttgctgagtctgttgccagtccccagaagaccatgtctgtgttgagctgtatctgtgaagccaggcaagagaatgaggctcgaagtgaggatccccccaccacacccatcagggggaacttgctccactttccaagttctcaaggagaagaggagaaagaaaaattggagggtgaccatacaatcaggcagagtcaacagcctatgaagcccattagtcctgtcaaggaccctgtttctcctgcttcccagaagatggtcatacaagggccatccagtcctcaaggagaggcaatggtgacagatgtgctagaagaccagaaagaaggacggagtactaataaggaaaatcctagtaaggccttgattgaaaggcccagccaaaataacataggaatccaaaccatggagtgttccttgagggtcccagaaactgtttcagcagcaacccagactataaagaatgtgtgtgagcaggggaccagtacagtggaccagaactttggaaagcaagatgccacagttcagactgagagggggagtggtgagaaaccagtcagtgctcctggggatgatacagagtcgctccatagccagggagaagaagagtttgatatgcctcagcctccacatggccatgtcttacatcgtcacatgagaacaatccgggaagtacgcacacttgtcactcgtgtcattacagatgtgtattatgtggatggaacagaagtagaaagaaaagtaactgaggagactgaagagccaattgtagagtgtcaggagtgtgaaactgaagtttccccttcacagactgggggctcctcaggtgacctgggggatatcagctccttctcctccaaggcatccagcttacaccgcacatcaagtgggacaagtctctcagctatgcacagcagtggaagctcagggaaaggagccggaccactcagagggaaaaccagcgggacagaacccgcagattttgccttacccagctcccgaggaggcccaggaaaactgagtcctagaaaaggggtcagtcagacagggacgccagtgtgtgaggaggatggtgatgcaggccttggcatcagacagggagggaaggctccagtcacgcctcgtgggcgtgggcgaaggggccgcccaccttctcggaccactggaaccagagaaacagctgtgcctggccccttgggcatagaggacatttcacctaacttgtcaccagatgataaatccttcagccgtgtcgtgccccgagtgccagactccaccagacgaacagatgtgggtgctggtgctttgcgtcgtagtgactctccagaaattcctttccaggctgctgctggcccttctgatggcttagatgcctcctctccaggaaatagctttgtagggctccgtgttgtagccaagtggtcatccaatggctacttttactctgggaaaatcacacgagatgtcggagctgggaagtataaattgctctttgatgatgggtacgaatgtgatgtgttgggcaaagacattctgttatgtgaccccatcccgctggacactgaagtgacggccctctcggaggatgagtatttcagtgcaggagtggtgaaaggacataggaaggagtctggggaactgtactacagcattgaaaaagaaggccaaagaaagtggtataagcgaatggctgtcatcctgtccttggagcaaggaaacagactgagagagcagtatgggcttggcccctatgaagcagtaacacctcttacaaaggcagcagatatcagcttagacaatttggtggaagggaagcggaaacggcgcagtaacgtcagctccccagccacccctactgcctccagtagcagcagcacaacccctacccgaaagatcacagaaagtcctcgtgcctccatgggagttctctcaggcaaaagaaaacttatcacttctgaagaggaacggtcccctgccaagcgaggtcgcaagtctgccacagtaaaacctggtgcagtaggggcaggagagtttgtgagcccctgtgagagtggagacaacaccggtgaaccctctgccctggaagagcagagagggcctttgcctctcaacaagaccttgtttctgggctacgcatttctccttaccatggccacaaccagtgacaagttggccagccgctccaaactgccagatggtcctacaggaagcagtgaagaagaggaggaatttttggaaattcctcctttcaacaagcagtatacagaatcccagcttcgagcaggagctggctatatccttgaagatttcaatgaagcccagtgtaacacagcttaccagtgtcttctaattgcggatcagcattgtcgaacccggaagtacttcctgtgccttgccagtgggattccttgtgtgtctcatgtctgggtccatgatagttgccatgccaaccagctccagaactaccgtaattatctgttgccagctgggtacagccttgaggagcaaagaattctggactggcaaccccgtgaaaatcctttccagaatctgaaggtactcttggtatcagaccaacagcagaacttcctggagctctggtctgagatcctcatgactggtggtgcagcctctgtgaagcagcaccattcaagtgcccataacaaagatattgctttaggggtatttgatgtggtggtgacggacccctcatgcccagcctcggtgctgaagtgtgctgaagcattgcagctgcctgtggtgtcacaagagtgggtgatccagtgcctcattgttggggagagaattggattcaagcagcatccaaaatataaacacgattatgtttctcactaaagatacttggtcttactggttttattccctgctatcgtggagattgtgttttaaccaggttttaaatgtgtcttgtgtgtaactggattccttgcatggatcttgtatatagttttatttgctgaacttttatgataaaataaatgttgaatctctttggttgtagtaa

SEQ ID NO: 52963 - protein, 701 aa, Artificial Sequence
  derived and/or modified sequence
MAVSAGSARTSPSSGFLMVLDIPQERGLSSLDRKYLDGLDVCRFPLLDALRPLPLDWMYLVYTIMFLGALGMMLGLCYRISCVLFLLPYWYVFLLDKTSWNNHSYLYGLLAFQLTFMDANHYWSVDGLLNAHRRNAHVPLWNYAVLRGQIFIVYFIAGVKKLDADWVEGYSMEYLSRHWLFSPFKLLLSEELTSLLVVHWGGLLLDLSAGFLLFFDVSRSIGLFFVSYFHCMNSQLFSIGMFSYVMLASSPLFCSPEWPRKLVSYCPRRLQQLLPLKAAPQPSVSCVYKRSRGKSGQKPGLRHQLGAAFTLLYLLEQLFLPYSHFLTQGYNNWTNGLYGYSWDMMVHSRSHQHVKITYRDGRTGELGYLNPGVFTQSRRWKDHADMLKQYATCLSRLLPKYNVTEPQIYFDIWVSINDRFQQRIFDPRVDIVQAAWSPFQRTSWVQPLLMDLSPWRAKLQEIKSSLDNHTEVVFIADFPGLHLENFVSEDLGNTSIQLLQGEVTVELVAEQKNQTLREGEKMQLPAGEYHKVYTTSPSPSCYMYVYVNTTELALEQDLAYLQELKEKVENGSETGPLPPELQPLLEGEVKGGPEPTPLVQTFLRRQQRLQEIERRRNTPFHERFFRFLLRKLYVFRRSFLMTCISLRNLILGRPSLEQLAQEVTYANLRPFEAVGELNPSNTDSSHSNPPESNPDPVHSEF

SEQ ID NO: 52964 - DNA, 2106 bp, Artificial Sequence
  derived and/or modified sequence
atggctgtctcagccggctcggcacggacgagcccctcaagcgggtttctgatggttctggatataccccaggaaagagggctgagtagtctcgacaggaagtacctggatggtcttgatgtgtgccggttcccgctattagacgcattgagaccccttcctttagactggatgtatctggtgtatacaattatgttccttggcgccctgggcatgatgcttgggctgtgctataggataagctgtgttctgtttctccttccctattggtatgtgtttcttctcgacaaaacaagttggaataaccacagttacctttacggcctactggcgttccagttaaccttcatggatgccaatcactactggtcggtagatgggctgctgaacgcccaccggcggaatgcccatgtgccactgtggaattatgcagtgctgcggggtcagattttcatcgtctatttcatcgcaggcgtaaaaaaactggacgcagactgggtggagggctactccatggaatatctgagccggcattggctattttccccttttaaattactcctcagcgaggagcttacctcgctgctggttgtccattggggcggactactgctggacctgtcagcggggttcctgttattcttcgatgtgagcaggtcgattgggctgttcttcgtgtcctacttccactgcatgaactcacaactcttcagcatcggcatgttttcgtacgttatgctggcaagcagccccctgttttgttctcctgaatggcctaggaagctggtgtcctactgtccccgcaggttgcagcagttattgccgttgaaggccgccccccaaccaagtgtgtcttgcgtctacaagcggagccgcggcaaaagcgggcagaagcctggacttagacatcagttaggagctgcctttacgctgctgtacctactggaacagctcttcctgccgtatagtcacttcctgacacaaggttataataactggaccaatggactgtatggatactcttgggacatgatggtgcattcacgttctcaccagcatgtgaagatcacttatcgggacggacggaccggggagttagggtatctcaatccaggagtattcacccaaagtcgccggtggaaagatcacgccgatatgctaaagcagtacgctacctgtctctctaggcttttgccaaagtacaatgtcacagagccacagatttactttgacatttgggtgtccattaacgaccgcttccagcagagaattttcgacccccgggtggatattgttcaggccgcatggagcccttttcagagaacctcctgggtccaacccctgctaatggatcttagcccctggagggccaaactccaagaaataaaatccagtctggacaatcataccgaggtcgtgtttatcgccgactttccgggactccacctcgagaacttcgtttcagaggacctgggcaacaccagtattcagctgctacagggggaggttacggtcgaactagtggcagagcagaaaaatcagacgctgcgggaaggggagaagatgcagctgcccgccggggaatatcacaaagtgtacacaacttcccctagtccttcatgttatatgtacgtatacgtcaatacgacagagctggctctggaacaggatctcgcctatctccaggagctgaaagagaaagtggagaatggatccgagactggtccattgcctcccgaactgcagccactgctcgaaggagaggtgaagggtggccccgaacctacacctctggtacagacctttcttagaagacaacaacggctccaagaaatagagaggcggagaaatacaccatttcacgaaaggttttttagattcctgctgagaaagctgtatgtgttcaggcgcagttttctcatgacttgtattagtctgcggaacctgatcctgggcagacctagcctagagcaactggcccaggaggtaacctacgctaatttaagaccgtttgaggcagtaggagaattaaatccatccaacacagactcctctcactcaaatccacccgaatctaatcctgaccccgttcatagcgaattctag

SEQ ID NO: 52965 - DNA, 2314 bp, Artificial Sequence
  derived and/or modified sequence
acagccgctgacgcgtcgggaggcggagcctagggaagcaaattctcctggcggcctccgttcagacgcggcagctgtgacccacctgcctcctccgcagagcaatggcggtgtctgccgggtccgcgcggacctcgcccagctcagggttcttgatggtgctagacattccccaggagcgggggctcagctctctggaccggaaataccttgatgggctggatgtgtgccgcttccccttgctggatgccctacgcccactgccacttgactggatgtatcttgtctacaccatcatgtttctgggggcactgggcatgatgctgggcctgtgctaccggataagctgtgtgttattcctgctgccatactggtatgtgtttctcctggacaagacatcatggaacaaccactcctatctgtatgggttgttggcctttcagctaacattcatggatgcaaaccactactggtctgtggacggtctgctgaatgcccataggaggaatgcccacgtgcccctttggaactatgcagtgctccgtggccagatcttcattgtgtacttcattgcgggtgtgaaaaagctggatgcagactgggttgaaggctattccatggaatatttgtcccggcactggctcttcagtcccttcaaactgctgttgtctgaggagctgactagcctgctggtcgtgcactggggtgggctgctgcttgacctctcagctggtttcctgctcttttttgatgtctcaagatccattggactgttctttgtgtcctacttccactgcatgaattcccagcttttcagcattggtatgttctcctacgtcatgctggccagcagccctctcttctgctcccctgagtggcctcggaagctggtgtcctactgcccccgaaggttgcaacaactgttgcccctcaaggcagcccctcagcccagtgtttcctgtgtgtataagaggagccggggcaaaagtggccagaagccagggctgcgccatcagctgggagctgccttcaccctgctctacctcctggagcagctattcctgccctattctcattttctcacccagggctataacaactggacaaatgggctgtatggctattcctgggacatgatggtgcactcccgctcccaccagcacgtgaagatcacctaccgtgatggccgcactggcgaactgggctaccttaaccctggggtatttacacagagtcggcgatggaaggatcatgcagacatgctgaagcaatatgccacttgcctgagccgcctgcttcccaagtataatgtcactgagccccagatctactttgatatttgggtctccatcaatgaccgcttccagcagaggatttttgaccctcgtgtggacatcgtgcaggccgcttggtcaccctttcagcgcacatcctgggtgcaaccactcttgatggacctgtctccctggagggccaagttacaggaaatcaagagcagcctagacaaccacactgaggtggtcttcattgcagatttccctggactgcacttggagaattttgtgagtgaagacctgggcaacactagcatccagctgctgcagggggaagtgactgtggagcttgtggcagaacagaagaaccagactcttcgagagggagaaaaaatgcagttgcctgctggtgagtaccataaggtgtatacgacatcacctagcccttcttgctacatgtacgtctatgtcaacactacagagcttgcactggagcaagacctggcatatctgcaagaattaaaggaaaaggtggagaatggaagtgaaacagggcctctacccccagagctgcagcctctgttggaaggggaagtaaaagggggccctgagccaacacctctggttcagacctttcttagacgccaacaaaggctccaggagattgaacgccggcgaaatactcctttccatgagcgattcttccgcttcttgttgcgaaagctctatgtctttcgccgcagcttcctgatgacttgtatctcacttcgaaatctgatattaggccgtccttccctggagcagctggcccaggaggtgacttatgcaaacttgagaccctttgaggcagttggagaactgaatccctcaaacacggattcttcacattctaatcctcctgagtcaaatcctgatcctgtccactcagagttctgaagggggccagatgttgggtgcagatgtagaagcagccagtcacagacccattctatgcaatggacatttatttgaaaaaaattctcaaaagttttttttttttt

SEQ ID NO: 52966 - DNA, 2106 bp, Artificial Sequence
  derived and/or modified sequence
atggctgtgtctgctggcagcgcccggaccagccccagcagcggcttcctgatggtgctggacatcccccaggagcggggcctgagcagcctggacaggaagtacctggatggcctggatgtgtgccgcttccccctgctggatgccctgcggcccctgcccctggactggatgtacctggtgtacaccatcatgttcctgggcgccctgggcatgatgctgggcctgtgctaccgcatcagctgtgtgctcttcctgctgccctactggtacgtgttcctgctggacaagacctcctggaacaaccacagctacctgtatggcctgctggccttccagctgaccttcatggatgccaaccactactggagcgtggatggcctgctgaatgcccacagaagaaatgcccacgtgcccctgtggaactatgctgtgctgcggggccagatcttcatcgtgtacttcatcgccggcgtgaagaagctggatgctgactgggtggagggctacagcatggagtacctgagccgccactggctgttcagccccttcaagctgctgctgtctgaggagctgaccagcctgctggtggtgcactggggcggcctgctgctggacctgtctgctggcttcctgctcttctttgatgtgagccgcagcatcggcctcttctttgtgtcctacttccactgcatgaacagccagctgttcagcatcggcatgttctcctatgtgatgctggccagcagccccctcttctgcagccctgagtggcccaggaagctggtgtcctactgcccccggcggctgcagcagctgctgcccctgaaggccgccccccagcccagcgtgtcctgtgtgtacaagaggagccggggcaagagcggccagaagccaggcctgcggcaccagctgggcgccgccttcaccctgctgtacctgctggagcagctgttcctgccctacagccacttcctgacccagggctacaacaactggaccaacggcctgtatggctacagctgggacatgatggtgcacagccgcagccaccagcacgtgaagatcacctacagagatggccgcactggagagctgggctacctgaaccctggggtcttcacccagagccgccgctggaaggaccacgccgacatgctgaagcagtatgccacctgcctgagccggctgctgcccaagtacaacgtgacagagccccagatctactttgacatctgggtgtccatcaatgaccgcttccagcagaggatctttgacccccgggtggacatcgtgcaggccgcctggagccccttccagaggacctcctgggtgcagcccctgctgatggacctgagcccctggagggccaagctgcaggagatcaagagcagcctggacaaccacacagaggtggtgttcatcgctgacttccctggcctgcacctggagaactttgtgtctgaggacctgggcaacaccagcatccagctgctgcagggcgaggtgacagtggagctggtggccgagcagaagaaccagaccctgcgggagggggagaagatgcagctgcctgctggggagtaccacaaggtgtacaccaccagccccagccccagctgctacatgtatgtgtatgtgaacaccacagagctggccctggagcaggacctggcctacctgcaggagctgaaggagaaggtggagaatggcagcgagaccggccccctgcccccagagctgcagcccctgctggagggggaggtgaagggcggccctgagcccacccccctggtgcagaccttcctgcggcggcagcagaggctgcaggagattgaaagaagaagaaacacccccttccacgagcgcttcttccgcttcctgctgaggaagctgtatgtgttccgccgctccttcctgatgacctgcatcagcctgaggaacctgatcctgggccggcccagcctggagcagctggcccaggaggtgacctacgccaacctgcggccctttgaagctgtgggggagctgaaccccagcaacacagacagcagccacagcaaccccccagagagcaacccagaccctgtgcacagcgagttctag

SEQ ID NO: 52967 - DNA, 2106 bp, Artificial Sequence
  derived and/or modified sequence
atggccgtgagcgccggcagcgcccggaccagccccagcagcggctttcttatggtcctagacattccacaggaacgcggccttagcagtctggacagaaagtacctcgatggcctggacgtgtgccgtttccctctcctcgatgctctgaggccgctacccctggattggatgtacctcgtttacaccatcatgttcctgggtgctctgggaatgatgctgggcctgtgctacaggatcagttgtgttctgttcctgctgccctactggtatgtcttcctgttagataaaacctcatggaataatcactcttatctgtacgggttactggccttccagcttacctttatggacgccaatcactactggagcgttgacgggcttctgaatgctcaccggcgcaacgctcacgtgccgttatggaattatgcggtgttacgtggccaaattttcatcgtgtactttattgcaggcgtgaagaagctggacgccgactgggttgaggggtacagcatggagtatttatccagacactggctcttttcacccttcaaactgcttcttagtgaggagcttacatctctcttagttgtacactgggggggtttactgctggacctctccgccgggttcctgttgtttttcgatgtgtctagaagcatcggcctgttctttgtgtcctatttccattgtatgaactcgcaattattctccataggaatgttctcttatgtcatgttggcatcaagccccctcttttgctcccctgagtggcctagaaagttggtaagctactgccctagacgattacagcagctgcttccactcaaagcagcccctcaacccagcgtgagctgtgtgtacaaaaggagccgcggaaaatctggccagaaacctggccttcgtcatcagttaggtgccgcgtttactttgctctacttgctcgaacaactgttcctgccctacagtcattttctgacccaggggtacaacaattggacaaacggcctgtacggatatagttgggatatgatggtgcactcacggagtcatcagcacgtcaaaatcacctacagagatggccggaccggcgagctgggatacctgaacccaggagtctttacacagtcacggaggtggaaagaccatgctgacatgctgaagcagtatgccacctgtttgtccagactgttgccaaaatacaatgttaccgagcctcagatttattttgatatttgggtgtcaatcaatgataggtttcagcagaggatattcgatcctagagtagacatagtacaagctgcatggagcccatttcaacgcacttcctgggtacagccccttttgatggacctgtctccctggagggcaaagttacaagagatcaaatcgagccttgacaaccacacagaggtggtcttcatagcagattttcccggcctacacctggaaaacttcgtgtctgaagatctcggaaacacaagcattcagctactccagggggaggtaactgtcgaacttgttgcagagcagaagaatcagaccctaagggaaggggagaagatgcagctgcccgcaggggagtaccacaaggtatacaccacatctccgtctccctcctgctatatgtatgtgtacgttaacaccactgaactcgccctggagcaggatttggcatacctacaggagctgaaggagaaggtagaaaacgggagcgagaccggcccactgcctcccgaattacaacctctgctcgaaggagaagtcaaaggcggccccgagcccactcctcttgtgcaaaccttcctgcgacgacagcaacggttgcaggagattgaacgaagaaggaatacgcccttccatgagcgtttcttccgatttctgttaagaaagctgtacgtctttcggaggtccttcctgatgacctgtattagtctgcgcaatttgatcctcggccgaccatcgttggaacagctagctcaagaggtcacatacgcaaacctacggcctttcgaggctgtaggagagctcaatccctcaaacaccgacagctcccacagtaatccccccgagtcaaatccggaccccgtgcatagcgagttctag

SEQ ID NO: 52968 - DNA, 2106 bp, Artificial Sequence
  derived and/or modified sequence
atggcagtgtccgctggaagcgctcgcacatccccctccagtggttttctgatggttctggatatccctcaggagagaggattaagctccttggatagaaaatacctggacggcctggatgtgtgtaggtttcccttgctagatgcactgaggccactccctctggactggatgtacttggtgtacaccattatgttcctcggagcgctggggatgatgcttggcctgtgttaccgtattagttgcgtcttgtttctgcttccgtactggtacgtgttcttactcgacaaaacatcttggaacaaccattcatacctgtacggattgctcgccttccagttaaccttcatggacgccaatcattactggagtgtcgatgggctgttaaacgctcacaggaggaatgcccatgtgcctttatggaattacgccgtgctgagaggccaaatctttattgtatactttattgcgggagtgaaaaaattagatgctgactgggtggagggatactctatggaatacctgtcacgccattggctgttcagccccttcaagctgctcctttccgaggaactgacctctctgcttgtggtacattgggggggattactgctggacttatctgctggcttcttgctgtttttcgacgtgtcaaggagtattggcctgtttttcgtgtcctattttcattgcatgaatagtcagctttttagcattggcatgttcagctacgtgatgctcgcaagttctccactgttttgttctcctgagtggcccaggaagttagtatcatactgtcctaggaggctacagcagctgctgccactgaaggccgctccccagccctcagtgtcatgtgtgtataaacgatcgaggggcaaatcgggacagaagcctggattgagacatcagttgggggctgcattcaccctgctctacctgctcgaacagctgttcctcccctactctcactttctgacccagggatataacaattggacaaacgggttatatgggtactcctgggatatgatggtgcatagtcgcagtcaccaacacgttaagattacttaccgtgacggaagaaccggagagctgggatatctgaaccctggtgtatttacacaatcaagaaggtggaaagatcatgcagacatgctcaaacagtacgcaacatgcctgagccgactgctcccaaaatataacgtgacggaacctcagatttattttgacatctgggtgagtatcaacgaccgctttcagcaacggatcttcgatccgagagtggacattgtccaggccgcatggtctccatttcagaggacctcgtgggtccaaccactgctgatggatttatcaccctggcgagctaagcttcaggagattaaaagtagccttgacaatcacactgaagtcgtttttattgcggacttccctggtcttcatctcgagaactttgtaagcgaagacttggggaacacctccatccaactgctgcagggcgaagttacagtcgaacttgtggctgagcagaagaatcagactctaagagagggagagaaaatgcagctgcccgctggggaataccataaggtgtataccaccagcccatctccctcgtgctacatgtatgtctacgtgaacacaactgagctcgctctagagcaagatctcgcatatctccaggaactcaaggaaaaagttgagaacggaagcgaaacaggacctctgccgccagagctgcaaccactcctggaaggggaagttaaaggcggacccgagccaactccattagtccagacattcctgaggagacaacagcggctgcaagagattgagcgcagacgcaacactccgtttcacgaacgctttttcagattccttctgagaaagctctatgtattccgacgcagcttcttgatgacttgcatcagtctgcgcaacctgattctagggaggccatcactggaacagctcgcccaagaagtcacctatgcgaacctgagaccttttgaagccgttggggagctcaatccgtctaacaccgacagcagccatagtaaccccccagaaagcaatccagaccccgtgcacagcgaattctag

SEQ ID NO: 52969 - DNA, 2106 bp, Artificial Sequence
  derived and/or modified sequence
atggccgtgagcgccggcagcgccagaaccagccccagcagcggcttcctgatggtgctggacatcccccaggagagaggcctgagcagcctggacagaaagtacctggacggcctggacgtgtgcagattccccctgctggacgccctgagacccctgcccctggactggatgtacctggtgtacaccatcatgttcctgggcgccctgggcatgatgctgggcctgtgctacagaatcagctgcgtgctgttcctgctgccctactggtacgtgttcctgctggacaagaccagctggaacaaccacagctacctgtacggcctgctggccttccagctgaccttcatggacgccaaccactactggagcgtggacggcctgctgaacgcccacagaagaaacgcccacgtgcccctgtggaactacgccgtgctgagaggccagatcttcatcgtgtacttcatcgccggcgtgaagaagctggacgccgactgggtggagggctacagcatggagtacctgagcagacactggctgttcagccccttcaagctgctgctgagcgaggagctgaccagcctgctggtggtgcactggggcggcctgctgctggacctgagcgccggcttcctgctgttcttcgacgtgagcagaagcatcggcctgttcttcgtgagctacttccactgcatgaacagccagctgttcagcatcggcatgttcagctacgtgatgctggccagcagccccctgttctgcagccccgagtggcccagaaagctggtgagctactgccccagaagactgcagcagctgctgcccctgaaggccgccccccagcccagcgtgagctgcgtgtacaagagaagcagaggcaagagcggccagaagcccggcctgagacaccagctgggcgccgccttcaccctgctgtacctgctggagcagctgttcctgccctacagccacttcctgacccagggctacaacaactggaccaacggcctgtacggctacagctgggacatgatggtgcacagcagaagccaccagcacgtgaagatcacctacagagacggcagaaccggcgagctgggctacctgaaccccggcgtgttcacccagagcagaagatggaaggaccacgccgacatgctgaagcagtacgccacctgcctgagcagactgctgcccaagtacaacgtgaccgagccccagatctacttcgacatctgggtgagcatcaacgacagattccagcagagaatcttcgaccccagagtggacatcgtgcaggccgcctggagccccttccagagaaccagctgggtgcagcccctgctgatggacctgagcccctggagagccaagctgcaggagatcaagagcagcctggacaaccacaccgaggtggtgttcatcgccgacttccccggcctgcacctggagaacttcgtgagcgaggacctgggcaacaccagcatccagctgctgcagggcgaggtgaccgtggagctggtggccgagcagaagaaccagaccctgagagagggcgagaagatgcagctgcccgccggcgagtaccacaaggtgtacaccaccagccccagccccagctgctacatgtacgtgtacgtgaacaccaccgagctggccctggagcaggacctggcctacctgcaggagctgaaggagaaggtggagaacggcagcgagaccggccccctgccccccgagctgcagcccctgctggagggcgaggtgaagggcggccccgagcccacccccctggtgcagaccttcctgagaagacagcagagactgcaggagatcgagagaagaagaaacacccccttccacgagagattcttcagattcctgctgagaaagctgtacgtgttcagaagaagcttcctgatgacctgcatcagcctgagaaacctgatcctgggcagacccagcctggagcagctggcccaggaggtgacctacgccaacctgagacccttcgaggccgtgggcgagctgaaccccagcaacaccgacagcagccacagcaacccccccgagagcaaccccgaccccgtgcacagcgagttctag

SEQ ID NO: 52970 - protein, 460 aa, Artificial Sequence
  derived and/or modified sequence
MSLLRANEVTDSAYMGSESTYSECETFTDEDTSTLVHPELQPEGDADSAGGSAVPSECLDAMEEPDHGALLLLPGRPHPHGQSVITVIGGEEHFEDYGEGSEAELSPETLCNGQLGCSDPAFLTPSPTKRLSSKKVARYLHQSGALTMEALEDPSPELMEGPEEDIADKVVFLERRVLELEKDTAATGEQHSRLRQENLQLVHRANALEEQLKEQELRACEMVLEETRRQKELLCKMEREKSIEIENLQTRLQQLDEENSELRSCTPCLKANIERLEEEKQKLLDEIESLTLRLSEEQENKRRMGDRLSHERHQFQRDKEATQELIEDLRKQLEHLQLLKLEAEQRRGRSSSMGLQEYHSRARESELEQEVRRLKQDNRNLKEQNEELNGQIITLSIQGAKSLFSTAFSESLAAEISSVSRDELMEAIQKQEEINFRLQDYIDRIIVAIMETNPSILEVK

SEQ ID NO: 52971 - protein, 460 aa, Artificial Sequence
  derived and/or modified sequence
MPFLKANEVTDSAYMGSESTYSECETFTDEDTSTLVHPELQPEGDADSAGGSAVPSECLDAMEEPDHGALLLLPGRPHPHGQSVITVIGGEEHFEDYGEGSEAELSPETLCNGQLGCSDPAFLTPSPTKRLSSKKVARYLHQSGALTMEALEDPSPELMEGPEEDIADKVVFLERRVLELEKDTAATGEQHSRLRQENLQLVHRANALEEQLKEQELRACEMVLEETRRQKELLCKMEREKSIEIENLQTRLQQLDEENSELRSCTPCLKANIERLEEEKQKLLDEIESLTLRLSEEQENKRRMGDRLSHERHQFQRDKEATQELIEDLRKQLEHLQLLKLEAEQRRGRSSSMGLQEYHSRARESELEQEVRRLKQDNRNLKEQNEELNGQIITLSIQGAKSLFSTAFSESLAAEISSVSRDELMEAIQKQEEINFRLQDYIDRIIVAIMETNPSILEVK

SEQ ID NO: 52972 - protein, 182 aa, Artificial Sequence
  derived and/or modified sequence
MGSESTYSECETFTDEDTSTLVHPELQPEGDADSAGGSAVPSECLDAMEEPDHGALLLLPGRPHPHGQSVITVIGGEEHFEDYGEGSEAELSPETLCNGQLGCSDPAFLTPSPTKRLSSKKVARYLHQSGALTMEALEDPSPELMEGPEEDIADKVVFLERRVLELEKDTAATGEQHSRLRQ

SEQ ID NO: 52973 - DNA, 1383 bp, Artificial Sequence
  derived and/or modified sequence
atgtccttactgagagctaacgaggttacagactctgcttacatgggcagcgaatcaacgtactccgagtgcgaaacttttacagacgaagacacatccaccttggttcatcccgaactacagccagagggtgacgcagactctgctggaggcagcgcagtgccgtccgaatgccttgatgcaatggaagaaccggatcacggtgccctgttactgttgccagggaggccccacccacacggtcagagcgtgattactgtcatcggcggggaggaacacttcgaggattacggagagggcagcgaggcggagctgtccccggagacactgtgcaacggccagctcggctgtagtgatccagcctttttgactcctagtcccacgaagagactatcttcaaaaaaagtggctcgctacctacaccagagcggagctctgacaatggaagctctagaggatccttccccagaactcatggaggggccagaagaggacatcgctgataaggtagtcttcctagaaagacgggttctggagctagagaaagacacagctgcgactggcgaacaacattctagattgaggcaagagaatctccagctggtgcatcgtgcaaacgctcttgaagaacagctaaaagagcaggaactccgagcctgcgaaatggtcttggaggaaacacgcagacagaaagagttgctgtgcaagatggagagggaaaagtctattgagattgaaaatctgcagaccagattgcagcaactcgatgaagagaacagtgaactccgttcatgcactccatgtctgaaagccaacatagagcgcctggaagaagaaaaacagaaactattggacgagattgaatccctgaccttgaggttatccgaggaacaagagaacaagcgtcgcatgggcgacagactctcacacgagcgccatcagtttcagagagataaggaggcaacacaggagcttatcgaagatctcaggaaacagttagaacacctgcaactgctgaagttagaggccgaacagcgtcgcggccgtagtagcagtatgggtctacaggagtatcattctcgagcccgggaaagcgagctggagcaggaggtcaggagactgaagcaagacaatcggaacctgaaggagcagaacgaagagttgaacgggcagatcataactctcagtatccagggagcgaagtccttattctctaccgccttttctgagtccctggcagccgagatctccagtgtgtctagagatgagttgatggaggcaatccagaagcaggaggagatcaattttagactgcaggactatatagaccgcattatcgtggctatcatggagacaaacccgtccattcttgaggtgaagtag

SEQ ID NO: 52974 - DNA, 1383 bp, Artificial Sequence
  derived and/or modified sequence
atgccatttctgaaggcaaacgaggtgacggatagcgcatacatggggtctgagtcaacgtactcggagtgtgagacattcaccgatgaggacacttcgaccctcgtccaccctgagctgcagccagaaggcgacgcagactcagcggggggcagtgcagttccttctgaatgcctagacgccatggaggagcccgatcatggcgccctgctcctgttacccggtcgaccccaccctcacgggcaaagtgtgattaccgtgataggcggagaagagcattttgaggattatggcgagggaagtgaggccgagctgtcacccgagactctgtgtaacggccagttaggatgtagcgatccagcttttctgacgcccagtccaacaaaacgcctaagctctaagaaagtggcgcgttacctacaccagtcaggggccctgaccatggaggccctggaggatcctagcccggagttaatggaaggccctgaggaggacatcgccgacaaggtggtgttcctggaacggcgtgtgctcgagcttgagaaagatactgcagccacgggagagcagcatagcagattaagacaggagaacctgcaactggtgcaccgagccaacgcactggaggagcaactgaaagaacaagagctcagggcatgtgagatggtccttgaagaaacacggcgccaaaaggagttgttatgtaagatggagagggaaaaatcgatcgagatcgagaatttacagactcgtttgcagcagctggatgaggagaattcagaacttcggtcctgcacaccgtgtctgaaggctaatattgagcggctggaggaagagaagcagaagctgcttgacgagatcgagagtctgactctgcggctatctgaggaacaggaaaataagcggagaatgggtgaccggctgagccatgagcgccaccaattccagcgagataaggaggccactcaagaactgatagaagatctgcgcaaacagttggagcacctgcagctgctcaagttagaggccgaacagcgtaggggtcggagttccagtatgggattgcaggagtaccatagccgtgccagggagagcgaattagaacaggaagtgcggaggctgaagcaggacaataggaatctgaaagaacagaacgaagagctcaacggacagataatcacactgtccatacagggggccaagagcttattctctacagccttctcagagtccctcgccgctgaaatatcatctgtcagccgagacgagttaatggaggcaatccaaaagcaggaggaaattaattttcgtctgcaggattacatagaccggatcattgttgccataatggaaacaaatcctagcattctggaagtcaagtag

SEQ ID NO: 52975 - DNA, 549 bp, Artificial Sequence
  derived and/or modified sequence
atgggatcggaaagcacttactcagagtgcgagaccttcactgacgaagacaccagcaccctggtccatcctgaactccagcctgagggagacgccgactctgccgggggctctgctgtaccttcagagtgccttgacgcaatggaggagccagaccacggcgcgctgctacttctgccaggtcgccctcacccccatgggcagtcagtaatcaccgttataggcggggaagagcacttcgaagattacggagaagggtctgaagccgagctgagtccggagacgttgtgtaacggccagctaggctgcagcgacccagcttttttgacgccgtctcctacaaagcggctgtcctctaagaaagtcgctcggtatctccatcaatcgggtgctctgactatggaggcgttagaagatccaagcccagaactaatggagggccctgaagaagacattgcagacaaagtggtgttcctcgagaggcgtgtgttggagctggaaaaagatactgcagctactggagaacaacattctagactcagacagtag

SEQ ID NO: 52976 - DNA, 1383 bp, Artificial Sequence
  derived and/or modified sequence
atgagcctgctgcgggccaatgaggtgacagacagcgcctacatgggcagcgagagcacctacagtgaatgtgagaccttcacagatgaggacaccagcaccctggtgcaccctgagctgcagccagaaggagatgctgacagcgctgggggcagcgctgtgcccagtgaatgtctggatgccatggaggagccagaccatggagccctgctgctgctgcccggccggccccacccccacggccagagcgtcatcaccgtcatcggcggggaggagcactttgaagattatggagagggcagcgaggccgagctgagccctgagaccctgtgcaatggccagctgggctgcagcgaccctgccttcctgacccccagccccaccaagaggctgagcagcaagaaggtggcccgctacctgcaccagagcggggccctgaccatggaggccctggaggaccccagccctgagctgatggagggccctgaggaggacattgctgacaaggtggtgttcctggagaggagagtgctggagctggagaaggacacagctgccactggagagcagcacagccggctgcggcaggagaacctgcagctggtgcaccgggccaatgccctggaggagcagctgaaggagcaggagctgcgggcctgtgagatggtgctggaggagacccggcggcagaaggagctgctgtgcaagatggagcgggagaagagcattgaaattgagaacctgcagacccggctgcagcagctggatgaggagaacagcgagctgcggagctgcaccccctgcctgaaggccaacatcgagcggctggaggaggagaagcagaagctgctggatgaaattgagagcctgaccctgcggctgtctgaggagcaggagaacaagaggaggatgggagaccggctgagccatgagcggcaccagttccagagggacaaggaggccacccaggagctgattgaggacctgaggaagcagctggagcacctgcagctgctgaagctggaggccgagcagaggcggggccgcagcagctccatgggcctgcaggagtaccacagccgggcccgggagagcgagctggagcaggaggtgcggcggctgaagcaggacaacagaaacctgaaggagcagaatgaggagctgaatggccagatcatcaccctgagcatccagggcgccaagagcctcttcagcacagccttcagcgagagcctggccgctgagatcagctctgtgtccagagatgagctgatggaggccatccagaagcaggaggagatcaacttccggctgcaggactacatcgaccgcatcatcgtggccatcatggagaccaaccccagcatcctggaggtgaagtag

SEQ ID NO: 52977 - DNA, 1383 bp, Artificial Sequence
  derived and/or modified sequence
atgcccttcctgaaggccaatgaggtgacagacagcgcctacatgggcagcgagagcacctacagtgaatgtgagaccttcacagatgaggacaccagcaccctggtgcaccctgagctgcagccagaaggagatgctgacagcgctgggggcagcgctgtgcccagtgaatgtctggatgccatggaggagccagaccatggagccctgctgctgctgcccggccggccccacccccacggccagagcgtcatcaccgtcatcggcggggaggagcactttgaagattatggagagggcagcgaggccgagctgagccctgagaccctgtgcaatggccagctgggctgcagcgaccctgccttcctgacccccagccccaccaagaggctgagcagcaagaaggtggcccgctacctgcaccagagcggggccctgaccatggaggccctggaggaccccagccctgagctgatggagggccctgaggaggacattgctgacaaggtggtgttcctggagaggagagtgctggagctggagaaggacacagctgccactggagagcagcacagccggctgcggcaggagaacctgcagctggtgcaccgggccaatgccctggaggagcagctgaaggagcaggagctgcgggcctgtgagatggtgctggaggagacccggcggcagaaggagctgctgtgcaagatggagcgggagaagagcattgaaattgagaacctgcagacccggctgcagcagctggatgaggagaacagcgagctgcggagctgcaccccctgcctgaaggccaacatcgagcggctggaggaggagaagcagaagctgctggatgaaattgagagcctgaccctgcggctgtctgaggagcaggagaacaagaggaggatgggagaccggctgagccatgagcggcaccagttccagagggacaaggaggccacccaggagctgattgaggacctgaggaagcagctggagcacctgcagctgctgaagctggaggccgagcagaggcggggccgcagcagctccatgggcctgcaggagtaccacagccgggcccgggagagcgagctggagcaggaggtgcggcggctgaagcaggacaacagaaacctgaaggagcagaatgaggagctgaatggccagatcatcaccctgagcatccagggcgccaagagcctcttcagcacagccttcagcgagagcctggccgctgagatcagctctgtgtccagagatgagctgatggaggccatccagaagcaggaggagatcaacttccggctgcaggactacatcgaccgcatcatcgtggccatcatggagaccaaccccagcatcctggaggtgaagtag

SEQ ID NO: 52978 - DNA, 549 bp, Artificial Sequence
  derived and/or modified sequence
atgggcagcgagagcacctacagtgaatgtgagaccttcacagatgaggacaccagcaccctggtgcaccctgagctgcagccagaaggagatgctgacagcgctgggggcagcgctgtgcccagtgaatgtctggatgccatggaggagccagaccatggagccctgctgctgctgcccggccggccccacccccacggccagagcgtcatcaccgtcatcggcggggaggagcactttgaagattatggagagggcagcgaggccgagctgagccctgagaccctgtgcaatggccagctgggctgcagcgaccctgccttcctgacccccagccccaccaagaggctgagcagcaagaaggtggcccgctacctgcaccagagcggggccctgaccatggaggccctggaggaccccagccctgagctgatggagggccctgaggaggacattgctgacaaggtggtgttcctggagaggagagtgctggagctggagaaggacacagctgccactggagagcagcacagccggctgcggcagtag

SEQ ID NO: 52979 - DNA, 1383 bp, Artificial Sequence
  derived and/or modified sequence
atgagcctgctgcgggccaacgaggtgaccgacagcgcctacatgggttcagagtcaacatatagcgaatgcgaaacattcactgatgaagacacctccaccctggtgcaccccgagctgcagcccgagggcgacgcagactccgctggaggaagcgctgtgccctcagagtgcctcgacgccatggaggagcctgaccacggtgcattactgcttctgccgggaaggccacacccacatggtcagagtgtaattactgtgatcggaggagaggaacactttgaggactacggcgaaggtagcgaagcagagctgtcacctgagaccctgtgtaacggacagctcgggtgcagcgatccagcctttctaacccccagccccaccaaacggctgagttccaagaaggtggcccggtacctgcaccagagtggggcgctgaccatggaggcgctggaggatccatccccagagttgatggaggggcctgaagaggacattgcagataaagtggtgttcttagaacggagggtgctggaactggaaaaagacaccgccgccacaggagagcaacattcccggctacgccaggaaaatctccaactggtccaccgcgctaatgccctggaagaacagttgaaagagcaagaattgcgagcctgtgagatggttctcgaggaaacccggcgccaaaaagaattgctgtgcaagatggaaagagaaaagtccattgagatagagaacctgcagacgcgactgcagcagctggacgaagagaacagtgaacttagatcatgtacaccttgtcttaaggctaatatcgaaaggcttgaggaagagaaacaaaagctgctggacgagatcgaatcccttacccttaggctgagcgaggaacaggaaaataagcggcgcatgggtgatcggctgagtcacgaacgtcatcagtttcagcgggacaaggaggccactcaagaattgatcgaagatctgagaaaacagttagaacatctgcagctgctcaagctggaggctgaacagcgccgcgggcgcagctccagcatgggcctgcaggagtatcattctcgcgcccgcgagtcggaactagaacaggaggtgcgtaggcttaaacaggataacagaaatctgaaggagcaaaatgaggaactgaacggacagataatcactctgtctattcagggcgccaaaagcttattctctacagctttctcggaatcccttgcagcggagatcagcagtgtgagccgtgacgaactcatggaggctattcagaagcaagaggaaattaacttcagactgcaggactacattgacaggattatcgtggccatcatggagacaaacccctctattctcgaggtgaagtag

SEQ ID NO: 52980 - DNA, 1383 bp, Artificial Sequence
  derived and/or modified sequence
atgcccttcctgaaggccaacgaggtgaccgacagcgcctacatgggttctgagtcaacctactccgaatgcgagaccttcaccgacgaggacacctctactctagtacaccctgagttacagcccgaaggtgatgccgacagcgctgggggatcggctgtcccaagcgagtgccttgacgccatggaagaaccggaccatggggctctcctcctcctgccagggcgcccacatccacacggacaaagcgtcatcacagtgattggcggagaggagcactttgaggattacggagagggaagtgaagccgagctcagtcccgaaaccctctgcaacggacaattggggtgttctgacccggcctttcttacaccctcccctaccaaaaggctgagcagtaaaaaggtcgccaggtacctacaccagtctggcgccctgacaatggaggctctagaggacccctcgccagagcttatggaagggcctgaagaagacattgcagacaaggttgtgttcctggaacggagggtcctggaactggagaaagacaccgctgctaccggcgagcaacatagcagactccgacaagaaaatctgcagctggtgcatagagccaacgctttggaagaacagctcaaagaacaggagcttcgcgcatgtgagatggtgttggaggaaacccgccggcagaaggagctcctctgtaaaatggaacgcgaaaaatctattgagattgagaatctccagacacgcctgcaacagctagacgaggagaactccgagcttagatcctgcacgccttgcctgaaggcaaacattgagcggctggaggaggagaaacaaaagctgctggatgaaatcgagtccttgacactccggctgtcagaagaacaggagaataagcgacgcatgggagaccgtctgtcacacgaacgacatcagttccagcgggataaagaagctactcaggagttgattgaggatctgcgcaagcagctggaacacctgcaactcctgaaactggaggcagaacagcgccgtggcagaagttcctctatgggactacaggagtatcacagtcgcgccagagaatccgaactagagcaagaggtccgtaggctcaaacaggacaacaggaacctcaaagagcaaaacgaggaactgaacggacaaatcatcaccctttctatccaaggcgcaaagtctctgttctcaaccgccttctcggaatctcttgcagcagagatctcttctgttagtcgcgacgaattgatggaagcaatccagaaacaggaagagatcaacttccgcctgcaggactacattgaccgcattattgtagcaattatggagactaacccttccattctcgaggtgaaatag

SEQ ID NO: 52981 - DNA, 549 bp, Artificial Sequence
  derived and/or modified sequence
atgggcagcgagagcacctacagcgagtgcgagaccttcaccgacgaagacaccagcacattggtgcaccccgagctgcaaccagagggagatgctgacagcgccggaggcagcgccgtcccctccgagtgcttggatgctatggaggaacccgaccacggagccttgctgctgctccccggtcggccacatccccacgggcagtcagttatcacagtcatcggcggcgaggaacacttcgaggattatggcgaaggaagcgaagccgaattatcccctgaaaccctgtgtaatgggcagcttggttgctccgatcctgccttccttactccttcccccacaaagaggttgagcagcaaaaaggtggcaagatatctgcaccagagtggtgctttaacgatggaggcattggaagatccctccccagagctgatggaaggcccggaggaagatatagcagacaaagtcgttttcctggagcgccgagtgctggagctcgaaaaagacacggcggcgaccggcgagcagcacagccgactgcgacaatag

SEQ ID NO: 52982 - DNA, 1383 bp, Artificial Sequence
  derived and/or modified sequence
atgagcctcctgagggccaatgaggtcaccgatagcgcgtacatgggcagcgaatccacatactccgagtgtgaaacatttactgatgaagacaccagtacactggtgcaccctgaattgcagccagaaggcgacgccgactctgcagggggatcggctgtgccatctgagtgtctcgatgctatggaagagccagatcacggtgcactgttgctccttcctggtcggcctcaccctcatggccagagcgtaataacagttataggtggagaggaacacttcgaagattacggggagggatccgaggctgaactgtctcctgaaacgctgtgtaacggtcagctaggctgttccgatcctgcgttcttgactccgtcccctacaaaaaggttatcgtccaaaaaagtggcccgatatctccatcagagtggggctttgaccatggaagccctggaggacccatctccagaactaatggaaggtccagaggaggatatcgctgataaggtcgtgtttctcgagcgaagagtgttggagctggaaaaagatacggcagctaccggagaacagcattccagactgagacaagagaatctgcaattggtacaccgcgctaacgcccttgaggagcaactgaaagagcaagaactgagggcgtgcgagatggtgctggaagagaccaggcggcagaaggagctgctctgcaaaatggaacgagagaagagcatcgagattgaaaacttgcaaacccggttacaacagctggatgaggagaatagtgagctgagatcctgcacaccctgcttgaaagccaacattgaacgtctggaagaggaaaagcaaaagctgctggatgagatagagtcactgactctaagactctccgaggaacaggaaaataaacgacgcatgggggatagactgtcgcatgaacgtcatcagtttcagagggacaaggaggctacccaagagctcattgaggatttgaggaagcagctggagcatctgcagttattgaaactggaggccgaacagcgcagagggcgttcctccagtatgggtctgcaggagtatcattctagggcacgtgagagtgagttggagcaagaggtgcgcaggctgaagcaggataatcgaaacctgaaggaacaaaacgaggagctgaatggtcagatcattaccctgtcaatacagggggcaaagtctctcttttctactgcctttagcgagtctcttgccgctgagatttcatccgtgagtagggacgagctcatggaggccatacagaagcaggaagagataaactttaggctacaagactacatcgatagaatcattgtcgccatcatggagactaatccctccattttggaggttaagtag

SEQ ID NO: 52983 - DNA, 1383 bp, Artificial Sequence
  derived and/or modified sequence
atgccctttctgaaagccaatgaggtgaccgatagcgcctacatgggttctgaaagtacatactccgaatgtgagacatttaccgacgaagatactagcaccttggtgcaccctgaactccagcccgaaggtgatgccgactctgccggtgggagtgccgttccatcggaatgccttgatgcaatggaagaacccgaccacggggctttactcctgctcccagggaggccccatccccacggccagtctgtcatcacggttatcggtggcgaagagcatttcgaggattatggcgagggctcggaagccgaacttagcccagagacactgtgtaacggtcagctggggtgtagcgacccagcctttctgacaccgagtccaactaagcgcctgtcttccaaaaaggtggccaggtatctgcatcaatccggcgctctgactatggaggcccttgaggatccttccccagaacttatggaagggccagaagaggatattgcagacaaagtggtgttcttagaacgtagggtactggaacttgaaaaagacaccgccgcaacaggtgaacagcacagtcgattgcggcaggaaaacctgcagctggtccaccgcgctaatgccctggaagagcagctcaaagagcaggagctccgtgcatgtgaaatggttctggaagagacccgacggcagaaggagctgctctgtaaaatggaacgggaaaagagcatcgagattgagaatctgcagaccaggctgcagcaactcgacgaggaaaattcggagctgagatcttgtacaccgtgtctgaaagcaaatatcgagcggttagaagaggagaaacagaagttactggacgagatcgaatcacttacactgcgcctgagcgaggaacaggaaaataagcgccgaatgggtgataggctttcccacgagaggcaccagtttcaacgcgataaagaggccacacaagagctgatagaggatcttcggaagcaactggaacatctgcagcttctcaagttagaggctgagcaacgacgaggccgatctagttctatgggtcttcaggaatatcactctcgggctagggagtctgaattagagcaggaggtgcgtagactgaaacaagacaataggaatctgaaggagcagaatgaggaactgaacggccaaattatcaccctgtctatccagggggctaaatccttgttcagtaccgctttctcagaaagcctggctgcggaaataagctctgttagcagagacgagttaatggaagctattcagaagcaggaggagatcaactttcgcctgcaagactacatcgatagaattatcgttgctatcatggagacaaacccctctattctggaagtcaagtag

SEQ ID NO: 52984 - DNA, 549 bp, Artificial Sequence
  derived and/or modified sequence
atggggtccgagtctacctattcagagtgcgagaccttcacagatgaggacacaagtacactcgtccaccctgagttgcagcccgagggggatgctgatagcgcagggggtagtgccgtgccctctgagtgtttggatgcgatggaagagcctgaccatggggctctgctcctcctcccaggtagaccacacccccacgggcaaagtgtaataactgtgatcggcggagaagaacactttgaagattacggcgagggcagtgaggcggagctctctccagaaacattgtgcaacggacagttgggatgttctgaccccgcatttctaaccccttctcccacaaagcgcctgtctagcaaaaaggtggcacggtacctgcaccaatcaggagctctgaccatggaggcactcgaggacccatcccctgagttaatggaagggccagaagaggacatcgcggacaaagtcgtgtttctggagcgtcgagttcttgaactggagaaggacactgcggcaacaggagaacagcactctcgcttgcgacagtag

SEQ ID NO: 52985 - DNA, 3022 bp, Artificial Sequence
  derived and/or modified sequence
atgtctctgcttagagccaacgaggtgacggacagcgcgtacatgggctccgagagcacctacagtgagtgtgagaccttcacggacgaggacaccagcaccctggtgcaccctgagctgcaacctgaaggggacgcagacagtgccggcggctcggccgtgccctctgagtgcctggacgccatggaggagcccgaccatggtgccctgctgctgctcccaggcaggcctcacccccatggccagtctgtcatcacggtgatcgggggcgaggagcactttgaggactacggtgaaggcagtgaggcggagctgtccccagagaccctatgcaacgggcagctgggctgcagtgaccccgctttcctcacgcccagtccgacaaagcggctctccagcaagaaggtggcaaggtacctgcaccagtcaggggccctgaccatggaggccctggaggacccttcccccgagctcatggagggcccagaggaggacattgctgacaaggttgtcttcctggaaaggcgtgtgctggagctggaaaaggacacggcagccaccggtgagcaacacagccgcctgaggcaggagaacctgcagctggtgcacagagcaaacgccctggaggagcagctgaaggagcaggagctgagagcctgcgagatggtcctggaagagacccggcgtcagaaggagctcctgtgcaagatggagagggagaagagcattgagatcgagaacctgcagaccaggctacagcaactggacgaggagaacagtgaactccggtcctgcacgccctgtctgaaggccaacattgagcgtctggaggaggagaagcagaagctgttggatgagatagagtcgctgacgctgcggctcagtgaagagcaggagaacaagaggagaatgggggacaggctgagtcacgagaggcaccagttccagagggacaaggaggccacccaggagctgatcgaggacctccgaaagcagctggagcacctgcagctcctcaagctggaggccgagcagcggcggggccgcagcagcagcatgggcctgcaggagtaccacagccgcgcccgggagagcgagctggagcaggaggtccgcaggctgaagcaggacaaccgcaacctgaaggagcagaacgaggagctgaacgggcagatcattaccctcagcatccagggcgccaagagcctcttctccacagccttctctgagtccctggctgcagagatcagctccgtctcccgagatgagctcatggaggcgattcagaagcaggaggagatcaacttccgcctgcaggactacatcgacaggatcatcgtggccatcatggagaccaacccgtccatcctggaggtcaagtagaggcaggaaggtccagcctgagctggattcgggactccaacaccctggagtggttccgtcagaccatgaggagccaagaccagcaggtcccacagccgacagtgcccagagcatgcagggaaccctcgtgcagctgagctggggccgccaaagaccggggctgccaaaggggcagagggtggtggagaggagagggagaaagggaagtcccagggcccggggtccacagaggatgagggttgtggcagggccgtccatcagcgctgaccttccgggggcccagagcttcccagccctgagtcaagctggccatgaacgcgtacacttcagttcagcaggatgggctggagagcctctctgtgcagcggtgtggggtgagccctgctgtggcctccttgtggtggtccctcttcccacgtgcagccctgttgggaagaaaggaagaaaacaggtccctccaggggtgctgctgcctaagccacccacataagtacgctggtgccgtgtcacccatgttgagccgctcctgatggctgacgggctcccagaccctcacctcggacatggtggtgggggaaggacgggtgggcaaggctggtgcgttccccagctctccctacgctgctcgggccattgcccagccagatgtggtcacctcagtccagctctggggcctccaggccatgtggctgttcccacggcccagtcctcgctgcagtaacccctgggggctctgaccacctatgggggccgggcaggagcctctggggcctccactccgacatcaggacctgagatgaccgctgtgtggcgctctctccctgggcagggtggatgccacaggcccctctggctcccaggtgctgcttctccacaggtgcggcctggcccggcctcctaaaggccacaccctccccacgcacttcccaggccagaatccaaacatcgggaaccctgttttcttctgggtgtgtctcacttagaaatcgtggttcttccccgagggtgcatgttgcaggagggagagggcagggaagactcacagcagagcaggagggggcctgtgcttctcggggtctgcaccccaggcacagcggtgtcaccccgcaggaccgcgggcctgccccaacccccagcattcccgggtgggcccagaccccatcaccaagactggccacccgctgcgtgtgtgtgcgcgcgcgtgtacgtgtggccccacatccgccgccttccacgctaggatgtaagaggtcgcctcctattgtacatttggggaaagccttgggtgtaaatcagtgtaaacttggaggagagatttttctatcatgtagagtaggtattttttatagattgaaggttgatcaattttttaatactttcaagagaaaactgtgtatacacatgaaatatatatatatatatatatatatatatgtataatatataaagactggcaccctgcctctctgtgcccaggcccagccctggtgacatggcaccactcagcagtgctgtcactgtaagcatggactcccaggagacagtgtgggaaacgctcctgctttaattccccgagaaacggctcttcctgcctggatgcaggagggcaggggccaccacagattaaagctgttactgc

SEQ ID NO: 52986 - DNA, 3203 bp, Artificial Sequence
  derived and/or modified sequence
attagagcgtgtctgggagcaggttaaactttctcctaggtggtgatgtgcctccaggtgagcgcacaggctttgcagaaaccccagcatgacaagcaagtaggaaggtgacattgttgtttgagaaaagccagtgacccggttgggacggagacacgatggggagccggtctccaacagcatgcccttcctgaaggccaacgaggtgacggacagcgcgtacatgggctccgagagcacctacagtgagtgtgagaccttcacggacgaggacaccagcaccctggtgcaccctgagctgcaacctgaaggggacgcagacagtgccggcggctcggccgtgccctctgagtgcctggacgccatggaggagcccgaccatggtgccctgctgctgctcccaggcaggcctcacccccatggccagtctgtcatcacggtgatcgggggcgaggagcactttgaggactacggtgaaggcagtgaggcggagctgtccccagagaccctatgcaacgggcagctgggctgcagtgaccccgctttcctcacgcccagtccgacaaagcggctctccagcaagaaggtggcaaggtacctgcaccagtcaggggccctgaccatggaggccctggaggacccttcccccgagctcatggagggcccagaggaggacattgctgacaaggttgtcttcctggaaaggcgtgtgctggagctggaaaaggacacggcagccaccggtgagcaacacagccgcctgaggcaggagaacctgcagctggtgcacagagcaaacgccctggaggagcagctgaaggagcaggagctgagagcctgcgagatggtcctggaagagacccggcgtcagaaggagctcctgtgcaagatggagagggagaagagcattgagatcgagaacctgcagaccaggctacagcaactggacgaggagaacagtgaactccggtcctgcacgccctgtctgaaggccaacattgagcgtctggaggaggagaagcagaagctgttggatgagatagagtcgctgacgctgcggctcagtgaagagcaggagaacaagaggagaatgggggacaggctgagtcacgagaggcaccagttccagagggacaaggaggccacccaggagctgatcgaggacctccgaaagcagctggagcacctgcagctcctcaagctggaggccgagcagcggcggggccgcagcagcagcatgggcctgcaggagtaccacagccgcgcccgggagagcgagctggagcaggaggtccgcaggctgaagcaggacaaccgcaacctgaaggagcagaacgaggagctgaacgggcagatcattaccctcagcatccagggcgccaagagcctcttctccacagccttctctgagtccctggctgcagagatcagctccgtctcccgagatgagctcatggaggcgattcagaagcaggaggagatcaacttccgcctgcaggactacatcgacaggatcatcgtggccatcatggagaccaacccgtccatcctggaggtcaagtagaggcaggaaggtccagcctgagctggattcgggactccaacaccctggagtggttccgtcagaccatgaggagccaagaccagcaggtcccacagccgacagtgcccagagcatgcagggaaccctcgtgcagctgagctggggccgccaaagaccggggctgccaaaggggcagagggtggtggagaggagagggagaaagggaagtcccagggcccggggtccacagaggatgagggttgtggcagggccgtccatcagcgctgaccttccgggggcccagagcttcccagccctgagtcaagctggccatgaacgcgtacacttcagttcagcaggatgggctggagagcctctctgtgcagcggtgtggggtgagccctgctgtggcctccttgtggtggtccctcttcccacgtgcagccctgttgggaagaaaggaagaaaacaggtccctccaggggtgctgctgcctaagccacccacataagtacgctggtgccgtgtcacccatgttgagccgctcctgatggctgacgggctcccagaccctcacctcggacatggtggtgggggaaggacgggtgggcaaggctggtgcgttccccagctctccctacgctgctcgggccattgcccagccagatgtggtcacctcagtccagctctggggcctccaggccatgtggctgttcccacggcccagtcctcgctgcagtaacccctgggggctctgaccacctatgggggccgggcaggagcctctggggcctccactccgacatcaggacctgagatgaccgctgtgtggcgctctctccctgggcagggtggatgccacaggcccctctggctcccaggtgctgcttctccacaggtgcggcctggcccggcctcctaaaggccacaccctccccacgcacttcccaggccagaatccaaacatcgggaaccctgttttcttctgggtgtgtctcacttagaaatcgtggttcttccccgagggtgcatgttgcaggagggagagggcagggaagactcacagcagagcaggagggggcctgtgcttctcggggtctgcaccccaggcacagcggtgtcaccccgcaggaccgcgggcctgccccaacccccagcattcccgggtgggcccagaccccatcaccaagactggccacccgctgcgtgtgtgtgcgcgcgcgtgtacgtgtggccccacatccgccgccttccacgctaggatgtaagaggtcgcctcctattgtacatttggggaaagccttgggtgtaaatcagtgtaaacttggaggagagatttttctatcatgtagagtaggtattttttatagattgaaggttgatcaattttttaatactttcaagagaaaactgtgtatacacatgaaatatatatatatatatatatatatatatgtataatatataaagactggcaccctgcctctctgtgcccaggcccagccctggtgacatggcaccactcagcagtgctgtcactgtaagcatggactcccaggagacagtgtgggaaacgctcctgctttaattccccgagaaacggctcttcctgcctggatgcaggagggcaggggccaccacagattaaagctgttactgc

SEQ ID NO: 52987 - DNA, 804 bp, Artificial Sequence
  derived and/or modified sequence
caggttaaactttctcctaggtggtgatgtgcctccaggtgagcgcacaggctttgcagaaaccccagcatgacaagcaagtaggaaggtgacattgttgtttgagaaaagccagtgacccggttgggacggagacacgatggggagccggtctccaacagcatgcccttcctgaaggtgtgtacagagccaggcccagcctgtgaggccacccgggccagcatctgagggccaacgaggtgacggacagcgcgtacatgggctccgagagcacctacagtgagtgtgagaccttcacggacgaggacaccagcaccctggtgcaccctgagctgcaacctgaaggggacgcagacagtgccggcggctcggccgtgccctctgagtgcctggacgccatggaggagcccgaccatggtgccctgctgctgctcccaggcaggcctcacccccatggccagtctgtcatcacggtgatcgggggcgaggagcactttgaggactacggtgaaggcagtgaggcggagctgtccccagagaccctatgcaacgggcagctgggctgcagtgaccccgctttcctcacgcccagtccgacaaagcggctctccagcaagaaggtggcaaggtacctgcaccagtcaggggccctgaccatggaggccctggaggacccttcccccgagctcatggagggcccagaggaggacattgctgacaaggttgtcttcctggaaaggcgtgtgctggagctggaaaaggacacggcagccaccggtgagcaacacagccgcctgaggcagg

SEQ ID NO: 52988 - DNA, 1383 bp, Artificial Sequence
  derived and/or modified sequence
atgagcctgctgagagccaacgaggtgaccgacagcgcctacatgggcagcgagagcacctacagcgagtgcgagaccttcaccgacgaggacaccagcaccctggtgcaccccgagctgcagcccgagggcgacgccgacagcgccggcggcagcgccgtgcccagcgagtgcctggacgccatggaggagcccgaccacggcgccctgctgctgctgcccggcagaccccacccccacggccagagcgtgatcaccgtgatcggcggcgaggagcacttcgaggactacggcgagggcagcgaggccgagctgagccccgagaccctgtgcaacggccagctgggctgcagcgaccccgccttcctgacccccagccccaccaagagactgagcagcaagaaggtggccagatacctgcaccagagcggcgccctgaccatggaggccctggaggaccccagccccgagctgatggagggccccgaggaggacatcgccgacaaggtggtgttcctggagagaagagtgctggagctggagaaggacaccgccgccaccggcgagcagcacagcagactgagacaggagaacctgcagctggtgcacagagccaacgccctggaggagcagctgaaggagcaggagctgagagcctgcgagatggtgctggaggagaccagaagacagaaggagctgctgtgcaagatggagagagagaagagcatcgagatcgagaacctgcagaccagactgcagcagctggacgaggagaacagcgagctgagaagctgcaccccctgcctgaaggccaacatcgagagactggaggaggagaagcagaagctgctggacgagatcgagagcctgaccctgagactgagcgaggagcaggagaacaagagaagaatgggcgacagactgagccacgagagacaccagttccagagagacaaggaggccacccaggagctgatcgaggacctgagaaagcagctggagcacctgcagctgctgaagctggaggccgagcagagaagaggcagaagcagcagcatgggcctgcaggagtaccacagcagagccagagagagcgagctggagcaggaggtgagaagactgaagcaggacaacagaaacctgaaggagcagaacgaggagctgaacggccagatcatcaccctgagcatccagggcgccaagagcctgttcagcaccgccttcagcgagagcctggccgccgagatcagcagcgtgagcagagacgagctgatggaggccatccagaagcaggaggagatcaacttcagactgcaggactacatcgacagaatcatcgtggccatcatggagaccaaccccagcatcctggaggtgaagtag

SEQ ID NO: 52989 - DNA, 1383 bp, Artificial Sequence
  derived and/or modified sequence
atgcccttcctgaaggccaacgaggtgaccgacagcgcctacatgggcagcgagagcacctacagcgagtgcgagaccttcaccgacgaggacaccagcaccctggtgcaccccgagctgcagcccgagggcgacgccgacagcgccggcggcagcgccgtgcccagcgagtgcctggacgccatggaggagcccgaccacggcgccctgctgctgctgcccggcagaccccacccccacggccagagcgtgatcaccgtgatcggcggcgaggagcacttcgaggactacggcgagggcagcgaggccgagctgagccccgagaccctgtgcaacggccagctgggctgcagcgaccccgccttcctgacccccagccccaccaagagactgagcagcaagaaggtggccagatacctgcaccagagcggcgccctgaccatggaggccctggaggaccccagccccgagctgatggagggccccgaggaggacatcgccgacaaggtggtgttcctggagagaagagtgctggagctggagaaggacaccgccgccaccggcgagcagcacagcagactgagacaggagaacctgcagctggtgcacagagccaacgccctggaggagcagctgaaggagcaggagctgagagcctgcgagatggtgctggaggagaccagaagacagaaggagctgctgtgcaagatggagagagagaagagcatcgagatcgagaacctgcagaccagactgcagcagctggacgaggagaacagcgagctgagaagctgcaccccctgcctgaaggccaacatcgagagactggaggaggagaagcagaagctgctggacgagatcgagagcctgaccctgagactgagcgaggagcaggagaacaagagaagaatgggcgacagactgagccacgagagacaccagttccagagagacaaggaggccacccaggagctgatcgaggacctgagaaagcagctggagcacctgcagctgctgaagctggaggccgagcagagaagaggcagaagcagcagcatgggcctgcaggagtaccacagcagagccagagagagcgagctggagcaggaggtgagaagactgaagcaggacaacagaaacctgaaggagcagaacgaggagctgaacggccagatcatcaccctgagcatccagggcgccaagagcctgttcagcaccgccttcagcgagagcctggccgccgagatcagcagcgtgagcagagacgagctgatggaggccatccagaagcaggaggagatcaacttcagactgcaggactacatcgacagaatcatcgtggccatcatggagaccaaccccagcatcctggaggtgaagtag

SEQ ID NO: 52990 - DNA, 549 bp, Artificial Sequence
  derived and/or modified sequence
atgggcagcgagagcacctacagcgagtgcgagaccttcaccgacgaggacaccagcaccctggtgcaccccgagctgcagcccgagggcgacgccgacagcgccggcggcagcgccgtgcccagcgagtgcctggacgccatggaggagcccgaccacggcgccctgctgctgctgcccggcagaccccacccccacggccagagcgtgatcaccgtgatcggcggcgaggagcacttcgaggactacggcgagggcagcgaggccgagctgagccccgagaccctgtgcaacggccagctgggctgcagcgaccccgccttcctgacccccagccccaccaagagactgagcagcaagaaggtggccagatacctgcaccagagcggcgccctgaccatggaggccctggaggaccccagccccgagctgatggagggccccgaggaggacatcgccgacaaggtggtgttcctggagagaagagtgctggagctggagaaggacaccgccgccaccggcgagcagcacagcagactgagacagtag

SEQ ID NO: 52991 - protein, 1478 aa, Artificial Sequence
  derived and/or modified sequence
MEPRMESCLAQVLQKDVGKRLQVGQELIDYFSDKQKSADLEHDQTMLDKLVDGLATSWVNSSNYKVVLLGMDILSALVTRLQDRFKAQIGTVLPSLIDRLGDAKDSVREQDQTLLLKIMDQAANPQYVWDRMLGGFKHKNFRTREGICLCLIATLNASGAQTLTLSKIVPHICNLLGDPNSQVRDAAINSLVEIYRHVGERVRADLSKKGLPQSRLNVIFTKFDEVQKSGNMIQSANDKNFDDEDSVDGNRPSSASSTSSKAPPSSRRNVGMGTTRRLGSSTLGSKSSAAKEGAGAVDEEDFIKAFDDVPVVQIYSSRDLEESINKIREILSDDKHDWEQRVNALKKIRSLLLAGAAEYDNFFQHLRLLDGAFKLSAKDLRSQVVREACITLGHLSSVLGNKFDHGAEAIMPTIFNLIPNSAKIMATSGVVAVRLIIRHTHIPRLIPVITSNCTSKSVAVRRRCFEFLDLLLQEWQTHSLERHISVLAETIKKGIHDADSEARIEARKCYWGFHSHFSREAEHLYHTLESSYQKALQSHLKNSDSIVSLPQSDRSSSSSQESLNRPLSAKRSPTGSTTSRASTVSTKSVSTTGSLQRSRSDIDVNAAASAKSKVSSSSGTTPFSSAAALPPGSYASLDGTTTKAEGRIRTRRQSSGSATNVASTPDNRGRSRAKVVSQSQRSRSANPAGAGSRSSSPGKLLGSGYGGLTGGSSRGPPVTPSSEKRSKIPRSQGCSRETSPNRIGLDRFGLGQPGRIPGSVNAMRVLSTSTDLEAAVADALLLGDSRSKKKPVRRRYEPYGMYSDDDANSDASSVCSERSYGSRNGGIPHYLRQTEDVAEVLNHCASSNWSERKEGLLGLQNLLKSQRTLSRVELKRLCEIFTRMFADPHSKVFSMFLETLVDFIIIHKDDLQDWLFVLLTQLLKKMGADLLGSVQAKVQKALDVTRDSFPFDQQFNILMRFIVDQTQTPNLKVKVAILKYIESLARQMDPTDFVNSSETRLAVSRIITWTTEPKSSDVRKAAQIVLISLFELNTPEFTMLLGALPKTFQDGATKLLHNHLKNSSNTSVGSPSNTIGRTPSRHTSSRTSPLTSPTNCSHGGLSPSMLDYDTENLNSEEIYSSLRGVTEAIEKFSFRSQEDLNEPIKRDGKKECDIVSRDGGAASPATEGRGGSEVEGGRTALDNKTSLLNTQPPRAFPGPRARDYNPYPYSDAINTYDKTALKEAVFDDDMEQLRDVPIDHSDLVADLLKELSNHNERVEERKGALLELLKITREDSLGVWEEHFKTILLLLLETLGDKDHSIRALALRVLREILRNQPARFKNYAELTIMKTLEAHKDSHKEVVRAAEEAASTLASSIHPEQCIKVLCPIIQTADYPINLAAIKMQTKVVERIAKESLLQLLVDIIPGLLQGYDNTESSVRKASVFCLVAIYSVIGEDLKPHLAQLTGSKMKLLNLYIKRAQTTNSNSSSSSDVSTHS

SEQ ID NO: 52992 - protein, 1245 aa, Artificial Sequence
  derived and/or modified sequence
MTTGKDKNFDDEDSVDGNRPSSASSTSSKAPPSSRRNVGMGTTRRLGSSTLGSKSSAAKEGAGAVDEEDFIKAFDDVPVVQIYSSRDLEESINKIREILSDDKHDWEQRVNALKKIRSLLLAGAAEYDNFFQHLRLLDGAFKLSAKDLRSQVVREACITLGHLSSVLGNKFDHGAEAIMPTIFNLIPNSAKIMATSGVVAVRLIIRHTHIPRLIPVITSNCTSKSVAVRRRCFEFLDLLLQEWQTHSLERHISVLAETIKKGIHDADSEARIEARKCYWGFHSHFSREAEHLYHTLESSYQKALQSHLKNSDSIVSLPQSDRSSSSSQESLNRPLSAKRSPTGSTTSRASTVSTKSVSTTGSLQRSRSDIDVNAAASAKSKVSSSSGTTPFSSAAALPPGSYASLDGTTTKAEGRIRTRRQSSGSATNVASTPDNRGRSRAKVVSQSQRSRSANPAGAGSRSSSPGKLLGSGYGGLTGGSSRGPPVTPSSEKRSKIPRSQGCSRETSPNRIGLDRFGLGQPGRIPGSVNAMRVLSTSTDLEAAVADALLLGDSRSKKPVRRRYEPYGMYSDDDANSDASSVCSERSYGSRNGGIPHYLRQTEDVAEVLNHCASSNWSERKEGLLGLQNLLKSQRTLSRVELKRLCEIFTRMFADPHSKVFSMFLETLVDFIIIHKDDLQDWLFVLLTQLLKKMGADLLGSVQAKVQKALDVTRDSFPFDQQFNILMRFIVDQTQTPNLKVKVAILKYIESLARQMDPTDFVNSSETRLAVSRIITWTTEPKSSDVRKAAQIVLISLFELNTPEFTMLLGALPKTFQDGATKLLHNHLKNSSNTSVGSPSNTIGRTPSRHTSSRTSPLTSPTNCSHGGLSPSMLDYDTENLNSEEIYSSLRGVTEAIEKFSFRSQEDLNEPIKRDGKKECDIVSRDGGAASPATEGRGGSEVEGGRTALDNKTSLLNTQPPRAFPGPRARDYNPYPYSDAINTYDKTALKEAVFDDDMEQLRDVPIDHSDLVADLLKELSNHNERVEERKGALLELLKITREDSLGVWEEHFKTILLLLLETLGDKDHSIRALALRVLREILRNQPARFKNYAELTIMKTLEAHKDSHKEVVRAAEEAASTLASSIHPEQCIKVLCPIIQTADYPINLAAIKMQTKVVERIAKESLLQLLVDIIPGLLQGYDNTESSVRKASVFCLVAIYSVIGEDLKPHLAQLTGSKMKLLNLYIKRAQTTNSNSSSSSDVSTHS

SEQ ID NO: 52993 - DNA, 4437 bp, Artificial Sequence
  derived and/or modified sequence
atggaaccgcggatggaaagctgtctcgcacaagttctccagaaggatgtgggcaagaggcttcaggttggacaggaactaatcgattatttctccgacaagcaaaagtcagccgatctggaacatgatcaaaccatgctggataaattggtggacggtctggctacctcttgggttaactcatcaaactacaaagtggtactgctgggtatggatatcctctcagccttggtcacccgtttacaggatcgatttaaagcccaaattggcacagtgcttcccagccttattgacagactgggggacgctaaagacagtgtacgtgagcaagatcagactctgctactcaaaattatggaccaggccgctaacccgcagtatgtatgggaccgtatgctcggcggattcaaacacaagaactttaggaccagagagggaatttgcttgtgcctaatagcgacactgaacgcctccggtgctcagacactcacgctgtcaaagatcgtgcctcatatatgtaatctcttgggcgatcccaactcccaggtgcgggacgcagccatcaactctctcgtcgagatctaccgacacgtgggcgaacgggtgagagccgacctgtctaaaaaaggattgcctcaatcccggcttaatgtcatcttcactaaattcgacgaggtgcaaaaatccgggaatatgatccagtcagccaatgataagaatttcgacgatgaggacagtgtggacggcaatcggccctcatcagcaagttctactagtagtaaagcgcctccttcatctcgccgtaacgttggcatgggaaccacaaggaggctgggttcatccactttaggaagcaagagttctgcagcaaaggaaggcgcgggtgccgtggacgaggaagacttcataaaggcatttgacgatgttcccgtggttcaaatatatagtagtcgggatctggaagagtctattaataagattcgcgaaatcttgagtgatgataagcatgactgggaacagcgggttaacgcacttaagaagatccggagcctgcttcttgcaggagccgccgagtatgacaatttcttccaacatttacggctactggacggcgccttcaagctgagtgcgaaagacctaagatcgcaggtcgtgcgagaagcttgtattacactgggccatttatcttctgtcctggggaataagtttgaccacggggccgaggcgattatgcccacaatctttaatctaattcctaactctgccaagattatggctacgagtggtgtggtggctgttcgtcttatcatccgccatacccatattccgaggctcatcccagtgattacaagcaattgcaccagcaaaagtgtggcagtgaggagaaggtgctttgagtttcttgacctcctgcttcaagagtggcagacacactctctggaaagacatatttcagtgctggcagaaacgatcaagaaaggcatccacgatgccgacagtgaagccaggattgaggcccggaagtgctactgggggtttcattcacacttttccagagaggcagagcatctctatcacaccctggaaagttcctatcagaaggctctccaatcacacctaaagaactctgattccattgtgagcctcccgcagagcgatagatcatctagcagtagtcaagagagccttaatcggcctttgtccgccaaaagaagtccaaccgggtctactactagccgggcaagtacagtatctacgaagtcagtgtctactactgggagcttgcagaggagtcgctctgatattgacgtcaacgccgccgccagcgcaaagagcaaagtttctagtagctcaggaacgaccccattctcttcagcggccgcactccccccgggttcttacgctagtctggacggcacgactaccaaagctgaaggcaggatcagaacaaggcgtcaatcgtccggttctgcaaccaacgtggcgtccaccccagacaatcgggggagatctagagccaaggtggtgagtcagtcccagaggagccgctcggcaaatccggcaggcgctggctctaggtcttccagcccaggtaaactgctggggagcgggtacggcggcctgaccggcggaagtagccgggggcccccagtcacaccctccagtgaaaagaggtccaaaattcccaggagccaaggctgcagcagagagaccagccccaatcgaattggcttagatcggttcggcttgggccaacccggaagaattccagggagcgttaacgctatgcgcgtgctgtctacgtcaacagacttggaagccgcggtggccgacgcgcttttactgggagatagccggagtaagaagaaaccagtgcgtaggaggtacgagccctatggcatgtactcagacgatgatgccaatagtgatgcctctagcgtttgttctgaaaggagttacggttcccggaacggggggattccgcactacttgcgacagaccgaggatgtggcggaggtgctaaatcactgcgcatcttctaactggagcgagcgcaaggagggacttttgggtctgcagaacctcctcaagtcacaacggacgctctccagggtggaactaaaacgtctctgcgagatatttactagaatgtttgccgatcctcacagcaaggtcttttctatgtttctggagacactggtcgattttataatcattcataaggatgacctgcaagattggctctttgtgctgctgacccagttgctcaagaaaatgggagcagatctcctcgggagtgtgcaggccaaggtgcaaaaggccttggacgttactagggactcatttcccttcgatcagcagtttaatatactaatgagatttatcgtcgatcagacacagacacccaatctcaaagtgaaggtcgccattctgaaatatattgaatctcttgcccgtcaaatggaccccacagacttcgtgaactcctccgaaacccggctggctgtgagcaggatcatcacctggaccactgaaccaaaatcctctgatgtgaggaaagccgcccagattgtgctgatctctctgttcgagttgaacacacctgaattcaccatgctgctgggcgccctgccaaaaaccttccaggacggcgcgacgaaactgttgcacaaccacctgaaaaattcaagcaatacttcagtgggttccccctccaacactattggcagaacacctagccgacacacatcttcaaggacctccccattgacatcccctacgaattgttcccatggaggcctctcaccgtcaatgttagactacgacacagaaaatctgaactcagaggaaatttactcctctctgaggggggtgaccgaggccatcgagaagtttagctttcgctctcaggaggatctcaatgagcctattaaaagagatggcaagaaggaatgcgatatcgtttcccgggacggcggagcggctagccctgcaaccgagggtaggggcggaagcgaggtggagggtggccggacagccctggacaacaaaacaagcttactgaacactcagccacctagggcattccccggaccaagggctcgcgattacaacccttatccctattccgacgccatcaacacgtacgacaagaccgcacttaaggaagctgtgttcgatgatgacatggaacaactgcgtgatgttccaattgaccacagcgatctggttgctgacctgcttaaagaacttagcaatcataacgagagggtggaggagcgtaagggggccctccttgaactgcttaagattacaagggaggacagcttaggagtctgggaagagcacttcaagaccattcttttgctgctactcgaaaccttgggtgataaggatcactcaattcgtgctctcgccctccgggtgctccgtgagattttgaggaaccagcccgcccgcttcaaaaattacgccgagctcacaatcatgaaaacgctcgaagctcacaaggactcacacaaagaggtggttagggccgccgaggaagcagccagcacgctggcctcatctatccatccggaacagtgcataaaggtcctctgtccgatcatccagaccgcagattatcctattaacctcgccgccataaagatgcaaactaaagtcgtggaaagaattgccaaggaaagtctcctccaactgctggttgacattatcccgggcttacttcagggctacgataatactgaatcaagtgtgcggaaggcttccgttttctgtcttgtggccatctatagcgtcatcggggaggacctgaaacctcacctcgcacagctgaccggttccaaaatgaagctcttgaatctatacattaagagggcgcagaccaccaactccaacagctcctcctcgtccgacgtgtccacccattcatag

SEQ ID NO: 52994 - DNA, 3738 bp, Artificial Sequence
  derived and/or modified sequence
atgacaacagggaaagacaagaactttgatgacgaagatagcgttgacggaaacaggccttcatctgctagctcaacgtccagcaaggcccccccatcctccaggcgaaatgttggaatggggactaccaggagactcggctcctctacattagggtcaaaaagcagtgcagccaaagaaggcgccggtgccgtcgatgaagaggactttatcaaagccttcgacgatgttcctgttgtccagatctactcctcgagagatctggaagaatcaataaataagattcgagagatattgtcggatgacaagcacgattgggaacaacgggtgaacgctctaaaaaagattcgcagcctgctcttagcaggggccgcggaatatgacaacttctttcagcacctgagactgctggatggcgcctttaagctgtcagccaaggatctacgctctcaggtggtgagggaagcttgtataacgctgggccatcttagctccgtcctgggcaacaagttcgatcatggcgccgaagccataatgccaactattttcaatttgattccaaattctgctaaaatcatggccacgtcaggagttgtggctgtgcggttgatcattaggcacacacacatccccaggctcatccctgtgataacctccaattgtacatcaaagagtgtggcggtcagaaggcgctgttttgagtttctggacctgctcctgcaggaatggcagacccattccctagagagacatatctccgtgttggccgagactatcaagaagggtattcacgatgccgactccgaagcccggatcgaggctaggaagtgctactggggatttcactcacactttagcagggaagccgagcatctctaccatacattagagtcaagctatcagaaggccctccagagtcacttgaagaatagcgattctatcgtctcattgccccagtccgaccgctcatcttcatcctcacaagagtcgctcaacaggcctctgagcgcaaaaaggtcccctactggtagtacaaccagccgggcctccacagtttcaacaaagtctgtcagcaccacaggttccctccagaggagcaggagtgatatcgatgtcaatgcagccgcaagcgccaaaagcaaggtcagcagtagcagcggcacaacccccttcagttccgccgcagcattgccacctggatcctacgcgtctctcgacggaacgacaaccaaggccgagggccgaataaggacacgccgccaatcttccggatccgccactaacgtggcctcgacacccgataacagaggaagatcacgcgctaaggtggtgtcccagtcccaaagatcaagatctgctaaccccgcaggcgccggttcacgctcctccagcccgggcaagctcctgggttctgggtatggtggcctcaccgggggaagtagcagaggaccgccagtgacgccaagcagcgaaaagagatccaagattcctagaagccagggttgttcgcgggagacttcacccaatcggatcggcttagatcgattcggcctgggccagcctggtagaatccccgggtcagtaaatgcgatgagggttctttctacttcaaccgatctggaggctgctgtggcggacgcattgttactaggtgacagcaggagtaagaaacccgtgaggcgaaggtacgaaccttatggcatgtatagtgacgacgatgccaatagtgacgcctcatcggtgtgtagcgagcgctcttacggaagcagaaatgggggaattccccactatctaagacagaccgaagacgtggctgaggtgctcaaccactgtgcctcctctaattggagcgaacgcaaggaaggtcttctgggtctacagaacctgctgaagtcgcaacgcacgctctctagagtggaactaaaaagactctgtgaaatcttcacacggatgtttgccgacccccattcgaaagtgtttagcatgtttcttgagaccctggtagatttcataatcattcacaaggacgatctccaagattggttgtttgtgttgctgacacagctgctaaaaaaaatgggagccgatcttcttggctccgtgcaagcgaaagtccagaaagccctggatgtgacaagggactccttcccattcgatcagcagtttaatatactcatgagatttatcgtggatcagacccaaacgcctaatctgaaggtgaaggttgcgattcttaagtatattgaaagcctggccagacaaatggatcctaccgatttcgtaaatagttcagagacaaggctggctgtaagccgcattataacttggaccaccgaaccaaagtcctctgacgtgcgtaaggcggcccagatcgtacttatttcattatttgaattgaatacccccgagtttaccatgctgctgggagcattgcctaaaaccttccaagatggtgccactaagctgttacataatcatctgaagaatagcagtaacacatctgtgggctctccgtccaacactataggtcgcaccccaagccgtcacacctcatctcggacatcacctctgacctccccaaccaactgttcacacggcgggctttctcctagcatgctggattatgataccgaaaacctgaactccgaggagatttactcctccctgagaggagtgaccgaggctattgagaaattttcgtttcgttctcaggaggacctaaatgagcccatcaagagagacgggaaaaaggagtgtgacattgtatcacgagacggtggggccgcttcccccgccaccgaagggagaggcggctccgaagttgagggcggacggacggcactggataacaaaaccagtctgctcaacacacagcctccccgtgcctttccagggcccagggcgcgagattataacccatatccttatagcgatgcgatcaatacatatgataagacagctctgaaggaggcagtgttcgacgatgacatggaacaattgcgcgatgttcctatcgatcatagtgacttggtcgcagatctccttaaggagctgagcaaccacaacgaacgggtggaggagagaaagggggctttgttggagctcctgaagatcaccagggaagattcgcttggggtttgggaagaacacttcaagacaattctgctgcttctcttagagacattgggtgataaggatcacagtatcagggcactggccctgcgggtacttagagaaattctgcggaaccagccagcgcgcttcaagaattatgctgagcttacgatcatgaaaactctcgaggcgcacaaggactctcacaaggaagtagtcagagcggccgaggaggcagcttctacattggcaagctccattcaccccgagcaatgtattaaggtcctatgcccaattattcagaccgccgattaccctattaatcttgctgccattaaaatgcagaccaaggtagtggaaagaattgccaaagagagtttactgcaactcctggtggatattataccgggattactgcagggttacgacaacaccgagtcatcggtccgaaaggcttccgtattttgtctggtcgctatctactccgtgattggagaggacctgaagcctcacctggcacagctaactggctccaagatgaagcttctgaatctctatataaagagggcccagacgaccaatagcaacagctcaagctcatcagatgttagcacacatagctag

SEQ ID NO: 52995 - DNA, 4437 bp, Artificial Sequence
  derived and/or modified sequence
atggagcccaggatggagagctgcctggcccaggtgctgcagaaggatgtgggcaagaggctgcaggtgggccaggagctgattgactacttcagtgacaagcagaagtctgctgacctggagcatgaccagaccatgctggacaagctggtggatggcctggccacctcctgggtgaacagcagcaactacaaggtggtgctgctgggcatggacatcctgagcgccctggtgacccggctgcaggaccgcttcaaggcccagattggaacagtgctgcccagcctgattgaccggctgggagatgccaaggacagcgtgcgggagcaggaccagaccctgctgctgaagatcatggaccaggccgccaacccccagtatgtgtgggacaggatgctgggcggcttcaagcacaagaacttccgcacccgggagggcatctgcctgtgcctgattgccaccctgaatgccagcggggcccagaccctgaccctgagcaagatcgtgccccacatctgcaacctgctgggggaccccaacagccaggtgagagatgctgccatcaacagcctggtggagatctacagacatgtgggggagcgggtgcgggctgacctgagcaagaagggcctgccccagagccggctgaatgtcatcttcaccaagtttgatgaggtgcagaagagcggcaacatgatccagagcgccaatgacaagaactttgatgatgaggacagcgtggatggcaaccggcccagcagcgccagcagcaccagcagcaaggccccacccagcagcagaagaaatgtgggcatgggcaccacccggcggctgggcagcagcaccctgggcagcaagagcagcgctgccaaggagggcgctggagctgtggatgaggaggacttcatcaaggcctttgatgatgtgcctgtggtgcagatctacagcagccgggacctggaggagagcatcaacaagatccgggagatcctgagtgatgacaagcatgactgggagcagagggtgaatgccctgaagaagatccgcagcctgctgctggccggggctgctgaatatgacaacttcttccagcacctgcggctgctggatggagccttcaagctgagcgccaaggacctgcggagccaggtggtgcgggaggcctgcatcaccctgggccacctgagctctgtgctgggcaacaagtttgaccatggagctgaggccatcatgcccaccatcttcaacctgatccccaacagcgccaagatcatggccaccagcggcgtggtggccgtgcggctcatcatccgccacacccacatccccaggctcatccctgtgatcaccagcaactgcaccagcaagtctgtggccgtgagaagacgctgctttgagttcctggacctgctgctgcaggagtggcagacccacagcctggagcggcacatctctgtgctggccgagaccatcaagaagggcatccatgatgctgacagcgaggcccgcatcgaggccaggaagtgctactggggcttccacagccacttcagccgggaggccgagcacctgtaccacaccctggagagcagctaccagaaggccctgcagagccacctgaagaacagcgacagcatcgtgtccctgccccagagcgacaggagcagcagcagcagccaggagagcctgaaccggcccctgagcgccaagaggagccccaccggcagcaccaccagccgggccagcacagtgtccaccaagtctgtgtccaccaccggcagcctgcagaggagcagaagtgacattgatgtgaatgctgctgccagcgccaagagcaaggtgagcagcagcagcggcaccacccccttcagcagcgctgctgccctgcccccaggcagctatgccagcctggatggcaccaccaccaaggccgagggccgcatccgcacccggcggcagagcagcggcagcgccaccaacgtggccagcaccccagacaacagaggccgcagccgggccaaggtggtgtcccagagccagaggagccgcagcgccaacccagctggggccggcagccgcagcagcagccctgggaagctgctgggcagcggctatggaggcctgactggaggcagcagccggggcccccctgtgacccccagcagcgagaagaggagcaagatccccaggagccagggctgcagccgggagaccagccccaacagaattggcctggaccgcttcggcctgggccagcccggccgcatccctggctctgtgaatgccatgagggtgctgagcaccagcacagacctggaggccgctgtggctgatgccctgctgctgggggacagccgcagcaagaagaagcctgtgagaagaagatatgagccctacggcatgtacagtgatgatgatgccaacagtgatgccagctctgtgtgcagcgagaggagctatggcagcagaaatggaggcatcccccactacctgcggcagacagaagatgtggccgaggtgctgaaccactgtgccagcagcaactggagcgagaggaaggagggcctgctgggcctgcagaacctgctgaagagccagaggaccctgagccgggtggagctgaagaggctgtgtgagatcttcaccaggatgtttgctgacccccacagcaaggtgttctccatgttcctggagaccctggtggacttcatcatcatccacaaggatgacctgcaggactggctgtttgtgctgctgacccagctgctgaagaagatgggcgctgacctgctgggctctgtgcaggccaaggtgcagaaggccctggatgtgacccgggacagcttcccctttgaccagcagttcaacatcctgatgaggttcatcgtggaccagacccagacccccaacctgaaggtgaaggtggccatcctgaagtacatcgagagcctggcccggcagatggaccccacagactttgtgaacagcagcgagacccggctggccgtgagccgcatcatcacctggaccacagagcccaagagcagtgatgtgaggaaggccgcccagatcgtgctgatcagcctgtttgagctgaacaccccagagttcaccatgctgctgggcgccctgcccaagaccttccaggatggagccaccaagctgctgcacaaccacctgaagaacagcagcaacacctctgtgggcagccccagcaacaccatcggccgcacccccagccgccacaccagcagcaggaccagccccctgaccagccccaccaactgcagccacggcggcctgagccccagcatgctggactatgacacagagaacctgaacagcgaggagatctacagcagcctgcggggcgtgacagaggccatcgagaagttctccttccgcagccaggaggacctgaatgagcccatcaagagagatggcaagaaggaatgtgacatcgtgtccagagatggaggagctgccagccctgccacagagggccggggcggcagcgaggtggagggcggccgcacagccctggacaacaagaccagcctgctgaacacccagcccccccgggccttccctggcccccgggcccgggactacaacccctacccctacagtgatgccatcaacacctatgacaagacagccctgaaggaggccgtgtttgatgatgacatggagcagctgagagatgtgcccatcgaccacagcgacctggtggccgacctgctgaaggagctgagcaaccacaatgaaagagtggaggagaggaagggggccctgctggagctgctgaagatcacccgggaggacagcctgggcgtgtgggaggagcacttcaagaccatcctgctgctgctgctggagaccctgggggacaaggaccacagcatccgggccctggccctgcgggtgctgcgggagatcctgaggaaccagcctgcccgcttcaagaactatgcagagctgaccatcatgaagaccctggaggcccacaaggacagccacaaggaggtggtgcgggctgctgaggaggccgccagcaccctggccagcagcatccaccctgagcagtgcatcaaggtgctgtgccccatcatccagacagctgactaccccatcaacctggccgccatcaagatgcagaccaaggtggtggagagaattgccaaggagagcctgctgcagctgctggtggacatcatccctggcctgctgcagggctatgacaacacagagagctctgtgaggaaggccagcgtcttctgcctggtggccatctacagcgtgattggagaggacctgaagccccacctggcccagctgaccggcagcaagatgaagctgctgaacctgtacatcaagagggcccagaccaccaacagcaacagcagcagcagcagtgatgtgtccacccacagctag

SEQ ID NO: 52996 - DNA, 3738 bp, Artificial Sequence
  derived and/or modified sequence
atgaccaccgggaaggacaagaactttgatgatgaggacagcgtggatggcaaccggcccagcagcgccagcagcaccagcagcaaggccccacccagcagcagaagaaatgtgggcatgggcaccacccggcggctgggcagcagcaccctgggcagcaagagcagcgctgccaaggagggcgctggagctgtggatgaggaggacttcatcaaggcctttgatgatgtgcctgtggtgcagatctacagcagccgggacctggaggagagcatcaacaagatccgggagatcctgagtgatgacaagcatgactgggagcagagggtgaatgccctgaagaagatccgcagcctgctgctggccggggctgctgaatatgacaacttcttccagcacctgcggctgctggatggagccttcaagctgagcgccaaggacctgcggagccaggtggtgcgggaggcctgcatcaccctgggccacctgagctctgtgctgggcaacaagtttgaccatggagctgaggccatcatgcccaccatcttcaacctgatccccaacagcgccaagatcatggccaccagcggcgtggtggccgtgcggctcatcatccgccacacccacatccccaggctcatccctgtgatcaccagcaactgcaccagcaagtctgtggccgtgagaagacgctgctttgagttcctggacctgctgctgcaggagtggcagacccacagcctggagcggcacatctctgtgctggccgagaccatcaagaagggcatccatgatgctgacagcgaggcccgcatcgaggccaggaagtgctactggggcttccacagccacttcagccgggaggccgagcacctgtaccacaccctggagagcagctaccagaaggccctgcagagccacctgaagaacagcgacagcatcgtgtccctgccccagagcgacaggagcagcagcagcagccaggagagcctgaaccggcccctgagcgccaagaggagccccaccggcagcaccaccagccgggccagcacagtgtccaccaagtctgtgtccaccaccggcagcctgcagaggagcagaagtgacattgatgtgaatgctgctgccagcgccaagagcaaggtgagcagcagcagcggcaccacccccttcagcagcgctgctgccctgcccccaggcagctatgccagcctggatggcaccaccaccaaggccgagggccgcatccgcacccggcggcagagcagcggcagcgccaccaacgtggccagcaccccagacaacagaggccgcagccgggccaaggtggtgtcccagagccagaggagccgcagcgccaacccagctggggccggcagccgcagcagcagccctgggaagctgctgggcagcggctatggaggcctgactggaggcagcagccggggcccccctgtgacccccagcagcgagaagaggagcaagatccccaggagccagggctgcagccgggagaccagccccaacagaattggcctggaccgcttcggcctgggccagcccggccgcatccctggctctgtgaatgccatgagggtgctgagcaccagcacagacctggaggccgctgtggctgatgccctgctgctgggggacagccgcagcaagaagcctgtgagaagaagatatgagccctacggcatgtacagtgatgatgatgccaacagtgatgccagctctgtgtgcagcgagaggagctatggcagcagaaatggaggcatcccccactacctgcggcagacagaagatgtggccgaggtgctgaaccactgtgccagcagcaactggagcgagaggaaggagggcctgctgggcctgcagaacctgctgaagagccagaggaccctgagccgggtggagctgaagaggctgtgtgagatcttcaccaggatgtttgctgacccccacagcaaggtgttctccatgttcctggagaccctggtggacttcatcatcatccacaaggatgacctgcaggactggctgtttgtgctgctgacccagctgctgaagaagatgggcgctgacctgctgggctctgtgcaggccaaggtgcagaaggccctggatgtgacccgggacagcttcccctttgaccagcagttcaacatcctgatgaggttcatcgtggaccagacccagacccccaacctgaaggtgaaggtggccatcctgaagtacatcgagagcctggcccggcagatggaccccacagactttgtgaacagcagcgagacccggctggccgtgagccgcatcatcacctggaccacagagcccaagagcagtgatgtgaggaaggccgcccagatcgtgctgatcagcctgtttgagctgaacaccccagagttcaccatgctgctgggcgccctgcccaagaccttccaggatggagccaccaagctgctgcacaaccacctgaagaacagcagcaacacctctgtgggcagccccagcaacaccatcggccgcacccccagccgccacaccagcagcaggaccagccccctgaccagccccaccaactgcagccatggaggcctgagccccagcatgctggactatgacacagagaacctgaacagcgaggagatctacagcagcctgcggggcgtgacagaggccatcgagaagttctccttccgcagccaggaggacctgaatgagcccatcaagagagatggcaagaaggaatgtgacatcgtgtccagagatggaggagctgccagccctgccacagagggccggggcggcagcgaggtggagggcggccgcacagccctggacaacaagaccagcctgctgaacacccagcccccccgggccttccctggcccccgggcccgggactacaacccctacccctacagtgatgccatcaacacctatgacaagacagccctgaaggaggccgtgtttgatgatgacatggagcagctgagagatgtgcccatcgaccacagcgacctggtggccgacctgctgaaggagctgagcaaccacaatgaaagagtggaggagaggaaaggagccctgctggagctgctgaagatcacccgggaggacagcctgggcgtgtgggaggagcacttcaagaccatcctgctgctgctgctggagaccctgggggacaaggaccacagcatccgggccctggccctgcgggtgctgcgggagatcctgaggaaccagcctgcccgcttcaagaactatgcagagctgaccatcatgaagaccctggaggcccacaaggacagccacaaggaggtggtgcgggctgctgaggaggccgccagcaccctggccagcagcatccaccctgagcagtgcatcaaggtgctgtgccccatcatccagacagctgactaccccatcaacctggccgccatcaagatgcagaccaaggtggtggagcgcatcgccaaggagagcctgctgcagctgctggtggacatcatccctggcctgctgcagggctatgacaacacagagagctctgtgaggaaggcctctgtgttctgcctggtggccatctacagcgtcatcggggaggacctgaagccccacctggcccagctgaccggcagcaagatgaagctgctgaacctgtacatcaagagggcccagaccaccaacagcaacagcagcagcagcagtgatgtgtccacccacagctag

SEQ ID NO: 52997 - DNA, 4437 bp, Artificial Sequence
  derived and/or modified sequence
atggagccccggatggagagctgcctggcccaggtgctgcagaaggacgtgggcaagagactgcaagtcgggcaggaattaattgactactttagtgacaaacagaagtcagccgatttagaacacgaccagaccatgctcgacaagttggtagatggcctggccacgagctgggttaatagttcaaattataaagtcgtcctgctgggaatggatatcctgagcgccctggtgactcgcctccaggaccgtttcaaggctcagattggaactgttttgccttctctgatcgatcgattgggtgacgccaaggacagcgttagggaacaggatcagaccttgctgttgaagataatggatcaagctgccaaccctcaatatgtgtgggatcggatgcttgggggattcaagcataaaaatttcagaacaagggagggtatttgcctctgcctgatcgccactttaaacgcatcaggagctcagaccttgactcttagtaaaatcgtgccacatatttgcaatctacttggcgaccccaattcccaggtgagggatgcagctattaacagcttggttgagatctataggcatgtcggggaacgtgtcagggccgatctgagcaagaaaggacttcctcagtcacgattaaacgttattttcacaaagtttgacgaggttcagaagagcgggaatatgatccagtctgccaatgataaaaatttcgatgatgaggatagcgtcgatggcaatagacccagcagcgcctcctccacatcttctaaggctccaccaagtagtcgtagaaacgtcggcatgggcacaactagaagactgggctcatccactctgggttctaaatcctccgccgctaaagagggcgctggggccgttgacgaggaggatttcattaaggcttttgacgacgtgcctgtggtgcaaatctatagctccagggacttggaggagagtatcaataagatccgagagattctgtccgacgacaagcacgactgggaacagagagtgaacgccttgaagaaaatccggagtctactcctggcaggcgccgcggagtacgataacttttttcagcacctgcggctcctcgacggtgcatttaaactatcagcgaaggacctgcgcagccaggtggttcgcgaggcatgcattaccctcggccatctttcgtctgtgctgggaaataagtttgaccacggggcagaggctataatgcccacaatctttaaccttatcccaaatagcgccaagatcatggcgacttccggagttgtagccgtacgtctgataattagacacacccatattccgcgcttgattcctgttattacttcaaactgtaccagcaaaagcgtcgccgtgaggcggagatgtttcgagtttttggacctgcttctgcaggaatggcaaacccactctctggagcgacatatctctgttcttgcagagacaataaaaaaaggcatccatgatgcagacagtgaggctagaattgaggctcgtaaatgctactggggctttcactcgcattttagccgcgaggccgaacacctctatcataccctggaatcatcctatcaaaaagctctgcagtcacatttgaagaattcagacagcatcgtgtccttacctcagagtgaccgttcctcctctagttcccaggaatctctcaataggccgctgtctgcaaagcggtcccccaccggctccacaacaagccgcgcctccacagtgtccacaaagtccgtgtcgacaaccggttcactccagcgttcccgcagcgacatcgacgtgaatgctgcagcttcagccaagtccaaagtatcatctagcagcggcaccacacctttctcatccgcagccgctctgccccctggtagctatgcgtccctggatggcaccaccaccaaggctgaagggaggatccgtaccaggagacagagctccgggtccgcaactaacgttgcatcaactcccgacaatagaggccggagccgagccaaagttgtgtcgcagagccaacgctcaaggagcgccaatcccgccggtgctggaagccgtagttccagccccggcaaactgcttggctccggctacggaggtttaaccggggggtcaagccgaggtcccccagtgacacctagctccgagaagcgttccaagatcccaaggtcccaggggtgttcgcgggaaacttcccccaataggataggactggaccggtttgggctaggccagcccgggcggatacctgggagtgtgaatgccatgagggttttaagcacttccaccgatttagaagccgccgtcgcagacgcactactcttaggggactcacgcagtaagaagaaacctgtgaggagacgctatgaaccatacgggatgtacagtgacgacgacgcaaacagcgacgcatccagcgtttgtagcgagcgctcctacggatcgcgtaacggtggaatcccccactatctgcggcagacagaggatgtcgcagaggtgctgaatcattgtgcttcgtcaaactggagtgagcgtaaggagggtttattaggtttacagaacctcctcaagtcccaaaggaccttgagcagagtagaactcaaacgcttgtgtgagatttttacaagaatgttcgcagatcctcacagcaaagtgttctctatgtttttggagacccttgtcgacttcatcatcatccacaaagatgacctacaggactggcttttcgtgttgctgacacaactcctgaagaaaatgggcgccgatctcctcggaagtgtgcaagctaaggtgcagaaagctctggacgtcacaagggactcttttccatttgaccaacaattcaacatcctcatgaggtttatcgtggatcaaacccaaactccaaatcttaaggtcaaggtagctatcctgaagtacatcgaatccctcgctaggcagatggacccgacagactttgtgaatagctcagagacacgacttgctgtctcccgtatcatcacttggacaacggagcctaagtcatctgacgttcggaaggccgcccaaatagtcctcatctccctgttcgagctcaacacacctgaattcaccatgctgctaggagccctgccaaaaacgttccaggacggcgctacgaagttgctgcacaaccatctgaaaaactctagcaatacctcagttggctctccatccaacaccataggacgtaccccctccaggcacacctccagcagaacttccccccttacatcccctaccaactgcagccacgggggcctgagtccatccatgctggactacgacaccgaaaacctgaactcagaggagatatacagtagtctcaggggcgtcacagaagcaatcgagaagttctcttttcggagccaggaagatctgaatgaaccaattaaaagggacgggaagaaggaatgcgatatcgttagcagggatggcggcgccgcctcgcctgcgaccgagggacggggagggagtgaggtggaaggcggccgaaccgctttggacaacaagacctctttgttgaatactcagcccccccgcgcttttcctgggcctagagcacgcgactataacccatacccatacagcgatgcgataaacacatatgacaaaacagcgctgaaggaggccgtgtttgacgacgacatggagcaattaagggacgttccaatcgatcacagcgatctggtggctgacctgttgaaagagctttcaaatcacaacgagcgggtggaggagcgcaaaggcgcgttactggagcttctgaaaatcaccagggaggatagcctgggtgtgtgggaagagcacttcaagacgatactgttactgttgctggaaacattaggtgacaaagatcacagcatacgcgctcttgcgcttcgtgtcttgagggagatcttgagaaaccaacccgccaggtttaaaaactacgctgagctcaccattatgaagactttagaggcacacaaggattctcataaggaggtggtgcgggctgccgaggaagccgcatccactctcgcaagcagcattcaccctgagcaatgtataaaagtgttatgccctataattcagacagcggattatccaataaatcttgctgctattaagatgcagaccaaggtcgttgagcgcattgctaaggaatccctgttgcaattgctggttgatataattccaggcctgcttcaaggctatgacaatacggagtcgtcagtaagaaaggcctctgtgttttgcctagtggctatctatagtgtgatcggggaggacctgaagccccatctggcacagctcactggctcgaaaatgaaactccttaacttgtatattaagcgagctcagacaactaatagcaattccagtagcagttccgatgtgtctactcattcctag

SEQ ID NO: 52998 - DNA, 3738 bp, Artificial Sequence
  derived and/or modified sequence
atgaccaccggcaaggacaagaacttcgacgacgaggacagcgtggacgggaacaggccctcttccgccagctccacatcttccaaggcgccccccagttcacgacggaatgtggggatgggtaccacccggcggttagggtccagtactctggggagtaaatcttcagctgcaaaggagggggcgggcgcggttgatgaagaagattttatcaaagcatttgacgacgtgcctgtggtgcagatatacagctcccgagacctggaggaaagtatcaacaaaatccgtgagattctgagcgatgacaagcacgattgggaacagcgggtgaatgctctgaagaagattcggtccctgctgcttgccggcgccgccgagtatgacaacttcttccaacacctccggctgttggacggcgccttcaaactgtctgccaaggacctgcgctcacaggtggtaagagaggcttgtatcactctgggccacctctcgtcagtgctggggaataagtttgatcacggcgccgaggccatcatgcccacaattttcaatctgattccgaattctgcgaagatcatggctacaagcggtgtggtagctgtgaggctgataattcgccacacacacatccctcgattaattcctgttatcactagcaactgtacatccaagagcgtcgctgtgcgtcgaaggtgcttcgaatttcttgatttgcttcttcaggaatggcagacacatagcctggagagacacattagtgtgctggccgagactattaagaaggggatccacgatgctgattctgaagctcgaatcgaggctagaaagtgttattgggggttccactctcatttttcccgagaagccgagcacctgtaccacaccctggaatcgagctatcagaaagcactacaatcccacctgaagaattctgacagcatcgtgtctctgcctcagtcagacagatcttcaagctcaagccaggagtccctgaaccgaccactgagcgcgaaacggagcccaacagggtcaaccaccagccgagccagcaccgtttcaactaaatctgtttcgaccacaggctcactgcaacgctcacgaagtgacatcgacgtcaatgccgcagcttcagccaagagcaaagtgtcatcctcctccggcactacccctttctcttcagccgctgcgcttcctcccggttcctacgcttctctggatggtaccacgacaaaggccgagggaaggatccgcacaagacgccagtcctcggggtctgccacaaacgtggcctctactccagataatagaggccgtagccgggccaaggtggtcagccagtctcagagatctcgcagcgcgaatccggctggcgctggatcgcggagcagcagccccgggaagttgctggggagcgggtatgggggccttacaggaggcagtagccgtgggcctccagttacaccatcctccgagaaaagatcaaaaattccacgcagtcaggggtgtagtagggaaacaagccctaacaggatagggttagatcgcttcggcctgggacagccaggcaggattcccggatctgtgaacgccatgagagtcctcagtactagcacggacctcgaggctgccgtggcagatgcgctattacttggcgattcccgctcgaagaagcctgtgcgccggcgttacgaaccatacggaatgtattccgatgatgacgccaattctgatgcgagcagtgtctgttccgaacggtcttatggctcccgtaatggtggtatcccccattatctaagacaaaccgaggatgtcgctgaagtcctcaatcactgcgcatctagcaattggtcggaacgcaaggaggggttgctgggcctgcagaatcttctgaaatcccaaagaaccctgtcaagagtcgaactgaaaagactgtgtgagatcttcactagaatgtttgccgatcctcacagcaaagtgttttctatgtttctcgaaactctggtcgattttatcataattcacaaggatgacttacaggattggctgttcgtgttgctaacacagctgctcaaaaaaatgggtgcagacttacttggaagcgtgcaggcaaaagtgcagaaggctctggacgttactcgggattcattcccgtttgatcagcagttcaacatcttgatgcggttcatcgtcgaccagactcagactccaaacctgaaagttaaggttgcaatcttgaaatacatcgagtctctggcccggcagatggaccccaccgattttgtcaattcctccgaaacccgtctcgcagtgagccgcattatcacatggaccaccgagcccaaaagctcggatgtgagaaaggccgctcaaattgtgctcatctcgttgttcgaacttaatacaccggaatttaccatgctgttgggcgcacttcctaaaaccttccaggacggagctactaaactattgcacaatcacctcaaaaacagctcgaatactagtgtcggtagccctagcaatactatcgggcggacaccttcaaggcatactagttctcggacgtcaccactgacatccccgacaaactgctctcacggcggactcagtccatccatgctggattacgacacagagaatctgaactccgaggagatctattcaagtctgcggggagtgacggaagcaattgaaaaattcagtttccggtcccaggaagacctcaacgagcccataaagagagatggcaagaaggagtgcgatattgtcagccgcgatggcggagcagccagtcctgccaccgagggcagggggggtagtgaggtggagggtggcagaactgccttagacaacaaaacttcccttctcaacacccagccgccccgtgccttccctgggccaagggcacgggactacaacccatacccatacagtgatgctataaacacttacgataaaactgccctgaaagaggcagttttcgatgatgacatggaacagttgagagatgtgccgatagaccactccgacctcgtggctgatctcttaaaggagctcagtaaccacaatgaacgggtcgaggagcggaagggcgcactgctcgagctcctcaaaatcacacgagaggattctctcggtgtttgggaagagcactttaaaacgattctgctgttgttgctggaaaccctgggcgacaaagatcactcaattagggctctggcccttcgagttcttcgggaaatccttcggaatcagccggccagattcaagaactacgcggagttgacaattatgaagaccctggaagcccataaggacagtcacaaggaggtggtgagagctgccgaggaagcagcgagcactcttgctagctcaattcatcctgaacagtgtattaaagtgctatgcccaataatccagactgctgactaccctattaatctcgctgccataaaaatgcagactaaagtggttgagcgaatcgctaaagaatccttgcttcaactgctggtcgacataatcccagggctgcttcagggctacgacaatacagagagcagcgtccggaaggcctccgtgttctgcttggtggcgatttactccgtgatcggggaggatttgaagccacacttggctcagctgaccggaagcaaaatgaagctgttaaatttatacatcaaaagagctcagacaactaactctaactcctccagcagtagcgatgtgagtactcactcatag

SEQ ID NO: 52999 - DNA, 4437 bp, Artificial Sequence
  derived and/or modified sequence
atggagcctagaatggaatcctgtctggcgcaagtcctacagaaagacgtgggcaagaggttgcaagttggacaggagctgatcgactatttctcagacaagcaaaagtccgcagacctggagcatgaccaaacgatgctcgacaaacttgttgatggcctggcaacctcttgggttaatagctccaactacaaagtggtgttacttggcatggatatcctgagtgctctggtcactaggctgcaggacagattcaaggctcagatcggcactgtgctcccatccctcatcgacagactgggtgacgccaaggattctgtgagggaacaagatcagacgttgctcctgaaaattatggaccaggctgccaacccgcagtacgtatgggacaggatgctgggagggtttaaacacaagaatttccgaacccgtgaaggcatctgtctttgtttaatagcaacattgaatgccagcggagcccaaactttgacattgtcaaagatcgtccctcacatttgtaatctgcttggggaccctaattcgcaggtgagggacgccgcaatcaacagccttgtggagatatatcgccatgtgggcgagagggtgagagctgacctgtctaagaagggcttgccgcagagcagactgaatgtcattttcactaaattcgatgaggtccaaaagtcaggcaacatgatacagtctgccaatgacaagaattttgacgatgaggatagtgtcgacggtaacaggccctcgtccgctagtagcacctcctcaaaggcaccaccctccagccggcgaaatgttggcatgggaaccacacggcgtttaggcagctctacactgggttccaagagtagcgcagccaaggagggcgctggagccgtggatgaggaggactttataaaagcctttgacgacgtccccgtggtccaaatttattcttctcgggatcttgaggagtctatcaacaaaatccgggaaatactgtccgatgataaacacgattgggagcagcgcgtgaatgctctcaaaaaaattaggtccctcctgctggctggagccgcagaatacgataactttttccaacatcttcgactgctcgacggcgctttcaagctgtctgccaaagaccttagaagccaggtcgtgcgcgaggcatgtattactctgggccacttgtcttccgtgcttggcaacaaatttgatcacggggctgaggcgatcatgccaacgatttttaacctgatcccaaacagtgctaagatcatggccacctccggggtcgttgccgtgcggctcattatacggcacacccatatcccaaggctgatccccgtaataacgtcaaactgtacctcgaagtccgtggccgttaggcgacgctgtttcgagttcctggacctcctgctgcaagaatggcagacgcactccctggagagacacatttctgtactggcagaaactatcaagaaaggcatccacgatgccgatagtgaagctcgtattgaggctcggaaatgctactggggttttcactcccatttcagtcgtgaagctgagcacctctatcacacgctggagtcatcttatcagaaagcactgcagtcccatttgaagaatagtgacagcattgtgtccctaccccaaagtgacagatcctcttccagttctcaggaaagcctgaaccgcccattgtctgccaagagaagccccacaggttccacaacatctagggcctccacagtttctaccaaaagcgtgtctacaaccgggagcctgcaacgctcacgctctgacattgacgtaaacgctgcagcaagtgcaaagtccaaggtgtcaagttccagcggtacgacgcctttttcctctgctgccgctctcccacccggaagctatgcgtcccttgacgggactaccactaaggcagaggggaggatccgcaccagacgccaatcttctggctccgcaaccaacgtggcctccacaccagacaacagaggcaggtcccgtgccaaagtggtgtcacaatcccagagaagtcgttctgccaaccccgcaggggctggatcccgcagctcttcacccggtaagctgctgggaagtggctatggaggcctcaccgggggatcctctcggggtccacccgtgacaccctcaagcgaaaagcgcagtaaaatccctcgaagccagggatgctcacgcgagacttcaccaaaccgaatcggattagataggttcggattaggccagccaggcagaatccctgggagcgtgaatgcaatgcgagtgcttagcacaagcactgatttggaggccgcagtggcagacgccctcctgttgggagacagtcgaagcaagaaaaagcccgtaaggaggcgctatgagccttatggaatgtattcagacgacgacgcaaatagcgatgcctccagtgtgtgttccgagcggtcttacggatcaaggaacggaggcataccacactacttacgccaaacggaggatgtagcggaagtcctgaaccactgcgcatcttcaaattggtcagagagaaaagagggcttgctgggcctgcaaaatctactcaaatctcagagaacactgtccagagtggagttgaagagactgtgcgaaatcttcacacgcatgtttgccgacccccattccaaagtgttctccatgtttctggaaaccttggtggatttcattattattcacaaggatgacttgcaagactggctctttgtcctcctgacccagctactgaagaagatgggagctgatcttctggggtctgtccaagcgaaggtgcagaaagccctggatgttacccgcgatagctttccttttgaccagcagtttaatatcctgatgcgctttatcgtggatcagacccagacgccaaacctaaaagtcaaggtggcgattttgaaatatatagagagtctggccagacaaatggaccctactgactttgtgaactccagtgaaacccgactagcagtcagcagaataattacctggacgacagagcctaagtcgagtgatgtgcggaaagctgctcaaatcgttttaatctccctgttcgaactaaatacacctgagttcaccatgttactcggcgctctgccgaagacttttcaggacggcgcaactaagttattgcataatcacctgaaaaactcttccaatacaagcgttggtagcccatctaataccatcggtcgaactccgagccggcacacttcgagcaggacaagccctttgacctcccccacgaactgtagccacgggggtctgagccccagcatgctggactatgacacagagaacctgaattctgaggagatctacagttccctgcgaggggtcaccgaagccattgaaaagttttctttccggagccaggaagacttgaacgagcccatcaagcgggacgggaagaaagaatgcgacattgttagcagagacgggggtgcagcctctccagctaccgagggacggggaggttcagaagtggagggaggcaggaccgctcttgacaacaaaacttccctgctgaatactcaacccccaagggcttttccaggcccacgcgcacgagactacaacccatatccctactcagacgcaattaacacctacgacaaaacagccctgaaagaggctgtttttgatgacgacatggagcaactgcgtgatgttccaatcgaccactccgatcttgtggccgatcttctcaaagagctgtcaaaccacaacgaaagggtggaagagagaaagggtgccttacttgagctcctcaagattacccgggaggacagcttgggcgtctgggaagaacacttcaagacaattcttctgctcctgctggagactctgggagataaagatcatagcatcagagctctcgctctgcgagtgctgagggagattctgaggaatcagccagcaagatttaagaactatgctgaattgacaataatgaagacccttgaagcacataaagattctcacaaagaagtcgtgagagccgctgaagaggccgctagtacgttggcctcctcaatccatccagaacagtgcatcaaagtcctatgtccaataattcagactgccgactatcctatcaacctagctgccattaagatgcaaactaaagtggttgaacggattgctaaggagagcctccttcagttgcttgtggatatcattccgggactcctgcagggctatgataacaccgaatcgtcagtgaggaaagccagtgtattttgtctcgtcgctatctattcagtcattggagaggacctcaagccacatttagctcagctcacaggctcaaaaatgaaacttttgaacctctacatcaaacgggcacagaccactaattccaattcaagttctagctctgatgtgtccacccactcctag

SEQ ID NO: 53000 - DNA, 3738 bp, Artificial Sequence
  derived and/or modified sequence
atgacaacagggaaagataagaactttgatgacgaagattccgtcgatgggaaccgcccatccagcgctagctccacctccagcaaagcacccccatcctcccgaagaaatgtgggcatgggaaccactagacgtttaggcagttctaccctcggcagcaaaagctccgctgcaaaagagggagccggagccgtagacgaggaagactttattaaggctttcgatgacgtccccgttgtgcagatctattccagtagggatctggaggagtcaattaataagatcagggaaatcctcagcgatgataaacacgactgggagcaacgggtcaacgctttaaagaaaattaggagcttactgctcgccggagcagccgagtacgacaacttctttcagcaccttagattactagacggagcctttaagctctcagcaaaggatctgcggagccaagtggtccgggaggcctgtatcactctcggccacctctcgagtgttctgggcaataaattcgaccatggcgctgaggcaattatgcctactatctttaatttgatacccaatagtgcgaagatcatggcaacgtcgggcgtggtcgctgtcaggcttataattcggcatactcacatcccgaggctgatccccgtcatcacctctaattgtacatcgaagtccgtggccgtaaggagacggtgctttgaatttctggatctcctgctccaggagtggcagacccattctcttgagcgtcacattagcgtgctggccgagactatcaagaagggaatccacgacgctgatagcgaggcgagaatcgaggctagaaaatgttactggggattccattcacacttctcaagagaggccgagcacctgtaccatacgctcgagtcatcataccagaaggccttacagagccacctgaaaaacagcgattccatcgtttctctcccacagagcgacaggtcgtcttcttcatcacaggaatccctcaatcggcctttgagtgctaagaggagcccaacaggctcgacaacatccagagctagtacagtgtccacaaaatcagtatctacaactggttccttgcagcggtctcgcagtgacatcgatgtcaatgctgctgccagcgctaagtccaaggtgagctcttcttctggaacaacaccattctcttccgcagctgccctgcccccaggttcctacgcttcactggacggtaccaccacaaaggctgaaggcagaattcgaacaaggcgacagtcaagcggctccgccacaaacgtggcatcaacaccagacaaccgaggtcgctctagagccaaagtcgtttcgcagagccagcggagccgcagtgcgaatcccgcaggagctggctcccgaagtagctccccgggaaaattgcttggcagcggctacggaggactgaccggtggctcaagcagaggacctccggtcactcccagttccgaaaaacgcagtaaaataccccgttcccagggatgctcccgggagacaagtcctaatcgaattgggttagatcgattcgggttggggcaacctggacgcataccagggtctgtgaatgcaatgcgcgtgctgtctacttccacagacctggaggccgcagtggccgatgctctgttgctgggagattcccgctccaagaagcctgtgcgtcgacgatacgagccctacggaatgtattcagatgatgatgctaactccgacgcaagctccgtatgcagtgagcgctcttacggatcgagaaatggcggaattcctcattatctccgccagactgaggacgtcgcggaggtgctgaatcactgtgcttcctcaaattggtcggagcgcaaggaaggactgttgggcctgcaaaatctgctgaagtcacagagaacactctccagagtagagctgaagcgactctgcgagatatttacgcggatgttcgccgatccccatagcaaggtcttctccatgtttttggagacactcgtagacttcattattatccacaaggatgatcttcaggattggctttttgttctcctgacacagctccttaaaaagatgggcgcagatctcctaggcagtgtgcaggctaaagtccagaaggcactcgatgtgacccgtgacagttttcccttcgaccagcagttcaacattctaatgaggtttattgtggaccagacacagacacctaacctgaaagtgaaggtagctattctcaaatacattgagtcgctggctcggcagatggatccaaccgattttgtgaattcatccgagaccagattggccgtgtcgaggattatcacctggacaactgaacctaagagctccgatgtacggaaagcagctcagatagttttgatctccctatttgaactcaatacccctgagttcaccatgcttttgggcgcactgcctaagactttccaagacggagcaactaaattgctacataaccacctgaagaactctagtaacacgtcagtggggagccccagtaacaccatagggcgaactccttctaggcacacaagttcaaggacctcccctttgactagccctaccaattgctctcacgggggattgagcccgtctatgttggactacgacacagaaaacttgaattccgaggagatttattcctccctgcgcggtgtgacggaagctatcgaaaaattcagtttccgcagccaggaagatctcaacgaaccaataaaaagagacgggaagaaggagtgcgatatcgtgtcacgggatggaggagccgcaagtcccgcaaccgaggggaggggaggatccgaagtcgagggaggccgtacagcccttgacaataaaacctctctacttaacactcaaccgccacgcgctttccctggtccacgagcacgcgattacaacccgtatccatactccgacgccatcaacacatatgacaagacggcgctaaaggaggccgtttttgacgatgacatggagcagctgcgagacgtcccgatcgaccattccgatctggtggccgaccttttaaaggagctgagcaatcacaatgagcgtgtggaagagagaaaaggggcattacttgaactcctcaaaatcacacgggaagacagcctcggggtgtgggaagaacattttaaaacaatcctcctgcttctgctggagacactcggagataaggaccattccatcagagctctggctctgagagtcctcagggagattctcagaaatcagccggctagatttaaaaactacgccgagctcacaatcatgaagacgctggaagcccacaaggattcccataaagaagttgtgcgggctgccgaagaggctgcctcaaccctggcttcttcaattcatcccgaacagtgtatcaaggtgctctgtccaatcattcagactgctgattacccaattaacttagccgctattaagatgcagaccaaggttgtcgagcggatagcgaaagagtctctgctccagctcctcgtggatatcatccctggccttctacaggggtacgataacacggaatcttccgtccgtaaggcttcagtcttttgcctggtggcaatctattccgtgatcggcgaggatttaaaaccccacctggctcagcttacaggctctaaaatgaagctgctcaacctatacattaagcgggctcagaccaccaacagcaactctagcagcagttctgacgtctccactcatagctag

SEQ ID NO: 53001 - DNA, 7910 bp, Artificial Sequence
  derived and/or modified sequence
tttttttttttttaatccccgcaccaagcgcttaacctcattggggtggaggagaaggcggcggctctctggtccgcagcggcaacagtaacgaaaaacagggctaatggactgctgaattatgaagtatttcagacccagtagtagaacatcactctgccactcactcctttatctcctactagttatttaaattggacttttaatatcctaccagctgctcttcagacacacatggtgcattgttgccattccccagattgcatctttgaaacacaggctcttagtaaccttcagcgaacaaagaggcaacctcccagatacgtctgctgggagggagtcatcgtgactgccctctagcttttgctggatctggatttgaattccactatggagcctcgcatggagtcctgcctggcgcaggtgttgcagaaggatgtggggaaacgattgcaggttggccaagaactgatagactatttctcagacaaacagaagtctgctgaccttgagcatgaccagaccatgttagataaacttgtggatggacttgctacctcttgggtgaactctagcaattacaaggtggttctgctgggcatggacatcctgtccgccctggtgacccggctgcaggatcggttcaaggcgcagatcggcacagtgctgccaagtctaatagacagactaggagatgctaaagactctgtgagggagcaggaccaaactctgctgctaaagatcatggatcaagctgctaatccccagtacgtatgggacagaatgcttggaggcttcaaacacaagaatttccgtactcgagaaggcatctgtctctgccttatagcaacactcaatgcctctggagcacagactttaacactaagcaagattgtgccacatatatgcaacttacttggagatccaaacagccaggttcgagatgcagcaataaacagcttagtggaaatttacagacatgtaggagaacgtgtgagggcagatctcagtaaaaaaggattgccacagtcccggttgaatgtaatttttacaaaatttgatgaagtccagaaatctggaaacatgatacaatctgcaaatgataaaaatttcgacgatgaagattctgtggatggtaacagaccttcctctgctagttctacatcatccaaggctccaccaagttctcggagaaacgttggaatgggaaccacccgccggcttggttcatccacccttggatccaagtcttcagctgcaaaagaaggagctggtgctgttgatgaagaggattttattaaagcatttgatgatgtacctgtagtacagatttattccagccgagaccttgaggaatccataaacaaaattagggaaatattatctgatgacaagcatgattgggagcagagagtaaatgctctaaaaaagattagatctttacttttggctggtgctgctgagtatgataacttctttcaacatttgcgtcttttggatggagcctttaaactctctgctaaggacctgcggtctcaggtagtgcgggaggcttgtatcacgttggggcatctgtcatcagttctggggaataagtttgaccatggagctgaagccattatgccaactatctttaatttaattccaaacagtgccaaaattatggccacatctggtgttgtagctgttaggttaattattcggcacacacacatccctaggttaatacctgtcataacaagcaactgtacctctaagtctgtcgcagttagaaggcgctgttttgaatttttagatttgcttttacaagaatggcagacacattcactagaacgacacatatcagtattagctgaaacaataaagaagggaatacatgatgctgattccgaagcaagaatagaagccagaaaatgttactggggtttccacagtcacttcagcagagaagcagagcacttgtaccacaccttggagtcctcctaccagaaagccctgcagtcccacctgaagaactcagacagcatagtgtctctgcctcagtcagaccgctcatcttccagctctcaagagagtctaaatcgtccgctgtctgccaaaagaagtcctactggaagtaccacatctagagcttctacagttagtaccaaatctgtgtcaacgactgggtccctccagcgatctcgaagtgatattgatgtgaacgcagcagccagtgccaaatccaaagtctcctcatcttcgggcacgacgcctttcagctctgcagcagctttgcctccagggtcatacgcatccttagatggtactaccactaaagcggagggtcggatccgcacaagacggcaaagctctgggagtgccaccaacgtcgcctctacacctgataaccggggccgcagtcgcgctaaagtggtttcacagtcccagcgatccagatctgctaatcctgctggtgctggcagccggtcaagttccccaggaaaattgttgggaagtggttatggtggacttactgggggctcctcacgaggcccacctgtgacaccgtcttcagaaaagcgaagcaagattcccaggagccagggatgtagccgggaaacaagtccaaaccgaataggattagatcggtttgggcttggccagccaggaagaatacctggttctgtgaatgccatgagagttctgagcacaagtacagatcttgaagctgctgttgctgatgctttgctgttaggagactccaggagcaagaagaagcctgtgaggaggagatatgagccgtatgggatgtattctgacgatgatgccaacagtgatgcctcaagtgtttgctctgagcgctcatatggctccaggaatggtggcattccccattatctgcggcagactgaggatgtagcagaagttctcaaccactgtgctagttcaaactggtcagaaaggaaagaagggcttctgggcctgcagaacttactgaagagccaaagaacactgagtcgagttgaactgaaaaggttgtgtgagatcttcactcggatgtttgctgaccctcatagcaaggttttcagtatgtttttggagactcttgtggattttataataattcataaggatgatttacaagactggctttttgttcttctcacacaattacttaagaaaatgggagcagatttacttggatctgtgcaagcaaaagttcaaaaggctctagatgtcacaagggactcctttccatttgatcaacaatttaacattttgatgagatttattgtggatcaaactcaaactccaaacctcaaggtcaaagttgcaatcctgaaatacattgagtctctggccagacagatggatccaacagattttgtaaactctagtgagacaaggcttgctgtttctagaatcataacctggacaacagaaccaaagagttcagacgtgagaaaggcagcacagattgtgctaatctctctgtttgaattgaatactcctgaatttaccatgttacttggtgccttgccaaaaacattccaggatggtgccaccaaactcctgcacaaccacctcaagaattccagtaacaccagtgtgggctctccaagcaatacgattggccggacgccctcccgacacaccagcagcaggaccagccccctgacctcacccaccaactgttcccatgggggtctgtctccaagcatgctggactatgatacagagaacctgaactctgaagaaatctatagttctctacgtggagttacagaagccattgaaaagtttagttttcgaagccaagaagatctgaatgagccaattaaacgagatggcaaaaaggagtgtgatattgtgtcccgcgatgggggcgctgcctcccctgccactgagggccgggggggtagtgaagtagaaggaggccggacagctctggataacaagacctcactactcaacacccagcctccgcgcgccttcccggggccgcgggcgcgagactacaacccgtacccctactcagatgccatcaacacctacgacaagaccgccctgaaagaggctgtgttcgatgacgacatggagcagcttcgagacgtgcccatcgaccattctgacctggtggctgaccttctgaaagagctgtccaaccacaatgagcgagtggaggaacggaagggagccctgctggagctgctcaagatcacgcgggaagacagccttggtgtctgggaggagcacttcaagaccattctgctcctgctgctggagacccttggagacaaagaccattcaattcgagcactggcgttaagagttttgagggaaattctgagaaatcaaccagcaagatttaaaaactacgccgagctgacgattatgaagactctggaagcccacaaagactcccataaggaggtggtgagagcggctgaggaggctgcgtccacactggccagttccatccacccggagcagtgcatcaaggtgctctgccccatcatccagacggccgactaccccatcaaccttgctgccatcaagatgcagaccaaagtcgtcgagaggatcgcaaaggagtcattgctgcagctccttgtcgacatcatcccaggcttgctgcagggttatgacaacaccgaaagtagtgtgcgtaaggccagcgtgttttgcttagtggcaatttattccgtaatcggagaagacctgaaacctcaccttgcacagctcacagggagcaagatgaagctactaaacttatacataaagagggcccagaccaccaacagcaacagcagctcctcctccgatgtctccacgcacagctaatggcagtacctgtctcttgtgtagacctagaagcaatcggtggtgcctctcagagacctttccccacccccttcatcggctgcccagtcagtacaaggaggcccacaaatatttattacaatcagtattttggtcccttccagcttttctgtagaatcttactggtattgaatgtaaaggaagcaaggcctgtattgcagtcttcatacaaaacaaaaggaataagaacagaaaagagccatactgaaacatgtcttgtacagcctgctgagatggcgaaaccctgtgtgtggggtgcagtttttaaaaatcagagcgctctagccactacttggtagaaagtagcattttttttttcagttaataacatatttgggggtggggtggggtgttactttgtgttcttcctccttagcctattttcttgtgcgtatggtctgtgtggggcccctttcacagctgacaccacgaaaggtgatatatctttaagttgtgttctgagacctactaaaaatgggaatcaagtcttggcaagaacagtctgaagatggccttttaacaaacgctgggaattttgcttgtcatatccagactggaggccgactgccctggctttcagcgtagaattgggagtgcaccctgacagtctccttccagctctccctaatcgactccaccgacaaggtccctaccccagagcttccatgcaaaggaattcttcaagtttaaatctggacacaaaaataagataaatgtatggcatcatttagggatgcctgagatggcagttcatgaagcacagaagataaagaagaagtctttcatctttactgctgagatccttgggaacactgttgtcatgggggctctgccaagaccctcatctctgggctacacggtgattcagattgagcaccaacttgtttcctcccctcaaagttctgcctaagccgttcagttctaacatggtctcagttaatctggtaaatggcatctttaccatcttagttctgacttctcagtttaatgtgggattaagagccaagaaaagcctagagagactggatatcacaattttttttaattttataaactgaagtagttccttgaatgtctgttgatgaaatagtcactgtttaaggaaaaaagtaattatgaggtgtagcagattgcagaaaaacaggattagaaacacacttaaaaagaacacacatttagagtctctcttcctcctcagcgaaccactaggccccctttttaaaaacacctttagagcctaattactccaataaaagtaactagaggtttggagtctggttaaataaattctgagtaaaattcttaagccaaatggaaattcttaatgcaatcatgaggacttctattgtctcttactgttgtattagatcctataaattgaactgatttttccataaggaaaatgcttcttttgagattaattctaataacgtatttgctattgcagtgcagagcccactgcaactgctaggactgaaagcagaggctgggtgccagagcacgtgattcttaacatcatttccacagacccctctgccctgaccctctgcattggatgcaggaagctgggaaagactgatgttgatttggaaacatgggctgaaaatgaaggccccatagtgcataggaacagtaaagccagggtgctgacgtgtgtgtgtgtgtgtgtgtgtgtgtgtgtgtgtgtgtggtgttgtgtgtgtttgtgcgtgcaccctacacatgtgtggtacctcactgctgctgtttagggaacttgagggacgcgtttcaaggggttgggtattactgacgagctttggctcaaaatatagcaggaccaggtcttttgttgataagtactgtttgtttattaatatgtcattaatggtatttcttttttacactctacaagtgaattagggagtctcttgttgacccctttgttgcaggaatgtgcgtcgggctaggttatccatgagtttctttattcctaatgcagttagaaagacctttctccttgagctctttgactcccagaaggtaccccagtccccagtgtacttagaaaggatctcgaacattgctggacgtcctcatagtactcacaaagggctagccttgaatgtcactcgcccagtcttcagtctcctgacttagagatacaatcacgtcacaggtctcttggcctcaatctgaaaactgctgccgccgcgccgaggagactcgcatgccgccaccacctcactgggagggcgccgagcccaccgtcgccccctagaccctgacagctgcagctgccttgccttgccgccgcctccctgcagggcccctgttccaatgaaaaacagaacacaaaagagcagagcacctaagcctgtctctgcctccctgtctaccggactggccagggcccaagacccccgctgctccactgcggggctgggcgggctgactccctgcttcctccaagctgctgcctcccctgcagccagggtctgggcagggtgcagccggtcctcggggcacgcagcttccttcaagtacactgtgtgtgcttcccggacctgcggcgatgccacgggcctgccttttctatgcgcctcactagcttaccaccctgtgcaggtaatgcaactgactttgtctcatcagtctttttctttccctgccaccctttatttatcaagcgtaatgttacactttaaaggacagcaaataagaactttgtagaatcccaccaggactttgctaacaataatgtttggaaataaagaagtgctctgaaaaaatatcagccaccaaaatagttatgttggcactgtgttcacacgcatggtccccacacccccaggttgggtgggtttttttgttttttgggtttttttgggggggggggctttttcatgttacatccatatctgtatttatatcttatttgtttcactttcaagtgtatcatggcaaatgtacagatttttttgttaataatgtgctaggatttgctaaaaaagaaaaaaaaaaaacccttttgagtttgccctagaataaatgagacttaattc

SEQ ID NO: 53002 - DNA, 3942 bp, Artificial Sequence
  derived and/or modified sequence
agagcagtgtttttatttggtaccaggattactgacaatcatgactactgggaaagataaaaatttcgacgatgaagattctgtggatggtaacagaccttcctctgctagttctacatcatccaaggctccaccaagttctcggagaaacgttggaatgggaaccacccgccggcttggttcatccacccttggatccaagtcttcagctgcaaaagaaggagctggtgctgttgatgaagaggattttattaaagcatttgatgatgtacctgtagtacagatttattccagccgagaccttgaggaatccataaacaaaattagggaaatattatctgatgacaagcatgattgggagcagagagtaaatgctctaaaaaagattagatctttacttttggctggtgctgctgagtatgataacttctttcaacatttgcgtcttttggatggagcctttaaactctctgctaaggacctgcggtctcaggtagtgcgggaggcttgtatcacgttggggcatctgtcatcagttctggggaataagtttgaccatggagctgaagccattatgccaactatctttaatttaattccaaacagtgccaaaattatggccacatctggtgttgtagctgttaggttaattattcggcacacacacatccctaggttaatacctgtcataacaagcaactgtacctctaagtctgtcgcagttagaaggcgctgttttgaatttttagatttgcttttacaagaatggcagacacattcactagaacgacacatatcagtattagctgaaacaataaagaagggaatacatgatgctgattccgaagcaagaatagaagccagaaaatgttactggggtttccacagtcacttcagcagagaagcagagcacttgtaccacaccttggagtcctcctaccagaaagccctgcagtcccacctgaagaactcagacagcatagtgtctctgcctcagtcagaccgctcatcttccagctctcaagagagtctaaatcgtccgctgtctgccaaaagaagtcctactggaagtaccacatctagagcttctacagttagtaccaaatctgtgtcaacgactgggtccctccagcgatctcgaagtgatattgatgtgaacgcagcagccagtgccaaatccaaagtctcctcatcttcgggcacgacgcctttcagctctgcagcagctttgcctccagggtcatacgcatccttagatggtactaccactaaagcggagggtcggatccgcacaagacggcaaagctctgggagtgccaccaacgtcgcctctacacctgataaccggggccgcagtcgcgctaaagtggtttcacagtcccagcgatccagatctgctaatcctgctggtgctggcagccggtcaagttccccaggaaaattgttgggaagtggttatggtggacttactgggggctcctcacgaggcccacctgtgacaccgtcttcagaaaagcgaagcaagattcccaggagccagggatgtagccgggaaacaagtccaaaccgaataggattagatcggtttgggcttggccagccaggaagaatacctggttctgtgaatgccatgagagttctgagcacaagtacagatcttgaagctgctgttgctgatgctttgctgttaggagactccaggagcaagaagcctgtgaggaggagatatgagccgtatgggatgtattctgacgatgatgccaacagtgatgcctcaagtgtttgctctgagcgctcatatggctccaggaatggtggcattccccattatctgcggcagactgaggatgtagcagaagttctcaaccactgtgctagttcaaactggtcagaaaggaaagaagggcttctgggcctgcagaacttactgaagagccaaagaacactgagtcgagttgaactgaaaaggttgtgtgagatcttcactcggatgtttgctgaccctcatagcaaggttttcagtatgtttttggagactcttgtggattttataataattcataaggatgatttacaagactggctttttgttcttctcacacaattacttaagaaaatgggagcagatttacttggatctgtgcaagcaaaagttcaaaaggctctagatgtcacaagggactcctttccatttgatcaacaatttaacattttgatgagatttattgtggatcaaactcaaactccaaacctcaaggtcaaagttgcaatcctgaaatacattgagtctctggccagacagatggatccaacagattttgtaaactctagtgagacaaggcttgctgtttctagaatcataacctggacaacagaaccaaagagttcagacgtgagaaaggcagcacagattgtgctaatctctctgtttgaattgaatactcctgaatttaccatgttacttggtgccttgccaaaaacattccaggatggtgccaccaaactcctgcacaaccacctcaagaattccagtaacaccagtgtgggctctccaagcaatacgattggccggacgccctcccgacacaccagcagcaggaccagccccctgacctcacccaccaactgttcccatgggggtctgtctccaagcatgctggactatgatacagagaacctgaactctgaagaaatctatagttctctacgtggagttacagaagccattgaaaagtttagttttcgaagccaagaagatctgaatgagccaattaaacgagatggcaaaaaggagtgtgatattgtgtcccgcgatgggggcgctgcctcccctgccactgagggccgggggggtagtgaagtagaaggaggccggacagctctggataacaagacctcactactcaacacccagcctccgcgcgccttcccggggccgcgggcgcgagactacaacccgtacccctactcagatgccatcaacacctacgacaagaccgccctgaaagaggctgtgttcgatgacgacatggagcagcttcgagacgtgcccatcgaccattctgacctggtggctgaccttctgaaagagctgtccaaccacaatgagcgagtggaggaacggaagggagccctgctggagctgctcaagatcacgcgggaagacagccttggtgtctgggaggagcacttcaagaccattctgctcctgctgctggagacccttggagacaaagaccattcaattcgagcactggcgttaagagttttgagggaaattctgagaaatcaaccagcaagatttaaaaactacgccgagctgacgattatgaagactctggaagcccacaaagactcccataaggaggtggtgagagcggctgaggaggctgcgtccacactggccagttccatccacccggagcagtgcatcaaggtgctctgccccatcatccagacggccgactaccccatcaaccttgctgccatcaagatgcagaccaaagtcgtcgagaggatcgcaaaggagtcattgctgcagctccttgtcgacatcatcccaggcttgctgcagggttatgacaacaccgaaagtagtgtgcgtaaggccagcgtgttttgcttagtggcaatttattccgtaatcggagaagacctgaaacctcaccttgcacagctcacagggagcaagatgaagctactaaacttatacataaagagggcccagaccaccaacagcaacagcagctcctcctccgatgtctccacgcacagctaatggcagtacctgtctcttgtgtagacctagaagcaatcggtggtgcctctcagagacctttccccacccccttcatcggctgcccagtcagtacaaggaggcccacaaatatttattacaatcagtattttggtcccttccagcttttctgtagaatcttactg

SEQ ID NO: 53003 - DNA, 4437 bp, Artificial Sequence
  derived and/or modified sequence
atggagcccagaatggagagctgcctggcccaggtgctgcagaaggacgtgggcaagagactgcaggtgggccaggagctgatcgactacttcagcgacaagcagaagagcgccgacctggagcacgaccagaccatgctggacaagctggtggacggcctggccaccagctgggtgaacagcagcaactacaaggtggtgctgctgggcatggacatcctgagcgccctggtgaccagactgcaggacagattcaaggcccagatcggcaccgtgctgcccagcctgatcgacagactgggcgacgccaaggacagcgtgagagagcaggaccagaccctgctgctgaagatcatggaccaggccgccaacccccagtacgtgtgggacagaatgctgggcggcttcaagcacaagaacttcagaaccagagagggcatctgcctgtgcctgatcgccaccctgaacgccagcggcgcccagaccctgaccctgagcaagatcgtgccccacatctgcaacctgctgggcgaccccaacagccaggtgagagacgccgccatcaacagcctggtggagatctacagacacgtgggcgagagagtgagagccgacctgagcaagaagggcctgccccagagcagactgaacgtgatcttcaccaagttcgacgaggtgcagaagagcggcaacatgatccagagcgccaacgacaagaacttcgacgacgaggacagcgtggacggcaacagacccagcagcgccagcagcaccagcagcaaggccccccccagcagcagaagaaacgtgggcatgggcaccaccagaagactgggcagcagcaccctgggcagcaagagcagcgccgccaaggagggcgccggcgccgtggacgaggaggacttcatcaaggccttcgacgacgtgcccgtggtgcagatctacagcagcagagacctggaggagagcatcaacaagatcagagagatcctgagcgacgacaagcacgactgggagcagagagtgaacgccctgaagaagatcagaagcctgctgctggccggcgccgccgagtacgacaacttcttccagcacctgagactgctggacggcgccttcaagctgagcgccaaggacctgagaagccaggtggtgagagaggcctgcatcaccctgggccacctgagcagcgtgctgggcaacaagttcgaccacggcgccgaggccatcatgcccaccatcttcaacctgatccccaacagcgccaagatcatggccaccagcggcgtggtggccgtgagactgatcatcagacacacccacatccccagactgatccccgtgatcaccagcaactgcaccagcaagagcgtggccgtgagaagaagatgcttcgagttcctggacctgctgctgcaggagtggcagacccacagcctggagagacacatcagcgtgctggccgagaccatcaagaagggcatccacgacgccgacagcgaggccagaatcgaggccagaaagtgctactggggcttccacagccacttcagcagagaggccgagcacctgtaccacaccctggagagcagctaccagaaggccctgcagagccacctgaagaacagcgacagcatcgtgagcctgccccagagcgacagaagcagcagcagcagccaggagagcctgaacagacccctgagcgccaagagaagccccaccggcagcaccaccagcagagccagcaccgtgagcaccaagagcgtgagcaccaccggcagcctgcagagaagcagaagcgacatcgacgtgaacgccgccgccagcgccaagagcaaggtgagcagcagcagcggcaccacccccttcagcagcgccgccgccctgccccccggcagctacgccagcctggacggcaccaccaccaaggccgagggcagaatcagaaccagaagacagagcagcggcagcgccaccaacgtggccagcacccccgacaacagaggcagaagcagagccaaggtggtgagccagagccagagaagcagaagcgccaaccccgccggcgccggcagcagaagcagcagccccggcaagctgctgggcagcggctacggcggcctgaccggcggcagcagcagaggcccccccgtgacccccagcagcgagaagagaagcaagatccccagaagccagggctgcagcagagagaccagccccaacagaatcggcctggacagattcggcctgggccagcccggcagaatccccggcagcgtgaacgccatgagagtgctgagcaccagcaccgacctggaggccgccgtggccgacgccctgctgctgggcgacagcagaagcaagaagaagcccgtgagaagaagatacgagccctacggcatgtacagcgacgacgacgccaacagcgacgccagcagcgtgtgcagcgagagaagctacggcagcagaaacggcggcatcccccactacctgagacagaccgaggacgtggccgaggtgctgaaccactgcgccagcagcaactggagcgagagaaaggagggcctgctgggcctgcagaacctgctgaagagccagagaaccctgagcagagtggagctgaagagactgtgcgagatcttcaccagaatgttcgccgacccccacagcaaggtgttcagcatgttcctggagaccctggtggacttcatcatcatccacaaggacgacctgcaggactggctgttcgtgctgctgacccagctgctgaagaagatgggcgccgacctgctgggcagcgtgcaggccaaggtgcagaaggccctggacgtgaccagagacagcttccccttcgaccagcagttcaacatcctgatgagattcatcgtggaccagacccagacccccaacctgaaggtgaaggtggccatcctgaagtacatcgagagcctggccagacagatggaccccaccgacttcgtgaacagcagcgagaccagactggccgtgagcagaatcatcacctggaccaccgagcccaagagcagcgacgtgagaaaggccgcccagatcgtgctgatcagcctgttcgagctgaacacccccgagttcaccatgctgctgggcgccctgcccaagaccttccaggacggcgccaccaagctgctgcacaaccacctgaagaacagcagcaacaccagcgtgggcagccccagcaacaccatcggcagaacccccagcagacacaccagcagcagaaccagccccctgaccagccccaccaactgcagccacggcggcctgagccccagcatgctggactacgacaccgagaacctgaacagcgaggagatctacagcagcctgagaggcgtgaccgaggccatcgagaagttcagcttcagaagccaggaggacctgaacgagcccatcaagagagacggcaagaaggagtgcgacatcgtgagcagagacggcggcgccgccagccccgccaccgagggcagaggcggcagcgaggtggagggcggcagaaccgccctggacaacaagaccagcctgctgaacacccagccccccagagccttccccggccccagagccagagactacaacccctacccctacagcgacgccatcaacacctacgacaagaccgccctgaaggaggccgtgttcgacgacgacatggagcagctgagagacgtgcccatcgaccacagcgacctggtggccgacctgctgaaggagctgagcaaccacaacgagagagtggaggagagaaagggcgccctgctggagctgctgaagatcaccagagaggacagcctgggcgtgtgggaggagcacttcaagaccatcctgctgctgctgctggagaccctgggcgacaaggaccacagcatcagagccctggccctgagagtgctgagagagatcctgagaaaccagcccgccagattcaagaactacgccgagctgaccatcatgaagaccctggaggcccacaaggacagccacaaggaggtggtgagagccgccgaggaggccgccagcaccctggccagcagcatccaccccgagcagtgcatcaaggtgctgtgccccatcatccagaccgccgactaccccatcaacctggccgccatcaagatgcagaccaaggtggtggagagaatcgccaaggagagcctgctgcagctgctggtggacatcatccccggcctgctgcagggctacgacaacaccgagagcagcgtgagaaaggccagcgtgttctgcctggtggccatctacagcgtgatcggcgaggacctgaagccccacctggcccagctgaccggcagcaagatgaagctgctgaacctgtacatcaagagagcccagaccaccaacagcaacagcagcagcagcagcgacgtgagcacccacagctag

SEQ ID NO: 53004 - DNA, 3738 bp, Artificial Sequence
  derived and/or modified sequence
atgaccaccggcaaggacaagaacttcgacgacgaggacagcgtggacggcaacagacccagcagcgccagcagcaccagcagcaaggccccccccagcagcagaagaaacgtgggcatgggcaccaccagaagactgggcagcagcaccctgggcagcaagagcagcgccgccaaggagggcgccggcgccgtggacgaggaggacttcatcaaggccttcgacgacgtgcccgtggtgcagatctacagcagcagagacctggaggagagcatcaacaagatcagagagatcctgagcgacgacaagcacgactgggagcagagagtgaacgccctgaagaagatcagaagcctgctgctggccggcgccgccgagtacgacaacttcttccagcacctgagactgctggacggcgccttcaagctgagcgccaaggacctgagaagccaggtggtgagagaggcctgcatcaccctgggccacctgagcagcgtgctgggcaacaagttcgaccacggcgccgaggccatcatgcccaccatcttcaacctgatccccaacagcgccaagatcatggccaccagcggcgtggtggccgtgagactgatcatcagacacacccacatccccagactgatccccgtgatcaccagcaactgcaccagcaagagcgtggccgtgagaagaagatgcttcgagttcctggacctgctgctgcaggagtggcagacccacagcctggagagacacatcagcgtgctggccgagaccatcaagaagggcatccacgacgccgacagcgaggccagaatcgaggccagaaagtgctactggggcttccacagccacttcagcagagaggccgagcacctgtaccacaccctggagagcagctaccagaaggccctgcagagccacctgaagaacagcgacagcatcgtgagcctgccccagagcgacagaagcagcagcagcagccaggagagcctgaacagacccctgagcgccaagagaagccccaccggcagcaccaccagcagagccagcaccgtgagcaccaagagcgtgagcaccaccggcagcctgcagagaagcagaagcgacatcgacgtgaacgccgccgccagcgccaagagcaaggtgagcagcagcagcggcaccacccccttcagcagcgccgccgccctgccccccggcagctacgccagcctggacggcaccaccaccaaggccgagggcagaatcagaaccagaagacagagcagcggcagcgccaccaacgtggccagcacccccgacaacagaggcagaagcagagccaaggtggtgagccagagccagagaagcagaagcgccaaccccgccggcgccggcagcagaagcagcagccccggcaagctgctgggcagcggctacggcggcctgaccggcggcagcagcagaggcccccccgtgacccccagcagcgagaagagaagcaagatccccagaagccagggctgcagcagagagaccagccccaacagaatcggcctggacagattcggcctgggccagcccggcagaatccccggcagcgtgaacgccatgagagtgctgagcaccagcaccgacctggaggccgccgtggccgacgccctgctgctgggcgacagcagaagcaagaagcccgtgagaagaagatacgagccctacggcatgtacagcgacgacgacgccaacagcgacgccagcagcgtgtgcagcgagagaagctacggcagcagaaacggcggcatcccccactacctgagacagaccgaggacgtggccgaggtgctgaaccactgcgccagcagcaactggagcgagagaaaggagggcctgctgggcctgcagaacctgctgaagagccagagaaccctgagcagagtggagctgaagagactgtgcgagatcttcaccagaatgttcgccgacccccacagcaaggtgttcagcatgttcctggagaccctggtggacttcatcatcatccacaaggacgacctgcaggactggctgttcgtgctgctgacccagctgctgaagaagatgggcgccgacctgctgggcagcgtgcaggccaaggtgcagaaggccctggacgtgaccagagacagcttccccttcgaccagcagttcaacatcctgatgagattcatcgtggaccagacccagacccccaacctgaaggtgaaggtggccatcctgaagtacatcgagagcctggccagacagatggaccccaccgacttcgtgaacagcagcgagaccagactggccgtgagcagaatcatcacctggaccaccgagcccaagagcagcgacgtgagaaaggccgcccagatcgtgctgatcagcctgttcgagctgaacacccccgagttcaccatgctgctgggcgccctgcccaagaccttccaggacggcgccaccaagctgctgcacaaccacctgaagaacagcagcaacaccagcgtgggcagccccagcaacaccatcggcagaacccccagcagacacaccagcagcagaaccagccccctgaccagccccaccaactgcagccacggcggcctgagccccagcatgctggactacgacaccgagaacctgaacagcgaggagatctacagcagcctgagaggcgtgaccgaggccatcgagaagttcagcttcagaagccaggaggacctgaacgagcccatcaagagagacggcaagaaggagtgcgacatcgtgagcagagacggcggcgccgccagccccgccaccgagggcagaggcggcagcgaggtggagggcggcagaaccgccctggacaacaagaccagcctgctgaacacccagccccccagagccttccccggccccagagccagagactacaacccctacccctacagcgacgccatcaacacctacgacaagaccgccctgaaggaggccgtgttcgacgacgacatggagcagctgagagacgtgcccatcgaccacagcgacctggtggccgacctgctgaaggagctgagcaaccacaacgagagagtggaggagagaaagggcgccctgctggagctgctgaagatcaccagagaggacagcctgggcgtgtgggaggagcacttcaagaccatcctgctgctgctgctggagaccctgggcgacaaggaccacagcatcagagccctggccctgagagtgctgagagagatcctgagaaaccagcccgccagattcaagaactacgccgagctgaccatcatgaagaccctggaggcccacaaggacagccacaaggaggtggtgagagccgccgaggaggccgccagcaccctggccagcagcatccaccccgagcagtgcatcaaggtgctgtgccccatcatccagaccgccgactaccccatcaacctggccgccatcaagatgcagaccaaggtggtggagagaatcgccaaggagagcctgctgcagctgctggtggacatcatccccggcctgctgcagggctacgacaacaccgagagcagcgtgagaaaggccagcgtgttctgcctggtggccatctacagcgtgatcggcgaggacctgaagccccacctggcccagctgaccggcagcaagatgaagctgctgaacctgtacatcaagagagcccagaccaccaacagcaacagcagcagcagcagcgacgtgagcacccacagctag

SEQ ID NO: 53005 - protein, 1471 aa, Artificial Sequence
  derived and/or modified sequence
MEPRMESCLAQVLQKDVGKRLQVGQELIDYFSDKQKSADLEHDQTMLDKLVDGLATSWVNSSNYKVVLLGMDILSALVTRLQDRFKAQIGTVLPSLIDRLGDAKDSVREQDQTLLLKIMDQAANPQYVWDRMLGGFKHKNFRTREGICLCLIATLNASGAQTLTLSKIVPHICNLLGDPNSQVRDAAINSLVEIYRHVGERVRADLSKKGLPQSRLNVIFTKFDEVQKSGNMIQSANDKNFDDEDSVDGNRPSSASSTSSKAPPSSRRNVGMGTTRRLGSSTLGSKSSAAKEGAGAVDEEDFIKAFDDVPVVQIYSSRDLEESINKIREILSDDKHDWEQRVNALKKIRSLLLAGAAEYDNFFQHLRLLDGAFKLSAKDLRSQVVREACITLGHLSSVLGNKFDHGAEAIMPTIFNLIPNSAKIMATSGVVAVRLIIRHTHIPRLIPVITSNCTSKSVAVRRRCFEFLDLLLQEWQTHSLERHISVLAETIKKGIHDADSEARIEARKCYWGFHSHFSREAEHLYHTLESSYQKALQSHLKNSDSIVSLPQSDRSSSSSQESLNRPLSAKRSPTGSTTSRASTVSTKSVSTTGSLQRSRSDIDVNAAASAKSKVSSSSGTTPFSSAAALPPGSYASLGRIRTRRQSSGSATNVASTPDNRGRSRAKVVSQSQRSRSANPAGAGSRSSSPGKLLGSGYGGLTGGSSRGPPVTPSSEKRSKIPRSQGCSRETSPNRIGLDRFGLGQPGRIPGSVNAMRVLSTSTDLEAAVADALLLGDSRSKKKPVRRRYEPYGMYSDDDANSDASSVCSERSYGSRNGGIPHYLRQTEDVAEVLNHCASSNWSERKEGLLGLQNLLKSQRTLSRVELKRLCEIFTRMFADPHSKLVFSMFLETLVDFIIIHKDDLQDWLFVLLTQLLKKMGADLLGSVQAKVQKALDVTRDSFPFDQQFNILMRFIVDQTQTPNLKVKVAILKYIESLARQMDPTDFVNSSETRLAVSRIITWTTEPKSSDVRKAAQIVLISLFELNTPEFTMLLGALPKTFQDGATKLLHNHLKNSSNTSVGSPSNTIGRTPSRHTSSRTSPLTSPTNCSHGGLSPSMLDYDTENLNSEEIYSSLRGVTEAIEKFSFRSQEDLNEPIKRDGKKECDIVSRDGGAASPATEGRGGSEVEGGRTALDNKTSLLNTQPPRAFPGPRARDYNPYPYSDAINTYDKTALKEAVFDDDMEQLRDVPIDHSDLVADLLKELSNHNERVEERKGALLELLKITREDSLGVWEEHFKTILLLLLETLGDKDHSIRALALRVLREILRNQPARFKNYAELTIMKTLEAHKDSHKEVVRAAEEAASTLASSIHPEQCIKVLCPIIQTADYPINLAAIKMQTKVVERIAKESLLQLLVDIIPGLLQGYDNTESSVRKASVFCLVAIYSVIGEDLKPHLAQLTGSKMKLLNLYIKRAQTTNSNSSSSSDVSTHS

SEQ ID NO: 53006 - DNA, 4416 bp, Artificial Sequence
  derived and/or modified sequence
atggagccccgaatggaatcttgtctcgcccaagttctccagaaagatgtgggaaaaagactgcaagttggccaggaactgatcgactatttttcagataaacaaaaaagcgctgatcttgagcacgatcagacaatgctggataaactcgtcgatgggctggctacatcctgggtcaactccagcaattacaaggtagtgttgttgggcatggatattttgagtgctttggtgacacggcttcaggaccggtttaaagctcagatcgggacagtgctgcccagtctgattgaccgccttggcgacgccaaggatagcgttagggagcaggatcaaactctacttttgaagattatggaccaggccgccaaccctcagtatgtgtgggaccggatgctaggcggatttaaacacaagaactttaggacccgggaggggatttgtctgtgcctgattgccacgctgaacgcatccggggcgcaaacactaacactctccaaaatcgtgccgcatatttgcaacttacttggggatccgaatagtcaggtgcgcgacgctgctataaattccctggtggaaatttatcgccacgttggagagcgtgtgagggccgatctatctaagaagggactcccccagagccgactgaacgtcatttttaccaagtttgacgaggtccagaaaagtggtaacatgatacagtcagccaacgataagaactttgacgatgaggacagcgtagatggaaaccggcccagctccgccagcagcacttccagcaaagccccccccagctccagacgcaacgtgggaatggggactactagacgcttgggatcctcaacactggggtccaagtcatctgcagctaaggaaggcgctggcgccgtggatgaggaagactttataaaggcttttgatgacgtgcctgttgtgcagatttacagctctcgcgacctggaagagtctataaataagattcgggagatcctttccgatgacaaacatgactgggaacagagagtgaacgccttgaagaaaatccgcagcctcttgctggctggggcagctgagtatgataatttctttcaacatctcagactcctggacggggcattcaaactgtcagctaaggacctaaggagtcaggtggtgcgggaagcctgtattacattagggcatctatcttcagtgctgggaaataagtttgaccacggcgccgaggcaatcatgcctaccatttttaatctgatcccaaactctgcaaaaattatggcaacctctggtgttgtggccgtgcggctgattattcgccacacgcacatccccaggttgatccccgtgatcacatccaattgcacaagtaaatccgtcgcagtcagaaggcggtgcttcgaattcctggatctgctcttgcaggagtggcagacccactcactggagcgccatatatcagtgcttgccgagactattaagaagggaattcacgatgccgactccgaggctcggatagaagctcgcaaatgttattgggggttccacagccatttctctagagaagcagagcacttatatcacaccttggaaagcagctatcagaaggccttgcagtcccacctgaagaatagcgactctatagtgtctctgccccagtctgatcggtcttcctcttcctcccaagaaagcctaaatcgcccgctctccgccaagagaagtcctacaggtagtacaactagcagagcatcgactgtgtcaactaaatcagtctcgacaacagggagcctgcagagaagccgatccgatatcgacgtgaatgccgctgcaagcgccaaatccaaagtaagtagttcctctggaactacgcccttctcctcagccgctgcactgccacctggctcatatgcgtccctgggcagaatccggacacggagacaatcaagcggatctgccacaaacgtggcatccaccccggacaatagaggcaggagtagggccaaagtggtaagccagagccagcgcagcagatcggcgaatccagccggggccgggagtagatccagctcccccggcaagctgctgggcagtggctacggcggactcactggcggcagctcacgggggcccccggtcacccccagctcggagaagcggagtaaaattccaagaagccaaggatgtagcagggaaactagcccgaaccgtattgggctcgataggttcgggctaggtcagcccgggagaattccaggctccgtgaacgccatgagggtcttatccaccagtacggacttggaggctgctgtggcggatgccctccttctgggtgactcaagatccaagaagaagcccgttcgaagaaggtatgaaccctatgggatgtactcagatgatgatgctaactctgatgcaagctccgtgtgctcagaaagatcctatgggtctcggaatgggggcatcccccactatctgcgccagaccgaagatgtagcagaggttctgaatcactgtgcgagctcaaactggtcagaaagaaaggagggactgctgggcctgcagaatctgctcaagagccagcgcacgttgtctcgagtggagctgaagagactttgtgagatctttaccaggatgttcgcagacccacattctaagctagtgttttctatgttccttgagacgctcgtggattttattatcatccacaaggacgatctgcaggactggctctttgtgttgctgacccagctgctgaaaaagatgggtgccgatctccttgggagtgtgcaggccaaggtgcagaaggccttggatgttaccagagactccttcccctttgaccaacagtttaatattctgatgaggttcattgtggatcagacccagactcctaacctcaaagtgaaagtggccattttgaaatatattgagagtctggctcgccagatggaccctacggattttgtaaatagttctgaaacgaggctagcagtgagtcgcataatcacctggacaaccgagccaaaatccagtgacgtgcgtaaggccgctcagatcgttcttatatccctgttcgagctgaataccccggagtttacaatgcttctgggcgcgttgcccaagacctttcaagatggagctactaagctgctccataatcatcttaagaacagctccaatacctccgtagggtcccctagcaatacgataggccgtaccccatcgcgccatacttctagccgaaccagtccccttaccagccccaccaactgctcacacgggggtctttcaccttctatgttagactatgatactgagaatcttaacagcgaggagatatacagctcgctgagaggggtcacagaagccatcgaaaaattctcctttagatcccaggaggacctcaatgagcccataaagagggatggcaagaaagagtgcgatatagtctcgcgcgacggaggagctgcaagccctgccacggaggggaggggcgggtcagaagtggagggcggcagaactgctctcgataacaagacctctctcttgaacacccagccccctcgcgcatttcctgggccacgagcccgggactacaacccctacccctacagcgacgcgatcaacacatacgacaagactgccctcaaagaagctgtctttgacgacgacatggagcaacttagggacgtgccaatcgaccactccgacctggtggccgaccttctgaaggaactcagtaatcataatgaaagagtggaggagcgtaagggtgcactgttggagttgcttaaaattacacgagaggactcattgggtgtctgggaagaacatttcaagacaatactattactgctcctcgagaccctaggagataaggaccactccattagggccctcgcccttagggtgctgagagaaatcctaagaaatcagcccgccagattcaagaattatgctgaacttaccattatgaaaacccttgaagcccacaaggattcccataaagaggtcgtaagagcggctgaggaggctgcttccacattggcctcatctattcacccagagcagtgcattaaagttctgtgtccgataatacagacagccgattaccccattaacctggctgctataaaaatgcaaacgaaggtggttgaacgaattgcaaaggagagcctgttgcagctgctcgtagatatcattccaggcctgttgcaggggtatgacaataccgagtccagcgtcaggaaagcctcagtcttctgcctcgtagctatttattctgtcatcggcgaagacctgaagccgcatctggcccagctcaccggaagcaagatgaagctcctgaatctctacatcaagagggcccagacaaccaatagcaactccagcagctcaagcgatgtctcgactcacagctag

SEQ ID NO: 53007 - DNA, 4416 bp, Artificial Sequence
  derived and/or modified sequence
atggagcccaggatggagagctgcctggcccaggtgctgcagaaggatgtgggcaagaggctgcaggtgggccaggagctgattgactacttcagtgacaagcagaagtctgctgacctggagcatgaccagaccatgctggacaagctggtggatggcctggccacctcctgggtgaacagcagcaactacaaggtggtgctgctgggcatggacatcctgagcgccctggtgacccggctgcaggaccgcttcaaggcccagattggaacagtgctgcccagcctgattgaccggctgggagatgccaaggacagcgtgcgggagcaggaccagaccctgctgctgaagatcatggaccaggccgccaacccccagtatgtgtgggacaggatgctgggcggcttcaagcacaagaacttccgcacccgggagggcatctgcctgtgcctgattgccaccctgaatgccagcggggcccagaccctgaccctgagcaagatcgtgccccacatctgcaacctgctgggggaccccaacagccaggtgagagatgctgccatcaacagcctggtggagatctacagacatgtgggggagcgggtgcgggctgacctgagcaagaagggcctgccccagagccggctgaatgtcatcttcaccaagtttgatgaggtgcagaagagcggcaacatgatccagagcgccaatgacaagaactttgatgatgaggacagcgtggatggcaaccggcccagcagcgccagcagcaccagcagcaaggccccacccagcagcagaagaaatgtgggcatgggcaccacccggcggctgggcagcagcaccctgggcagcaagagcagcgctgccaaggagggcgctggagctgtggatgaggaggacttcatcaaggcctttgatgatgtgcctgtggtgcagatctacagcagccgggacctggaggagagcatcaacaagatccgggagatcctgagtgatgacaagcatgactgggagcagagggtgaatgccctgaagaagatccgcagcctgctgctggccggggctgctgaatatgacaacttcttccagcacctgcggctgctggatggagccttcaagctgagcgccaaggacctgcggagccaggtggtgcgggaggcctgcatcaccctgggccacctgagctctgtgctgggcaacaagtttgaccatggagctgaggccatcatgcccaccatcttcaacctgatccccaacagcgccaagatcatggccaccagcggcgtggtggccgtgcggctcatcatccgccacacccacatccccaggctcatccctgtgatcaccagcaactgcaccagcaagtctgtggccgtgagaagacgctgctttgagttcctggacctgctgctgcaggagtggcagacccacagcctggagcggcacatctctgtgctggccgagaccatcaagaagggcatccatgatgctgacagcgaggcccgcatcgaggccaggaagtgctactggggcttccacagccacttcagccgggaggccgagcacctgtaccacaccctggagagcagctaccagaaggccctgcagagccacctgaagaacagcgacagcatcgtgtccctgccccagagcgacaggagcagcagcagcagccaggagagcctgaaccggcccctgagcgccaagaggagccccaccggcagcaccaccagccgggccagcacagtgtccaccaagtctgtgtccaccaccggcagcctgcagaggagcagaagtgacattgatgtgaatgctgctgccagcgccaagagcaaggtgagcagcagcagcggcaccacccccttcagcagcgctgctgccctgcccccaggcagctatgccagcctgggccgcatccgcacccggcggcagagcagcggcagcgccaccaacgtggccagcaccccagacaacagaggccgcagccgggccaaggtggtgtcccagagccagaggagccgcagcgccaacccagctggggccggcagccgcagcagcagccctgggaagctgctgggcagcggctatggaggcctgactggaggcagcagccggggcccccctgtgacccccagcagcgagaagaggagcaagatccccaggagccagggctgcagccgggagaccagccccaacagaattggcctggaccgcttcggcctgggccagcccggccgcatccctggctctgtgaatgccatgagggtgctgagcaccagcacagacctggaggccgctgtggctgatgccctgctgctgggggacagccgcagcaagaagaagcctgtgagaagaagatatgagccctacggcatgtacagtgatgatgatgccaacagtgatgccagctctgtgtgcagcgagaggagctatggcagcagaaatggaggcatcccccactacctgcggcagacagaagatgtggccgaggtgctgaaccactgtgccagcagcaactggagcgagaggaaggagggcctgctgggcctgcagaacctgctgaagagccagaggaccctgagccgggtggagctgaagaggctgtgtgagatcttcaccaggatgtttgctgacccccacagcaagctggtgttctccatgttcctggagaccctggtggacttcatcatcatccacaaggatgacctgcaggactggctgtttgtgctgctgacccagctgctgaagaagatgggcgctgacctgctgggctctgtgcaggccaaggtgcagaaggccctggatgtgacccgggacagcttcccctttgaccagcagttcaacatcctgatgaggttcatcgtggaccagacccagacccccaacctgaaggtgaaggtggccatcctgaagtacatcgagagcctggcccggcagatggaccccacagactttgtgaacagcagcgagacccggctggccgtgagccgcatcatcacctggaccacagagcccaagagcagtgatgtgaggaaggccgcccagatcgtgctgatcagcctgtttgagctgaacaccccagagttcaccatgctgctgggcgccctgcccaagaccttccaggatggagccaccaagctgctgcacaaccacctgaagaacagcagcaacacctctgtgggcagccccagcaacaccatcggccgcacccccagccgccacaccagcagcaggaccagccccctgaccagccccaccaactgcagccatggaggcctgagccccagcatgctggactatgacacagagaacctgaacagcgaggagatctacagcagcctgcggggcgtgacagaggccatcgagaagttctccttccgcagccaggaggacctgaatgagcccatcaagagagatggcaagaaggaatgtgacatcgtgtccagagatggaggagctgccagccctgccacagagggccggggcggcagcgaggtggagggcggccgcacagccctggacaacaagaccagcctgctgaacacccagcccccccgggccttccctggcccccgggcccgggactacaacccctacccctacagtgatgccatcaacacctatgacaagacagccctgaaggaggccgtgtttgatgatgacatggagcagctgagagatgtgcccatcgaccacagcgacctggtggccgacctgctgaaggagctgagcaaccacaatgaaagagtggaggagaggaaaggagccctgctggagctgctgaagatcacccgggaggacagcctgggcgtgtgggaggagcacttcaagaccatcctgctgctgctgctggagaccctgggggacaaggaccacagcatccgggccctggccctgcgggtgctgcgggagatcctgaggaaccagcctgcccgcttcaagaactatgcagagctgaccatcatgaagaccctggaggcccacaaggacagccacaaggaggtggtgcgggctgctgaggaggccgccagcaccctggccagcagcatccaccctgagcagtgcatcaaggtgctgtgccccatcatccagacagctgactaccccatcaacctggccgccatcaagatgcagaccaaggtggtggagcgcatcgccaaggagagcctgctgcagctgctggtggacatcatccctggcctgctgcagggctatgacaacacagagagctctgtgaggaaggcctctgtgttctgcctggtggccatctacagcgtcatcggggaggacctgaagccccacctggcccagctgaccggcagcaagatgaagctgctgaacctgtacatcaagagggcccagaccaccaacagcaacagcagcagcagcagtgatgtgtccacccacagctag

SEQ ID NO: 53008 - DNA, 4416 bp, Artificial Sequence
  derived and/or modified sequence
atggagccccggatggagagctgcctggcccaggtgctgcagaaggacgttggaaagaggttgcaggtggggcaggagctcattgactacttttctgataagcagaagagcgccgacctggagcatgatcagaccatgctggacaagcttgtggacggacttgctaccagctgggtcaactcttccaactataaggttgtgctcttggggatggacatactctctgcccttgtgacgcgtctgcaggaccggtttaaggcccaaattggtacagtgctgccatccctgatcgaccggctgggcgacgcaaaggactcggtgcgagagcaggatcagacgctcctgctgaagattatggaccaggcagcaaacccacagtatgtctgggatcgcatgctgggggggttcaagcacaagaactttcggactagggaaggaatttgtctctgcctgattgctacccttaacgcatccggcgctcaaactctaacgctatccaaaattgtacctcacatctgcaatctgctaggggacccaaactcccaggtgagagatgccgccataaacagtctcgtcgaaatctacagacatgtcggcgagcgggtgcgcgctgaccttagcaagaaaggattgcctcagagcaggctgaacgtgatcttcactaaattcgatgaggtccaaaagtcaggcaatatgattcaatccgctaatgacaagaacttcgacgatgaagatagcgtggacggcaacaggcctagttccgcatcgagtacaagctctaaagcccctccaagtagccggcggaatgtaggtatgggcacaacacgccgattagggtctagtacgctgggatctaagtcaagtgctgccaaggagggggcgggagccgtcgacgaggaagatttcattaaagcatttgacgacgtaccagtggttcagatatacagctcgagagacctggaggagtccataaacaaaattcgagaaatcctgagcgacgataagcatgactgggaacagcgcgttaatgccctgaaaaagatacgatctttactgctggctggcgcggcagagtacgataacttctttcagcatttaaggctcctggacggggccttcaagctctccgccaaggaccttaggtcgcaagttgtccgcgaagcttgtattaccctcggccatctatcgagcgttcttgggaataagtttgatcacggtgcggaagctatcatgcccacgatcttcaatctgatccccaatagtgcaaaaattatggctacctcaggcgtcgtggcggtgcgactcatcatccggcatactcacataccgcgcctcattccagtgattacaagtaactgcacgagtaaatcagtggccgttaggagaagatgtttcgaatttcttgatctcctgctacaggagtggcagacccactcacttgaaagacatatctctgtgctcgccgagaccattaaaaaaggtatccacgacgccgactccgaggcccgcatcgaggcccggaagtgctattgggggttccatagccatttttctagagaagccgagcatctctaccacactctggagtcaagctatcagaaggctctgcagtcccacctgaaaaattctgatagtatcgtgtcattgccgcagtccgatagatccagctcatcgtcccaagaaagcctgaatagacctctgagcgccaagcggagccccactggaagcacaaccagccgagcttctacggtttcaactaaaagcgtctccacaaccggttcactgcaacggtcgaggtccgacattgatgtgaacgccgccgcgagtgcgaaatccaaggtgtcatccagttccggtacgactccttttagctccgcagcagctctgccccccggctcttacgcttctttggggaggattcgcactcggcgccaaagctcaggaagtgcaactaatgtcgcttcaacaccagacaacaggggacggtctagggccaaggtagtatcccagtcacagaggagccgcagcgccaaccctgcaggggccgggtcccgatcctcttcccctggcaagctgctagggagtgggtacggcggactgactggcggttctagtcgtgggccccctgtcaccccctctagcgaaaaacgtagtaaaattccacgcagtcaaggctgttcccgcgagacttctccaaaccgcatcggcctggatcgatttgggttaggccaacctggccgaattcccggcagcgtgaatgccatgagggtcttgtcaaccagtaccgacctcgaggcagccgtagcggatgccttactgctcggcgatagccggagcaagaagaagcccgtgcggcgacggtacgaaccctatggtatgtactcagacgacgacgcaaattccgacgcctccagtgtttgctccgaacggagctacggtagcaggaacggtggcatcccacactaccttagacagacagaggacgtggctgaggtcttgaaccattgcgcctcctctaattggagcgagcgtaaggaaggtctgctggggctacaaaaccttctgaagagtcaacgaaccctgtccagagtggaactgaaacgtctctgcgagatcttcactcgaatgtttgcggacccgcattccaagcttgttttttccatgtttctcgaaactcttgtggattttatcatcattcacaaggatgacttgcaggattggctgttcgtgctgctcacacagcttctgaaaaaaatgggcgcggaccttctgggatctgtgcaggcaaaggtccagaaggccctggatgttaccagagatagttttccgtttgatcagcagtttaacatcctgatgcggttcatcgtggatcagactcaaaccccaaatctaaaagtgaaggtggcgattcttaaatatatagagtctctggctcgccagatggatcctaccgatttcgtgaactcatctgagacccgtcttgcagttagcagaattatcacctggaccactgaaccaaaaagctctgatgttagaaaagccgcccagattgtcctcatcagcctgttcgagcttaacacacctgaatttacaatgctgctgggcgccctgcctaaaacatttcaggacggagccaccaagttgctccataaccacctcaagaacagttctaacacaagtgttggaagtccaagcaacacaatcggccggaccccttctagacacacctcatccagaaccagtccgctcacaagtcccacgaactgctcccacggcgggctgagcccctcaatgctggattatgacacagagaacttgaacagcgaagagatttacagctctctgagaggcgtcaccgaagctatagagaagtttagcttccggtcacaggaagacctgaatgagccaataaagagggatggtaagaaggagtgtgacattgtctcacgagatggtggagcagcctctccggctactgaggggcgtgggggaagcgaggtggaaggaggacgtacagccctcgacaacaagacgtctcttctgaacactcaacctcctcgagcttttcctgggcccagagccagagattataacccgtatccgtattccgatgcaattaatacttacgataagaccgctctgaaagaggccgtctttgacgacgatatggaacagcttagagacgtgcctatcgaccatagtgacttggttgccgacctgctcaaggagctttctaatcacaatgagcgcgtggaagaacgtaaaggagcactactggaactcttgaaaatcacacgcgaagattcactcggagtgtgggaggagcatttcaaaactatccttttgctgttgctggaaacccttggagacaaagatcatagcattagggcactggctttacgcgtgctccgggagatactcagaaatcagccagcaaggtttaaaaactatgcagagctcacgatcatgaaaacgctggaggcccataaggactcccacaaagaagttgtcagagcagccgaggaggctgctagtacactggcctccagcatccaccctgaacagtgtataaaggtcctctgtcccatcatacaaacagcagattaccccataaatctggctgctattaagatgcagaccaaggtggtcgaaaggatcgcgaaagagtctctcctgcagttattagttgatattatcccgggcctcctgcaaggttacgataacacggaaagctcagtgaggaaggcttccgtgttttgcctagtcgccatttattccgtcattggcgaggacctgaagcctcacctcgctcagctgactggcagtaagatgaaactcctgaacctctatattaagcgagcgcagaccacaaacagcaactcatctagcagttccgacgtcagcactcactcttag

SEQ ID NO: 53009 - DNA, 4416 bp, Artificial Sequence
  derived and/or modified sequence
atggaaccacgtatggaaagttgcctggcccaagtcctacagaaggatgtggggaaacgccttcaggtgggccaggagttgatcgactacttctcagataagcaaaagtccgcggacttagagcatgatcagacgatgctggacaagcttgtggatggcctggccacgagttgggtgaactcatccaattataaagtggttctgctgggtatggacatcctttcggcccttgtaacccgccttcaggacaggttcaaagcacagatcggcacggtcctcccttccctgattgatcggcttggcgacgcgaaggactcggtgcgagaacaggatcagactctactgctcaaaatcatggaccaggccgctaaccctcaatacgtgtgggacaggatgctaggcggtttcaagcacaagaatttccgaactagggagggcatttgcttgtgcttaatagccaccttaaatgcctccggcgcacagactctgacgctttccaaaatcgtccctcatatctgtaacctcctgggggaccctaattcacaagtgcgtgatgctgctatcaactctctcgtggagatctacaggcatgttggtgaacgagttcgtgcagacctctccaaaaaaggactgcctcagtccagactgaatgtcatcttcactaagttcgatgaggtgcagaagagcggcaatatgatccagtctgccaacgacaaaaattttgacgatgaagactcagtagacggcaacagaccatcttccgcttcttccacaagctcaaaggctccgcctagctctagaagaaacgtggggatgggaactacaaggaggctgggatcatctacactcggaagcaaatcatccgccgctaaggagggggctggcgctgtggacgaggaagacttcattaaggcctttgatgacgtgccggtggtccaaatctatagtagcagggatctggaggaatccataaacaagattcgggagatactgagcgatgataagcacgattgggaacaacgcgtaaatgcactgaagaaaatcaggagtttgctcctggccggtgctgccgagtatgacaatttcttccaacaccttcggcttcttgatggcgctttcaagctatctgctaaagaccttcggtctcaggttgtgagagaggcatgtatcacactgggacatctgtcttctgtcctaggcaataagtttgaccacggagctgaagcaatcatgcccacaattttcaacctcatccctaattccgcaaagattatggccacaagtggagtcgtggctgttcgattgatcatcaggcatacccatattcccagactgatccctgtgataacctccaactgtacttccaagtccgtcgccgttcgaagacggtgtttcgaatttctggatctcttgcttcaagagtggcagactcactcactggagagacatatttcagtcctcgccgaaacaattaagaagggtatccacgacgcagacagcgaggcacggatcgaagctcgaaaatgttattggggcttccactcgcactttagtcgggaagcagagcacttgtaccatacgctggaaagctcctatcagaaagcactccagtctcacctcaaaaatagtgatagcattgtcagtttgccacagagtgatcggagttccagttcatctcaggagagcctcaacaggcctctctcagctaaaagatcgcctacaggaagtaccacctccagagcatccaccgtcagtacaaaatccgtctccacgactggttcgcttcagcgctcgagatccgacatcgatgtcaacgcagccgcatctgccaagtccaaggtctcatctagtagcggcactacaccattctctagtgccgctgctctccctccagggagctacgccagcctgggcaggataagaaccaggcgtcaaagcagcggttctgcaacgaacgtggcttcgactcccgacaaccggggtaggagtagggctaaggtcgtgagtcagagtcaaaggtcccgaagtgctaatcctgcgggtgcaggctcacgatcctcatctcctgggaagttgctgggaagtggatacggcggactgactggtgggtcttccagggggccacctgtcacaccatcctccgagaagagaagcaagatccctcgctcccagggatgctctagggagactagtcctaataggatcggactcgatcgcttcgggctgggccagcccggtaggatcccaggctccgtgaacgccatgagggttctctctactagtactgaccttgaggccgcagtagccgatgcactgttattgggggactctcgctctaagaagaagccggtgcgtcggcgatacgagccctatggcatgtacagcgacgatgatgccaacagtgatgccagttccgtgtgttctgagcggtcctacgggtcccgaaatggaggcatcccgcactacctgcgccagacagaggatgtggctgaggtgctgaaccactgtgctagctccaattggagcgaacgcaaggagggattactcggcctgcagaacctcctcaaaagccagcggacgctgtccagagtcgagctcaagcgactttgcgaaattttcactcggatgtttgcagacccacatagcaagctggtgttttctatgttcctggagacactggtcgactttataattatccacaaggatgaccttcaggattggctttttgttctgctgacgcagctcctcaagaagatgggcgctgatctgctgggcagtgtgcaggctaaagtgcagaaggcgctagatgtcactcgtgatagcttcccatttgatcaacagttcaatatcctcatgaggttcattgttgaccagactcagacgcccaatctgaaggtgaaggtggcgatactgaaatatatcgagtcccttgcgaggcaaatggatcctacggactttgtgaacagttctgagaccaggctggccgtttctagaattatcacctggactaccgaacctaaatcttccgatgtgcgcaaagctgcgcagatagtcttgattagcctcttcgagcttaatacacccgagttcaccatgctgttgggggctctccccaagacgtttcaggacggagccacgaaactcctgcacaatcatctgaagaactcttctaacacttcggttggttctcctagcaatacaattgggagaacaccaagtaggcacacaagctcccgtacctcacctcttacctctcccaccaactgttctcatgggggacttagcccaagtatgctcgactatgacacagagaatctgaactctgaggagatctattcctccctgaggggggtaaccgaagcaatcgaaaaattctctttcaggagtcaggaggatctgaacgaaccaattaagcgcgatggaaagaaggaatgtgatatcgtctccagggacggcggagctgccagccctgccactgaggggagaggtgggtctgaggtcgaagggggtcggacagcactggataacaaaacatctttactgaacacacagccccctagggcctttcctgggcctcgcgctcgcgattacaatccatacccatatagcgatgcaatcaacacttatgacaagactgccttgaaagaggccgtgtttgatgatgacatggagcagcttagagatgtccctatagatcacagcgatctggttgccgatctgctgaaggagctttccaatcataacgagagggtggaagaaaggaagggagcattgctggagttattgaagattaccagagaggacagcctgggagtgtgggaggagcactttaaaactattctactcctcctgcttgaaacactcggcgataaagatcattcaatccgggcacttgccctgagagtcctaagggaaatcctcaggaaccaacctgccaggttcaaaaattacgcggagcttaccatcatgaaaaccctggaagcccacaaagattcccacaaagaggtcgtgagagccgctgaggaggctgcgagcactttagcaagttcaattcacccggagcagtgtattaaggtgctgtgtcctatcatccaaactgctgactacccaattaatttggctgcaattaagatgcaaactaaggtcgtggaacgaatcgctaaagagtccctcctgcagttgttggtggatatcatacctggtctcttacaggggtatgacaacactgaatcttccgttcggaaagcatcagtcttctgcctagtagctatttactcagtcattggggaagatttgaaaccccacctggcccaactgaccggttctaagatgaagctgttgaacctctatattaagcgggcacaaactacgaactccaattcgagctcctcatcagatgtctcaacacatagttag

SEQ ID NO: 53010 - DNA, 5135 bp, Artificial Sequence
  derived and/or modified sequence
gctctctatggtgtacccgggttggtggcggtaagaagaaaaagggtgaccgcactgcgcaggcgccctcggcgtctctctcgctctctcggtcttttttttttttttctttttttttttttttaatccccgcaccaagcgcttaacctcattggggtggaggagaaggcggcggctctctggtccgcagcggcaacagtaacgaaaaacagggctaatggactgctgaattatgaagtatttcagacccagtagtagaacatcactctgccactcactcctttatctcctactagttatttaaattggacttttaatatcctaccagctgctcttcagacacacatggtgcattgttgccattccccagattgcatctttgaaacacaggctcttagtaaccttcagcgaacaaagaggcaacctcccagatacgtctgctgggagggagtcatcgtgactgccctctagcttttgctggatctggatttgaattccactatggagcctcgcatggagtcctgcctggcgcaggtgttgcagaaggatgtggggaaacgattgcaggttggccaagaactgatagactatttctcagacaaacagaagtctgctgaccttgagcatgaccagaccatgttagataaacttgtggatggacttgctacctcttgggtgaactctagcaattacaaggtggttctgctgggcatggacatcctgtccgccctggtgacccggctgcaggatcggttcaaggcgcagatcggcacagtgctgccaagtctaatagacagactaggagatgctaaagactctgtgagggagcaggaccaaactctgctgctaaagatcatggatcaagctgctaatccccagtacgtatgggacagaatgcttggaggcttcaaacacaagaatttccgtactcgagaaggcatctgtctctgccttatagcaacactcaatgcctctggagcacagactttaacactaagcaagattgtgccacatatatgcaacttacttggagatccaaacagccaggttcgagatgcagcaataaacagcttagtggaaatttacagacatgtaggagaacgtgtgagggcagatctcagtaaaaaaggattgccacagtcccggttgaatgtaatttttacaaaatttgatgaagtccagaaatctggaaacatgatacaatctgcaaatgataaaaatttcgacgatgaagattctgtggatggtaacagaccttcctctgctagttctacatcatccaaggctccaccaagttctcggagaaacgttggaatgggaaccacccgccggcttggttcatccacccttggatccaagtcttcagctgcaaaagaaggagctggtgctgttgatgaagaggattttattaaagcatttgatgatgtacctgtagtacagatttattccagccgagaccttgaggaatccataaacaaaattagggaaatattatctgatgacaagcatgattgggagcagagagtaaatgctctaaaaaagattagatctttacttttggctggtgctgctgagtatgataacttctttcaacatttgcgtcttttggatggagcctttaaactctctgctaaggacctgcggtctcaggtagtgcgggaggcttgtatcacgttggggcatctgtcatcagttctggggaataagtttgaccatggagctgaagccattatgccaactatctttaatttaattccaaacagtgccaaaattatggccacatctggtgttgtagctgttaggttaattattcggcacacacacatccctaggttaatacctgtcataacaagcaactgtacctctaagtctgtcgcagttagaaggcgctgttttgaatttttagatttgcttttacaagaatggcagacacattcactagaacgacacatatcagtattagctgaaacaataaagaagggaatacatgatgctgattccgaagcaagaatagaagccagaaaatgttactggggtttccacagtcacttcagcagagaagcagagcacttgtaccacaccttggagtcctcctaccagaaagccctgcagtcccacctgaagaactcagacagcatagtgtctctgcctcagtcagaccgctcatcttccagctctcaagagagtctaaatcgtccgctgtctgccaaaagaagtcctactggaagtaccacatctagagcttctacagttagtaccaaatctgtgtcaacgactgggtccctccagcgatctcgaagtgatattgatgtgaacgcagcagccagtgccaaatccaaagtctcctcatcttcgggcacgacgcctttcagctctgcagcagctttgcctccagggtcatacgcatccttaggtcggatccgcacaagacggcaaagctctgggagtgccaccaacgtcgcctctacacctgataaccggggccgcagtcgcgctaaagtggtttcacagtcccagcgatccagatctgctaatcctgctggtgctggcagccggtcaagttccccaggaaaattgttgggaagtggttatggtggacttactgggggctcctcacgaggcccacctgtgacaccgtcttcagaaaagcgaagcaagattcccaggagccagggatgtagccgggaaacaagtccaaaccgaataggattagatcggtttgggcttggccagccaggaagaatacctggttctgtgaatgccatgagagttctgagcacaagtacagatcttgaagctgctgttgctgatgctttgctgttaggagactccaggagcaagaagaagcctgtgaggaggagatatgagccgtatgggatgtattctgacgatgatgccaacagtgatgcctcaagtgtttgctctgagcgctcatatggctccaggaatggtggcattccccattatctgcggcagactgaggatgtagcagaagttctcaaccactgtgctagttcaaactggtcagaaaggaaagaagggcttctgggcctgcagaacttactgaagagccaaagaacactgagtcgagttgaactgaaaaggttgtgtgagatcttcactcggatgtttgctgaccctcatagcaagttagttttcagtatgtttttggagactcttgtggattttataataattcataaggatgatttacaagactggctttttgttcttctcacacaattacttaagaaaatgggagcagatttacttggatctgtgcaagcaaaagttcaaaaggctctagatgtcacaagggactcctttccatttgatcaacaatttaacattttgatgagatttattgtggatcaaactcaaactccaaacctcaaggtcaaagttgcaatcctgaaatacattgagtctctggccagacagatggatccaacagattttgtaaactctagtgagacaaggcttgctgtttctagaatcataacctggacaacagaaccaaagagttcagacgtgagaaaggcagcacagattgtgctaatctctctgtttgaattgaatactcctgaatttaccatgttacttggtgccttgccaaaaacattccaggatggtgccaccaaactcctgcacaaccacctcaagaattccagtaacaccagtgtgggctctccaagcaatacgattggccggacgccctcccgacacaccagcagcaggaccagccccctgacctcacccaccaactgttcccatgggggtctgtctccaagcatgctggactatgatacagagaacctgaactctgaagaaatctatagttctctacgtggagttacagaagccattgaaaagtttagttttcgaagccaagaagatctgaatgagccaattaaacgagatggcaaaaaggagtgtgatattgtgtcccgcgatgggggcgctgcctcccctgccactgagggccgggggggtagtgaagtagaaggaggccggacagctctggataacaagacctcactactcaacacccagcctccgcgcgccttcccggggccgcgggcgcgagactacaacccgtacccctactcagatgccatcaacacctacgacaagaccgccctgaaagaggctgtgttcgatgacgacatggagcagcttcgagacgtgcccatcgaccattctgacctggtggctgaccttctgaaagagctgtccaaccacaatgagcgagtggaggaacggaagggagccctgctggagctgctcaagatcacgcgggaagacagccttggtgtctgggaggagcacttcaagaccattctgctcctgctgctggagacccttggagacaaagaccattcaattcgagcactggcgttaagagttttgagggaaattctgagaaatcaaccagcaagatttaaaaactacgccgagctgacgattatgaagactctggaagcccacaaagactcccataaggaggtggtgagagcggctgaggaggctgcgtccacactggccagttccatccacccggagcagtgcatcaaggtgctctgccccatcatccagacggccgactaccccatcaaccttgctgccatcaagatgcagaccaaagtcgtcgagaggatcgcaaaggagtcattgctgcagctccttgtcgacatcatcccaggcttgctgcagggttatgacaacaccgaaagtagtgtgcgtaaggccagcgtgttttgcttagtggcaatttattccgtaatcggagaagacctgaaacctcaccttgcacagctcacagggagcaagatgaagctactaaacttatacataaagagggcccagaccaccaacagcaacagcagctcctcctccgatgtctccacgcacagctaatggcagtacctgtctcttgtgtagacctagaagcaatcggtggtgcctctcagagacctttccccacccccttcatcggctgcccagtcagtacaaggaggcccacaaatatttattacaatcagtattttggtcccttccagcttttctgtagaatcttactggtattgaatgtaaaggaagcaaggcctgtattgcagtcttcatacaaaacaaaa

SEQ ID NO: 53011 - DNA, 4416 bp, Artificial Sequence
  derived and/or modified sequence
atggagcccagaatggagagctgcctggcccaggtgctgcagaaggacgtgggcaagagactgcaggtgggccaggagctgatcgactacttcagcgacaagcagaagagcgccgacctggagcacgaccagaccatgctggacaagctggtggacggcctggccaccagctgggtgaacagcagcaactacaaggtggtgctgctgggcatggacatcctgagcgccctggtgaccagactgcaggacagattcaaggcccagatcggcaccgtgctgcccagcctgatcgacagactgggcgacgccaaggacagcgtgagagagcaggaccagaccctgctgctgaagatcatggaccaggccgccaacccccagtacgtgtgggacagaatgctgggcggcttcaagcacaagaacttcagaaccagagagggcatctgcctgtgcctgatcgccaccctgaacgccagcggcgcccagaccctgaccctgagcaagatcgtgccccacatctgcaacctgctgggcgaccccaacagccaggtgagagacgccgccatcaacagcctggtggagatctacagacacgtgggcgagagagtgagagccgacctgagcaagaagggcctgccccagagcagactgaacgtgatcttcaccaagttcgacgaggtgcagaagagcggcaacatgatccagagcgccaacgacaagaacttcgacgacgaggacagcgtggacggcaacagacccagcagcgccagcagcaccagcagcaaggccccccccagcagcagaagaaacgtgggcatgggcaccaccagaagactgggcagcagcaccctgggcagcaagagcagcgccgccaaggagggcgccggcgccgtggacgaggaggacttcatcaaggccttcgacgacgtgcccgtggtgcagatctacagcagcagagacctggaggagagcatcaacaagatcagagagatcctgagcgacgacaagcacgactgggagcagagagtgaacgccctgaagaagatcagaagcctgctgctggccggcgccgccgagtacgacaacttcttccagcacctgagactgctggacggcgccttcaagctgagcgccaaggacctgagaagccaggtggtgagagaggcctgcatcaccctgggccacctgagcagcgtgctgggcaacaagttcgaccacggcgccgaggccatcatgcccaccatcttcaacctgatccccaacagcgccaagatcatggccaccagcggcgtggtggccgtgagactgatcatcagacacacccacatccccagactgatccccgtgatcaccagcaactgcaccagcaagagcgtggccgtgagaagaagatgcttcgagttcctggacctgctgctgcaggagtggcagacccacagcctggagagacacatcagcgtgctggccgagaccatcaagaagggcatccacgacgccgacagcgaggccagaatcgaggccagaaagtgctactggggcttccacagccacttcagcagagaggccgagcacctgtaccacaccctggagagcagctaccagaaggccctgcagagccacctgaagaacagcgacagcatcgtgagcctgccccagagcgacagaagcagcagcagcagccaggagagcctgaacagacccctgagcgccaagagaagccccaccggcagcaccaccagcagagccagcaccgtgagcaccaagagcgtgagcaccaccggcagcctgcagagaagcagaagcgacatcgacgtgaacgccgccgccagcgccaagagcaaggtgagcagcagcagcggcaccacccccttcagcagcgccgccgccctgccccccggcagctacgccagcctgggcagaatcagaaccagaagacagagcagcggcagcgccaccaacgtggccagcacccccgacaacagaggcagaagcagagccaaggtggtgagccagagccagagaagcagaagcgccaaccccgccggcgccggcagcagaagcagcagccccggcaagctgctgggcagcggctacggcggcctgaccggcggcagcagcagaggcccccccgtgacccccagcagcgagaagagaagcaagatccccagaagccagggctgcagcagagagaccagccccaacagaatcggcctggacagattcggcctgggccagcccggcagaatccccggcagcgtgaacgccatgagagtgctgagcaccagcaccgacctggaggccgccgtggccgacgccctgctgctgggcgacagcagaagcaagaagaagcccgtgagaagaagatacgagccctacggcatgtacagcgacgacgacgccaacagcgacgccagcagcgtgtgcagcgagagaagctacggcagcagaaacggcggcatcccccactacctgagacagaccgaggacgtggccgaggtgctgaaccactgcgccagcagcaactggagcgagagaaaggagggcctgctgggcctgcagaacctgctgaagagccagagaaccctgagcagagtggagctgaagagactgtgcgagatcttcaccagaatgttcgccgacccccacagcaagctggtgttcagcatgttcctggagaccctggtggacttcatcatcatccacaaggacgacctgcaggactggctgttcgtgctgctgacccagctgctgaagaagatgggcgccgacctgctgggcagcgtgcaggccaaggtgcagaaggccctggacgtgaccagagacagcttccccttcgaccagcagttcaacatcctgatgagattcatcgtggaccagacccagacccccaacctgaaggtgaaggtggccatcctgaagtacatcgagagcctggccagacagatggaccccaccgacttcgtgaacagcagcgagaccagactggccgtgagcagaatcatcacctggaccaccgagcccaagagcagcgacgtgagaaaggccgcccagatcgtgctgatcagcctgttcgagctgaacacccccgagttcaccatgctgctgggcgccctgcccaagaccttccaggacggcgccaccaagctgctgcacaaccacctgaagaacagcagcaacaccagcgtgggcagccccagcaacaccatcggcagaacccccagcagacacaccagcagcagaaccagccccctgaccagccccaccaactgcagccacggcggcctgagccccagcatgctggactacgacaccgagaacctgaacagcgaggagatctacagcagcctgagaggcgtgaccgaggccatcgagaagttcagcttcagaagccaggaggacctgaacgagcccatcaagagagacggcaagaaggagtgcgacatcgtgagcagagacggcggcgccgccagccccgccaccgagggcagaggcggcagcgaggtggagggcggcagaaccgccctggacaacaagaccagcctgctgaacacccagccccccagagccttccccggccccagagccagagactacaacccctacccctacagcgacgccatcaacacctacgacaagaccgccctgaaggaggccgtgttcgacgacgacatggagcagctgagagacgtgcccatcgaccacagcgacctggtggccgacctgctgaaggagctgagcaaccacaacgagagagtggaggagagaaagggcgccctgctggagctgctgaagatcaccagagaggacagcctgggcgtgtgggaggagcacttcaagaccatcctgctgctgctgctggagaccctgggcgacaaggaccacagcatcagagccctggccctgagagtgctgagagagatcctgagaaaccagcccgccagattcaagaactacgccgagctgaccatcatgaagaccctggaggcccacaaggacagccacaaggaggtggtgagagccgccgaggaggccgccagcaccctggccagcagcatccaccccgagcagtgcatcaaggtgctgtgccccatcatccagaccgccgactaccccatcaacctggccgccatcaagatgcagaccaaggtggtggagagaatcgccaaggagagcctgctgcagctgctggtggacatcatccccggcctgctgcagggctacgacaacaccgagagcagcgtgagaaaggccagcgtgttctgcctggtggccatctacagcgtgatcggcgaggacctgaagccccacctggcccagctgaccggcagcaagatgaagctgctgaacctgtacatcaagagagcccagaccaccaacagcaacagcagcagcagcagcgacgtgagcacccacagctag

SEQ ID NO: 53012 - DNA, 765 bp, Artificial Sequence
  derived and/or modified sequence
atggccgtgggccagatcggcaacttcttggcctacactgccgtcccaacagtcctggtgacaccccttggcgcgctaggagtcccctttggctccatcctcgcttcctatctcctgaaagagaaactgaacatactcggaaaactcgggtgcctgttgtcatgtgctggatccgtagtgttaatcatccacagcccaaagtcagagtcagtgaccactcaggcagagttggaggagaaacttaccaacccagtgttcgtcgggtacctttgtattgtcctcctcatgttgctgctattaatattctggatcgccccagcccacgggccgaccaatattatggtgtacattagcatctgcagcctcttgggctcatttacagttccctcaaccaagggcatcggcttagctgcccaggatatactgcacaacaatccttcaagtcagcgggccctatgtctgtgtcttgtgttgcttgctgtgctgggctgctctataatcgtccagtttcggtacatcaacaaggcacttgaatgcttcgactctagcgtcttcggcgcaatatactacgtcgttttcacaactctcgtactcctggccagcgctattttgtttcgcgagtggagcaatgtcggcctggttgacttcctcggaatggcctgtggatttaccacagtgtccgtgggaatagtcttgatccaggtctttaaggagttcaatttcaacctcggcgagatgaataaatcaaacatgaaaacagactag

SEQ ID NO: 53013 - DNA, 480 bp, Artificial Sequence
  derived and/or modified sequence
atgctgttactgttgattttttggattgccccagcgcatggccccaccaacattatggtgtacattagcatttgctctctgctcggtagtttcaccgtcccttcaacaaaggggatagggctcgccgcacaagatatcttgcataataacccctcttcccaaagagccctttgcctctgtctcgtgctgctggccgtgctggggtgttccataatcgtccagttccgatatatcaataaggcattggagtgttttgactcatccgtcttcggcgccatttactacgtcgtgttcaccacgttagtgctccttgcttctgctatcctttttcgggagtggtccaacgtcggcttagtcgacttcctaggcatggcttgtggctttacgacagtcagcgtcggcatcgtgctcattcaagtgtttaaagagtttaatttcaacctcggggaaatgaacaagagcaacatgaaaaccgattag

SEQ ID NO: 53014 - DNA, 765 bp, Artificial Sequence
  derived and/or modified sequence
atggccgtcggtcaaatcggcaattttctggcatataccgcagtccctactgtccttgtaaccccgctgggcgctcttggcgtgccattcggctccatattggctagctatcttctgaaagaaaagctgaacatccttgggaagctgggctgtctgttatcatgcgctgggagtgttgttctgattatccatagccctaaatcggaatccgtgaccacacaggcagagcttgaagagaagctaactaacccggtgtttgttggctacctgtgcattgttttgctgatgctactactgctgatcttctggatcgcccccgcccacggtccaacaaacattatggtttatatttcaatctgctccctgctgggatcattcacggtgccctctaccaaaggaattggcctagctgctcaggatatcctacacaacaatcccagttcacagcgggccttgtgcctatgcctggtactgctcgctgtactggggtgctccattattgtacagtttcggtatataaataaagcccttgagtgtttcgactctagtgtgtttggtgcaatctactatgttgtgttcaccacgctggtcttgctagccagcgcaatcctctttcgcgagtggtcaaacgtggggctggtcgattttttgggcatggcctgtggctttactaccgtgagtgtcggcatcgttttaatccaggtcttcaaagagttcaacttcaacctgggcgagatgaacaaaagcaacatgaagactgactag

SEQ ID NO: 53015 - DNA, 765 bp, Artificial Sequence
  derived and/or modified sequence
atggctgtgggccagatcggcaacttcctggcctacacagctgtgcccaccgtgctggtgacccccctgggcgccctgggcgtgcccttcggcagcatcctggccagctacctgctgaaggagaagctgaacatcctgggcaagctgggctgcctgctgagctgtgccggctctgtggtgctgatcatccacagccccaagtctgagagcgtgaccacccaggccgagctggaggagaagctgaccaaccctgtgtttgtgggctacctgtgcatcgtgctgctgatgctgctgctgctgatcttctggatcgccccagcccacggccccaccaacatcatggtgtacatcagcatctgcagcctgctgggcagcttcaccgtgcccagcaccaagggcatcggcctggccgcccaggacatcctgcacaacaaccccagcagccagagggccctgtgcctgtgcctggtgctgctggccgtgctgggctgcagcatcatcgtgcagttccgctacatcaacaaggccctggagtgctttgacagctctgtgtttggagccatctactacgtggtgttcaccaccctggtgctgctggccagcgccatcctcttccgggagtggagcaatgtgggcctggtggacttcctgggcatggcctgtggcttcaccaccgtgtctgtgggcatcgtgctgatccaggtgttcaaggagttcaacttcaacctgggggagatgaacaagagcaacatgaagacagactag

SEQ ID NO: 53016 - DNA, 480 bp, Artificial Sequence
  derived and/or modified sequence
atgctgctgctgctgatcttctggatcgccccagcccacggccccaccaacatcatggtgtacatcagcatctgcagcctgctgggcagcttcaccgtgcccagcaccaagggcatcggcctggccgcccaggacatcctgcacaacaaccccagcagccagagggccctgtgcctgtgcctggtgctgctggccgtgctgggctgcagcatcatcgtgcagttccgctacatcaacaaggccctggagtgctttgacagctctgtgtttggagccatctactacgtggtgttcaccaccctggtgctgctggccagcgccatcctcttccgggagtggagcaatgtgggcctggtggacttcctgggcatggcctgtggcttcaccaccgtgtctgtgggcatcgtgctgatccaggtgttcaaggagttcaacttcaacctgggggagatgaacaagagcaacatgaagacagactag

SEQ ID NO: 53017 - DNA, 765 bp, Artificial Sequence
  derived and/or modified sequence
atggccgtgggccagatcggcaacttcctggcctacaccgccgtgccaaccgttctcgtgacgccattgggtgcgctgggagtgcccttcggatccattctcgcttcctatctactgaaagagaaacttaatatcctgggcaaactgggttgtctgctgtcatgcgctgggtctgtggtcctaatcatccactctcccaagtcggagtccgtgaccacacaggccgagctggaagagaaattaacaaaccctgtgttcgttggatacttgtgcattgtcctgctcatgctgctgctgctgattttctggatcgctccagctcacggaccaaccaacattatggtatatatttctatttgcagcctcttaggctcctttactgtgcctagcacaaaggggatcggcttggccgcacaggacattcttcataacaatccctcgagccaacgcgccctgtgtctgtgccttgtgcttttagctgtgttgggttgtagtataatcgttcagttccggtacatcaacaaggcccttgaatgcttcgattcgagtgtgttcggcgcgatttactatgtggtgtttactactctggtgctgctggcctcagcaatcctgtttagagagtggtctaacgtgggactagtggactttctgggaatggcgtgtggtttcaccacagtaagtgtggggatcgtactcatccaggtctttaaagaattcaattttaacctaggggaaatgaataaaagtaatatgaagacagactag

SEQ ID NO: 53018 - DNA, 480 bp, Artificial Sequence
  derived and/or modified sequence
atgctgctgctgctgatcttctggatcgcccccgcccacggccccacaaacattatggtctatatctctatatgttccctattaggttcctttactgtaccatctactaagggcatcgggcttgcggcgcaggacatactgcacaataatccctccagtcagcgagcactctgtttatgcctggttctgctagcagtcctgggatgtagtattattgtccagtttaggtatatcaacaaagctcttgaatgctttgattcatcagtcttcggagctatttactatgtggtgttcactacccttgtgctgctcgctagtgccatcctgttcagggagtggagcaatgttggacttgtggactttctggggatggcctgcggatttaccaccgtctcagtgggaattgtgcttatacaggtgttcaaggaattcaatttcaatctgggtgaaatgaacaaaagtaacatgaagactgactag

SEQ ID NO: 53019 - DNA, 765 bp, Artificial Sequence
  derived and/or modified sequence
atggccgtgggccagatcggcaacttcctggcctacaccgccgtgcctaccgtgcttgtgacgcccctaggcgccctcggagtgccctttgggtcgatcctggcttcatatttgctgaaggagaaactaaacattctgggaaagctaggttgtctcctgtcctgtgcggggtcggttgtcctgattatccactccccaaagagtgaaagcgtaactacccaggcggagctggaagaaaaactgacaaatcctgtttttgttggctatctctgtatagttctgctaatgcttctgctcttaatcttctggattgccccggcacacggccctacaaacatcatggtctacatcagcatctgctcgctgttgggatcatttacagtcccctcgaccaaaggaatcgggctggcagcgcaggatatcctccataacaatccgtcctcacagagggcgctgtgtctgtgcctcgttctactggctgttttgggctgctccattatcgtgcagttcaggtatatcaacaaagctctggagtgctttgactccagcgtctttggcgccatctattacgtggtatttaccaccttggtgctgcttgcaagtgcaattctgttccgggagtggagcaatgtagggctcgtggactttcttggtatggcgtgcggctttacaacagtttctgtaggaatcgtgttaatacaggtgttcaaagagtttaactttaacttgggggagatgaataagtcaaatatgaaaacggactag

SEQ ID NO: 53020 - DNA, 2797 bp, Artificial Sequence
  derived and/or modified sequence
gtcgagcctggtgaacgggtccacgttcgtgctacagaagaagggcatcgtgcgtgccaagcggcgaggtacttcctatttaacagacattgtgtggtgggctggcacaatcgcaatggctgttggccagattggaaacttcctggcttacacggcggtccccacggtcctggtaacccccctgggcgcccttggagtaccgttcggacagatgcccaaatccttgcagagaagtgtgtccatgatgggtgtattgaagtttacaccttagagtcacgtaggcattaaggtccattttagcttcctatctcctgaaggaaaagctcaacatcttgggcaagttggggtgcctgctaagctgtgcaggctccgtcgtgctgattatccactccccaaagtctgagagtgtgacaactcaggctgagctggaggaaaagctgaccaatccagtgtttgtgggctacctgtgcatcgtgctgctcatgctgctgctgctcatcttctggatcgcgccggcccatgggcccaccaacatcatggtctacatcagcatctgctccttgctgggcagtttcaccgtgccttccaccaagggcatcgggctggcggcccaagacatcttgcataacaacccgtccagtcagagagccctctgcctgtgcctggtactcctggccgtgctcggctgcagcatcatcgtccagttcaggtacatcaacaaggcgctggagtgcttcgactcctcggtgttcggggccatctactacgtcgtgtttaccacgctggtcctgctggcctcagccatcctcttccgggagtggagcaacgtgggcctggtggacttcttggggatggcctgtggattcacgaccgtctccgtggggattgtccttatacaggtgttcaaagagttcaatttcaaccttggggagatgaacaaatctaatatgaaaacagactagattgcaataggagcttggatggttcgaggaataggcattggaggtggtttctggccgtgattggatgtgaagtagaagaggtcctcgatcatggtgttagaattgactggatagtaacaggtggtctggtggatagcggggagcatggctcagcaccagagcagaggcccagccagccctctgcagcccaaacgtccccaacggttgcctggcaccatctctctctgatgagacgaatctcattttcatttccattaacctggaagctttcatgaatattctcttcttttaaaacattttaacattatttaaacagaaaaagatgggctctttctggttagttgttacatgatagcagagatatttttacttagattactttgggaatgagagattgttgtcttgaactctggcactgtacagtgaatgtgtctgtagttgtgttagtttgcattaagcatgtataacattcaagtatgtcatccaaataagaggcatatacattgaattgtttttaatcctctgacaagttgactcttcgacccccacccccacccaagacattttaatagtaaatagagagagagagaagagttaatgaacatgaggtagtgttccactggcaggatgacttttcaatagctcaaatcaatttcagtgcctttatcacttgaattattaacttaatttgactcttaatgtgtatatgttcttagattagaataatgcaacttcgagtatgctttaatatttcaatattcaagttacaaatgtataaggcagttagaaataatacagtcacatgtcacttaatgatagggaaacattctgagaaatgcattgtaaggtgactttattgtgtgaacatcatggagtgcacttatacaaacctagatgggacacctatgacccacccaggccagatggtacagcctgttgctcctgggccacacacctgtacagcatgtgaccgcactgaataccgcaggcaattgtaacacagtggtgagtatttgtgtttacaaacataggaaaggtacagtaaaactatggtattacaatgttatgggaccaccgtcatgtaagtggtatgtctttgacagaaacatggttacgtggttcatgactgtatattcactggaagatagtcaagactaaagacacattagagcaaattgacccctttaacatgtgattattgtccaattaaagacagttgatttaagtagcatgaggtattattttatttgtattcgatctgtgttacctgggatccagtatcaaatatatccacattctttatcagcaagcattcatggccattcagaagaaataaattaggtaacttgataataaggctaagtgggagagtacctgttcaatagctcatatatcgagtaccctgtcatacaggaacaagttaaaggacacaattgaggttaggctagcttctacaaattgcaatatgcagtttttgaaagattttctaacaaaaagccaataaatgtagccatctccttgttgtttgcaatggcagagcatcctagagttcctcagctaacctctcattatgtgtcttaaatgcaaaagagccattaattatgccagtatttgaatcaaagaggtcattctctgtctatagtgttcccatccatgtgttccaaatgggagcatagcatgaagtgatgcacatatttcaccacggtatcatgtacttcatggccagtgttttatctcagcagggaactacgccaagttgaaagatggggttgggtaaagtagattaggtgaagtagaacataaaattgaatagtacccaattaaagttcctcagt

SEQ ID NO: 53021 - DNA, 765 bp, Artificial Sequence
  derived and/or modified sequence
atggccgtagggcagataggaaacttcctagcctacacggccgttccaactgtcctggttaccccgttaggagccctcggcgtcccgttcggttctatacttgcaagttaccttctgaaggagaaacttaacatactgggcaagttgggctgcctgttatcctgtgctggctctgttgtgctcattatacattcccctaagtcggagtcagtcaccactcaggcagagttagaggaaaagctgaccaaccccgttttcgttggatatctgtgcatagtcctgctgatgcttcttctgctgatcttctggatcgctccagcacacggcccaacaaacatcatggtttatatctccatttgttctcttctgggctcctttactgttccgagcacaaagggaataggtctagctgctcaagacattttgcacaacaacccgtcctctcaacgtgccctctgtctctgtttggtgctcctggcagtcctagggtgctccataatcgttcaattccgctatatcaacaaagctctggaatgcttcgacagttccgtttttggagcgatctactatgtcgtgttcacaacacttgtactcctggcctccgcgattttattccgagaatggtcaaacgtgggcctcgtagacttccttgggatggcctgcggatttactactgttagcgtggggattgtattgattcaggtattcaaggaatttaattttaacttgggtgaaatgaataagtccaacatgaaaaccgattag

SEQ ID NO: 53022 - DNA, 480 bp, Artificial Sequence
  derived and/or modified sequence
atgcttctcctgctcattttttggattgccccagcccatggaccaactaacatcatggtgtacatctctatctgcagtcttctgggttccttcacggtcccatccactaagggcattggcttagccgcacaggatatcctgcacaacaatccctctagtcagcgagccctgtgtctgtgtctcgtgttgcttgccgtcttagggtgctctattattgttcaattccggtatattaataaggccctggaatgtttcgattcatcagtgtttggcgcaatctactacgtggtctttaccaccttagtgcttctggcctccgcgatcctgttccgcgagtggtctaacgtgggacttgttgatttcctcgggatggcttgtggtttcacgacagtctccgttggtatagtgctcattcaagtgttcaaggagttcaacttcaatctgggcgaaatgaataaaagcaacatgaagaccgattag

SEQ ID NO: 53023 - DNA, 765 bp, Artificial Sequence
  derived and/or modified sequence
atggccgtggggcagattggcaatttcctggcatacaccgccgttcccactgtgctggtaaccccgctgggcgcacttggagtgccattcggctcgattcttgcatcatacttgctcaaagaaaagctgaacattctcggaaagctcggctgcctcttatcttgcgccggtagtgtcgtgctcataatccactctcctaaatcggaatcggtgacaacacaagcggagctggaagaaaaactgaccaatccagtcttcgttgggtatctgtgcatagtgctgctcatgctccttctcctcatattttggatagctccagcacatggtcccaccaatatcatggtgtacatttcgatttgctccctgttgggctctttcactgtgccttcaacaaaagggattgggctggccgctcaggacatcctgcacaataatccatcttcgcagagagcactttgtttgtgtctggtgcttctggcagtgctagggtgttcaatcattgttcaattcaggtatattaataaagccctggaatgctttgacagctcagtttttggggcaatctactacgtagtctttactacactggtgctccttgcatccgctatcctgtttcgagagtggtctaacgtgggacttgttgacttcctaggcatggcgtgtgggtttacgaccgtgagtgtggggattgtgctcatccaggtgtttaaggaattcaatttcaatcttggggaaatgaacaaaagcaacatgaaaacagactag

SEQ ID NO: 53024 - DNA, 765 bp, Artificial Sequence
  derived and/or modified sequence
atggccgtgggccagatcggcaacttcctggcctacaccgccgtgcccaccgtgctggtgacccccctgggcgccctgggcgtgcccttcggcagcatcctggccagctacctgctgaaggagaagctgaacatcctgggcaagctgggctgcctgctgagctgcgccggcagcgtggtgctgatcatccacagccccaagagcgagagcgtgaccacccaggccgagctggaggagaagctgaccaaccccgtgttcgtgggctacctgtgcatcgtgctgctgatgctgctgctgctgatcttctggatcgcccccgcccacggccccaccaacatcatggtgtacatcagcatctgcagcctgctgggcagcttcaccgtgcccagcaccaagggcatcggcctggccgcccaggacatcctgcacaacaaccccagcagccagagagccctgtgcctgtgcctggtgctgctggccgtgctgggctgcagcatcatcgtgcagttcagatacatcaacaaggccctggagtgcttcgacagcagcgtgttcggcgccatctactacgtggtgttcaccaccctggtgctgctggccagcgccatcctgttcagagagtggagcaacgtgggcctggtggacttcctgggcatggcctgcggcttcaccaccgtgagcgtgggcatcgtgctgatccaggtgttcaaggagttcaacttcaacctgggcgagatgaacaagagcaacatgaagaccgactag

SEQ ID NO: 53025 - DNA, 480 bp, Artificial Sequence
  derived and/or modified sequence
atgctgctgctgctgatcttctggatcgcccccgcccacggccccaccaacatcatggtgtacatcagcatctgcagcctgctgggcagcttcaccgtgcccagcaccaagggcatcggcctggccgcccaggacatcctgcacaacaaccccagcagccagagagccctgtgcctgtgcctggtgctgctggccgtgctgggctgcagcatcatcgtgcagttcagatacatcaacaaggccctggagtgcttcgacagcagcgtgttcggcgccatctactacgtggtgttcaccaccctggtgctgctggccagcgccatcctgttcagagagtggagcaacgtgggcctggtggacttcctgggcatggcctgcggcttcaccaccgtgagcgtgggcatcgtgctgatccaggtgttcaaggagttcaacttcaacctgggcgagatgaacaagagcaacatgaagaccgactag

SEQ ID NO: 53026 - protein, 751 aa, Artificial Sequence
  derived and/or modified sequence
MAATGTAAAAATGRLLLLLLVGLTAPALALAGYIEALAANAGTGFAVAEPQIAMFCGKLNMHVNIQTGKWEPDPTGTKSCFETKEEVLQYCQEMYPELQITNVMEANQRVSIDNWCRRDKKQCKSRFVTPFKCLVGEFVSDVLLVPEKCQFFHKERMEVCENHQHWHTVVKEACLTQGMTLYSYGMLLPCGVDQFHGTEYVCCPQTKIIGSVSKEEEEEDEEEEEEEDEEEDYDVYKSEFPTEADLEDFTEAAVDEDDEDEEEGEEVVEDRDYYYDTFKGDDYNEENPTEPGSDGTMSDKEITHDVKAVCSQEAMTGPCRAVMPRWYFDLSKGKCVRFIYGGCGGNRNNFESEDYCMAVCKAMIPPTPLPTNDVDVYFETSADDNEHARFQKAKEQLEIRHRNRMDRVKKEWEEAELQAKNLPKAERQTLIQHFQAMVKALEKEAASEKQQLVETHLARVEAMLNDRRRMALENYLAALQSDPPRPHRILQALRRYVRAENKDRLHTIRHYQHVLAVDPEKAAQMKSQVMTHLHVIEERRNQSLSLLYKVPYVAQEIQEEIDELLQEQRADMDQFTASISETPVDVRVSSEESEEIPPFHPFHPFPALPENEGSGVGEQDGGLIGAEEKVINSKNKVDENMVIDETLDVKEMIFNAERVGGLEEERESVGPLREDFSLSSSALIGLLVIAVAIATVIVISLVMLRKRQYGTISHGIVEVDPMLTPEERHLNKMQNHGYENPTYKYLEQMQI

SEQ ID NO: 53027 - protein, 658 aa, Artificial Sequence
  derived and/or modified sequence
MYPELQITNVMEANQRVSIDNWCRRDKKQCKSRFVTPFKCLVGEFVSDVLLVPEKCQFFHKERMEVCENHQHWHTVVKEACLTQGMTLYSYGMLLPCGVDQFHGTEYVCCPQTKIIGSVSKEEEEEDEEEEEEEDEEEDYDVYKSEFPTEADLEDFTEAAVDEDDEDEEEGEEVVEDRDYYYDTFKGDDYNEENPTEPGSDGTMSDKEITHDVKAVCSQEAMTGPCRAVMPRWYFDLSKGKCVRFIYGGCGGNRNNFESEDYCMAVCKAMIPPTPLPTNDVDVYFETSADDNEHARFQKAKEQLEIRHRNRMDRVKKEWEEAELQAKNLPKAERQTLIQHFQAMVKALEKEAASEKQQLVETHLARVEAMLNDRRRMALENYLAALQSDPPRPHRILQALRRYVRAENKDRLHTIRHYQHVLAVDPEKAAQMKSQVMTHLHVIEERRNQSLSLLYKVPYVAQEIQEEIDELLQEQRADMDQFTASISETPVDVRVSSEESEEIPPFHPFHPFPALPENEGSGVGEQDGGLIGAEEKVINSKNKVDENMVIDETLDVKEMIFNAERVGGLEEERESVGPLREDFSLSSSALIGLLVIAVAIATVIVISLVMLRKRQYGTISHGIVEVDPMLTPEERHLNKMQNHGYENPTYKYLEQMQI

SEQ ID NO: 53028 - DNA, 2256 bp, Artificial Sequence
  derived and/or modified sequence
atggcggctactggtacagccgctgccgccgctacgggccgcttgttactcctgttactggtcgggctgaccgccccagccctggccttagccggttacatcgaggctctggccgcgaatgccggtacaggattcgccgttgctgaacctcaaattgccatgttctgcggaaagctgaatatgcacgtcaacattcagaccggtaaatgggagcccgacccaactggaaccaagagctgtttcgagacaaaggaagaagtccttcaatattgccaggagatgtacccagaattgcaaatcacgaacgtcatggaagccaaccagcgagtatccatagataactggtgtaggcgggataaaaaacagtgtaaatcgcgctttgtgactccatttaagtgcctggtgggtgagtttgtatcagatgtgcttctagtgcctgaaaagtgccaattcttccacaaggaaaggatggaggtttgcgagaatcatcagcactggcataccgtcgtgaaggaagcatgtctgactcagggcatgaccctgtattcgtatggaatgctactgccctgcggagtcgatcagttccacgggactgaatacgtgtgctgcccacagaccaagattatcggtagtgtctctaaggaagaagaggaagaggatgaggaggaggaagaggaagaagacgaagaagaagattacgatgtgtataagagcgagtttcccaccgaagccgacctggaagactttaccgaagcagccgttgatgaggatgatgaggatgaggaagagggcgaggaggtggtagaagatagggattattactatgatacctttaaaggcgatgattacaatgaggaaaacccaacagagccgggcagtgacggcacaatgtctgacaaagagatcacacatgacgtcaaggcagtgtgcagtcaggaagccatgaccggaccatgccgggccgtgatgccaaggtggtacttcgatttgtctaaaggcaagtgcgtccgcttcatatatggaggatgcggtggtaaccgcaataatttcgagagtgaagactactgcatggcagtctgtaaagcaatgataccccccacgccacttcctacaaatgatgtcgacgtctatttcgagacatcagccgatgacaatgagcatgcccgcttccagaaagcaaaggagcagctcgaaatccgccatcgcaatagaatggaccgggtgaagaaggagtgggaagaggccgaactacaggcgaagaacctgccgaaggccgagcgtcagactcttatccagcattttcaggcgatggtaaaagctctggagaaagaggcggcttccgaaaagcaacaacttgttgaaacacacttagccagggtcgaggccatgcttaacgaccggaggcggatggccctggaaaactatctggccgcgctccagtcagacccgccccgcccccatcggattctgcaggccctcaggcgatatgtccgagcagaaaacaaggaccggctgcataccatcaggcactatcagcacgtcctggctgtcgacccagaaaaggccgctcaaatgaaatcacaagtcatgactcaccttcatgttatagaggaaaggagaaatcagtcattgtctttactgtacaaagtcccctacgttgcacaagagattcaagaggaaatcgacgagttattgcaggagcagcgagcagatatggaccagtttactgcttccataagtgagacccctgtagacgttcgggtgagcagtgaggagtctgaagagatccctccattccaccccttccatccatttccagccctgcccgagaatgagggcagtggagtgggggaacaggacggagggcttatcggcgctgaagagaaggtgatcaattccaaaaataaggtggatgagaatatggttatcgacgagacgctcgatgtgaaagagatgattttcaatgccgagagggtgggaggcctcgaagaggagcgggagtcagtgggccccctgcgagaagacttctctttgtcaagttctgcccttatcggtctgcttgtgatcgctgtggccatcgccaccgtcattgttatcagtttagttatgttgagaaaacgccagtacgggacgatctcccacggaatagtcgaagtcgatcccatgctcacaccagaagagaggcatcttaataaaatgcagaatcacggatacgagaatccaacttacaagtacctggaacagatgcaaatctag

SEQ ID NO: 53029 - DNA, 1977 bp, Artificial Sequence
  derived and/or modified sequence
atgtaccccgagctgcagataacaaacgtaatggaagcaaatcagcgggtaagcatcgataattggtgtcggcgagacaagaaacagtgtaagtcgagattcgtgacaccattcaagtgcttggttggggaatttgtttctgatgtgctactcgtacccgagaagtgtcaatttttccacaaggagcggatggaggtgtgtgagaatcatcagcactggcacacagttgtgaaggaggcctgcctgactcagggaatgacgctctactcctatggaatgttgctcccttgcggtgtggatcagtttcatggtacagagtatgtgtgttgtccccaaaccaagattattggcagtgtctctaaggaagaggaggaggaagacgaagaggaagaggaggaagaagacgaggaggaagactacgatgtgtataagtccgagttcccgaccgaggcagatctggaggactttactgaggcagccgtggatgaggatgacgaagatgaagaagagggggaagaggtggttgaagatcgtgattactattacgatacatttaaaggagacgactacaacgaagagaatcccaccgaaccgggaagtgacggaaccatgagcgacaaggagattacccatgacgtcaaggccgtctgttcccaagaagccatgactggtccttgtagggctgtcatgccccggtggtactttgacttatctaaaggaaagtgcgtgcgattcatttatggcggatgtggcgggaacagaaataactttgaatcagaagattactgtatggctgtttgcaaagcaatgattcctcctacacctctgcctaccaacgacgtagatgtgtattttgaaacctcagccgatgataacgagcacgctaggttccaaaaggcaaaggagcaactggaaatcaggcaccggaaccgaatggatcgggtgaaaaaagagtgggaagaggcagaattacaggccaagaaccttccaaaggccgagcgccagacactgatccaacattttcaagcgatggtcaaggcgctcgagaaggaggcagcctcagagaaacaacagctcgttgagacccatctggcccgtgtcgaagccatgcttaatgatagaaggaggatggctcttgagaactatctggccgctcttcagtccgatccacccaggcctcaccggatactgcaggccctgagaagatacgtgcgagctgaaaataaggatagacttcacaccattcggcactatcagcatgtgcttgccgtggacccagagaaagctgcacagatgaaatctcaggttatgacccacttgcatgttattgaggagcggcgcaatcaatctctaagcttactctacaaagttccctacgtggcccaagagatccaggaagaaatagatgagttgctgcaggagcaacgggctgacatggatcagttcaccgcctccatcagcgaaacgcccgttgacgtgcgggtctctagtgaagagagtgaagaaataccgccttttcacccctttcatcccttcccagccctcccagaaaacgaaggctcaggcgtcggcgaacaggatggggggctgatcggtgcagaggagaaggttataaacagcaaaaacaaagttgatgagaatatggttatcgacgagaccctcgacgtgaaggagatgattttcaatgcggagcgcgtaggagggttggaggaagagagggagtccgtcggacctctgcgtgaggatttctccttgtcatctagcgccctgatcggactcctggtaatagcagtcgctattgcaaccgtgatagtgatctcacttgttatgctgaggaagaggcagtacggcacaattagtcacggcatagttgaggttgacccgatgcttacccccgaggagcgtcacctgaacaaaatgcagaaccatgggtacgaaaatcctacctataaatacctggaacaaatgcagatctag

SEQ ID NO: 53030 - DNA, 2256 bp, Artificial Sequence
  derived and/or modified sequence
atggccgccaccggcacagctgctgctgctgccaccggccgcctgctgctgctgctgctggtgggcctgacagccccagccctggccctggccggctacatcgaggccctggccgccaatgccggcactggatttgctgtggccgagccccagatcgccatgttctgtgggaagctgaacatgcacgtgaacatccagacaggcaagtgggagccagaccccaccggcaccaagagctgctttgagaccaaggaggaggtgctgcagtactgccaggagatgtacccagagctgcagatcaccaacgtgatggaggccaaccagagggtgtccattgacaactggtgcagaagagacaagaagcagtgcaagagcagatttgtgacccccttcaagtgcctggtgggggagtttgtgtctgatgtgctgctggtgcctgagaagtgccagttcttccacaaggagaggatggaggtgtgtgagaaccaccagcactggcacacagtggtgaaggaggcctgcctgacccagggcatgaccctgtacagctatggcatgctgctgccctgtggggtggaccagttccacggcacagaatatgtgtgctgcccccagaccaagatcatcggctctgtgtccaaggaggaggaggaggaggatgaggaggaggaggaggaggaggatgaggaggaggactatgatgtgtacaagtctgagttccccacagaggccgacctggaggacttcacagaggccgctgtggatgaagatgatgaagatgaggaggagggggaggaggtggtggaggaccgggactactactatgacaccttcaagggagatgactacaatgaggagaaccccacagagcccggcagtgatggcaccatgtctgacaaggagatcacccatgatgtgaaggctgtgtgcagccaggaggccatgacaggcccctgcagagctgtgatgccccgctggtactttgacctgagcaagggcaaatgtgtgcgcttcatctacggcggctgcggcggcaacagaaacaactttgaaagtgaggactactgcatggctgtgtgcaaggccatgatcccccccacccccctgcccaccaatgatgtggatgtgtactttgagaccagcgcagatgacaatgaacatgcccgcttccagaaggccaaggagcagctggagatccgccacaggaacaggatggacagagtgaagaaggagtgggaggaggccgagctgcaggccaagaacctgcccaaggccgagcggcagaccctcatccagcacttccaggccatggtgaaggccctggagaaggaggccgccagcgagaagcagcagctggtggagacccacctggcccgggtggaggccatgctgaatgacagaagaaggatggccctggagaactacctggccgccctgcagagcgaccccccccggccccaccgcatcctgcaggccctgcggcgctacgtgcgggcagagaacaaggaccggctgcacaccatccgccactaccagcacgtgctggccgtggaccctgagaaggccgcccagatgaagagccaggtgatgacccacctgcacgtgattgaggagaggaggaaccagagcctgagcctgctgtacaaggtgccctacgtggcccaggagatccaggaggagattgatgagctgctgcaggagcagagagctgacatggaccagttcaccgccagcatcagcgagacccctgtggatgtgcgggtgagcagcgaggagagcgaggagatcccccccttccaccccttccaccccttccctgccctgcctgaaaatgaaggcagcggcgtgggggagcaggacggcggcctcatcggggctgaggagaaggtgatcaacagcaagaacaaggtggatgagaacatggtgattgatgagaccctggatgtgaaggagatgatcttcaatgctgagcgggtgggcggcctggaggaggagcgggagagcgtgggccccctgcgggaggacttcagcctgagcagcagcgccctgattggcctgctggtgattgctgtggccatcgccaccgtgattgtcatcagcctggtgatgctgaggaagaggcagtatggcaccatcagccacggcatcgtggaggtggaccccatgctgaccccagaggagcggcacctgaacaagatgcagaaccacggctatgagaaccccacctacaagtacctggagcagatgcagatctag

SEQ ID NO: 53031 - DNA, 1977 bp, Artificial Sequence
  derived and/or modified sequence
atgtacccagagctgcagatcaccaacgtgatggaggccaaccagagggtgtccattgacaactggtgccggcgggacaagaagcagtgcaagagcagatttgtgacccccttcaagtgcctggtgggggagtttgtgtctgatgtgctgctggtgcctgagaagtgccagttcttccacaaggagaggatggaggtgtgtgagaaccaccagcactggcacacagtggtgaaggaggcctgcctgacccagggcatgaccctgtacagctatggcatgctgctgccctgtggggtggaccagttccatggaacagaatatgtgtgctgcccccagaccaagatcatcggctctgtgtccaaggaggaggaggaggaggatgaggaggaggaggaggaggaggatgaggaggaggactatgatgtgtacaagtctgagttccccacagaagctgacctggaggacttcacagaagctgctgtggatgaagatgatgaagatgaggaggagggggaggaggtggtggaggaccgggactactactatgacaccttcaagggagatgactacaatgaggagaaccccacagagcccggcagtgatggcaccatgtctgacaaggagatcacccatgatgtgaaggctgtgtgcagccaggaggccatgacaggcccctgcagagctgtgatgccccgctggtactttgacctgagcaaaggaaaatgtgtgcgcttcatctatggaggctgcggcggcaacagaaacaactttgaaagtgaggactactgcatggctgtgtgcaaggccatgatcccccccacccccctgcccaccaatgatgtggatgtgtactttgagaccagcgcagatgacaatgagcacgcccgcttccagaaggccaaggagcagctggagatccgccacaggaacaggatggacagagtgaagaaggagtgggaggaggccgagctgcaggccaagaacctgcccaaggccgagcggcagaccctcatccagcacttccaggccatggtgaaggccctggagaaggaggccgccagcgagaagcagcagctggtggagacccacctggcccgggtggaggccatgctgaatgacagaagaaggatggccctggagaactacctggccgccctgcagagcgaccccccccggccccaccgcatcctgcaggccctgcggcgctacgtgcgggcagagaacaaggaccggctgcacaccatccgccactaccagcacgtgctggccgtggaccctgagaaggccgcccagatgaagagccaggtgatgacccacctgcacgtgattgaggagaggaggaaccagagcctgagcctgctgtacaaggtgccctacgtggcccaggagatccaggaggagattgatgagctgctgcaggagcagagagctgacatggaccagttcaccgccagcatcagcgagacccctgtggatgtgcgggtgtcctctgaggagagcgaggagatcccccccttccaccccttccaccccttccctgccctgcctgaaaatgaaggcagcggcgtgggggagcaggacggcggcctgattggagctgaggagaaggtgatcaacagcaagaacaaggtggatgagaacatggtgattgatgagaccctggatgtgaaggagatgatcttcaatgctgagcgggtgggcggcctggaggaggagcgggagagcgtgggccccctgcgggaggacttcagcctgagcagcagcgccctgattggcctgctggtgattgctgtggccatcgccaccgtcatcgtcatcagcctggtgatgctgaggaagaggcagtatggcaccatcagccatggaattgtggaggtggaccccatgctgaccccagaggagcggcacctgaacaagatgcagaaccacggctatgagaaccccacctacaagtacctggagcagatgcagatctag

SEQ ID NO: 53032 - DNA, 2256 bp, Artificial Sequence
  derived and/or modified sequence
atggccgccaccggcaccgccgccgccgccgccaccggccggctgctcctgttgctgttagtaggcttaaccgctcctgctttagctttggctgggtacatagaagcactggctgccaatgcagggacaggatttgctgttgctgaacctcaaatagccatgttttgtggcaaactgaacatgcatgtgaacattcagactggtaaatgggagccggatcccactgggaccaaaagctgcttcgagactaaggaggaggttctccagtactgccaagaaatgtaccccgaattgcaaatcactaatgtcatggaggccaatcagcgggtgagcatagataattggtgtaggagagacaaaaagcaatgcaaatcccgatttgtgaccccatttaagtgtttagtgggggaatttgtgtcggatgtgctgctggtgccagaaaaatgccaattcttccacaaagagcggatggaagtctgtgagaaccaccagcattggcacaccgtggtgaaagaggcctgccttacacaaggtatgacgctctactcctatggcatgctcctgccatgcggggtggatcagtttcacggtacagagtatgtgtgttgccctcagaccaagattatcggtagcgtctctaaagaggaggaggaggaagatgaggaggaggaagaggaggaggatgaagaggaggattacgacgtgtacaagtccgagtttcctaccgaagcggatttggaggactttaccgaagccgcagtcgacgaggacgacgaggacgaagaggagggggaggaagtggtggaagaccgcgattattattatgacacatttaagggggacgactataacgaggaaaaccccaccgaacctggatcggatggcactatgagcgataaagagataacacacgacgtgaaagctgtgtgcagtcaggaggcgatgaccggcccctgccgagcagttatgccccgatggtacttcgacctctccaagggcaagtgcgtcagatttatctacggcgggtgcggtgggaatcgtaataattttgagtccgaagattactgcatggccgtctgcaaggcaatgattcccccaaccccccttcccacaaatgatgttgacgtctatttcgagacttcagccgacgacaacgagcatgcgcgatttcagaaagctaaagaacagctagagattaggcacaggaaccgcatggatcgcgtcaagaaagagtgggaggaagcagagctgcaggccaagaacctcccaaaggccgaaagacaaaccctgattcaacattttcaggcgatggtgaaggctctcgagaaagaagccgcaagcgagaaacagcagcttgtcgagacacacctggccagagtggaggccatgctgaacgacaggaggcggatggcgctagagaattatctggccgccctgcagagcgacccacctaggccccacaggattctacaggctctcaggcgctacgttcgtgcggagaataaagacaggctccataccattcgccactaccaacatgtcctggcagtggatccagagaaggcagcacagatgaaatctcaggtaatgactcacctgcacgtaatcgaagaaaggcgcaaccagtccctgtcactactttacaaagtcccttatgtagctcaggagatccaggaggagatcgatgaactgctgcaagagcagagggccgatatggatcagttcactgcttcaatcagcgaaacccccgtcgatgtccgcgtaagtagcgaggaaagcgaagagattcccccatttcaccccttccatccattccctgccttaccagagaacgaaggaagtggcgtcggtgaacaagatggaggactgataggggctgaggagaaagtaattaactcaaagaacaaggttgacgagaatatggtgattgacgaaacactggacgtgaaagaaatgattttcaacgctgagcgggtgggcggattggaagaggaacgggagtccgtgggtccactgagagaggacttttctctcagttcttcagccttaatcgggctgctggtaatcgctgttgccattgccaccgtaattgtgatttccctagtcatgcttcgtaaacggcagtatggcacaatttcccatgggatcgtggaagtggatcctatgttgactccagaagaaagacaccttaacaagatgcagaaccacggctacgagaaccccacctacaagtacctcgagcagatgcagatctag

SEQ ID NO: 53033 - DNA, 1977 bp, Artificial Sequence
  derived and/or modified sequence
atgtaccccgagctgcagatcaccaacgtgatggaggccaaccagcgggtctccatagataactggtgcaggcgggacaaaaagcaatgtaagtcccgcttcgtgacaccattcaaatgtctcgtgggcgagtttgtctccgatgtgctgcttgtccccgagaaatgtcagtttttccacaaggaacgcatggaggtgtgcgagaatcaccagcactggcacacggtggtgaaagaggcttgtttgactcaaggaatgacactctatagctatggaatgctgcttccatgcggtgtggatcagttccatggaaccgagtacgtgtgctgcccacagacaaagataatcgggagcgtgtctaaggaggaggaggaggaagatgaggaggaagaggaggaagaggacgaagaagaggactacgacgtttataagtctgagttcccaacggaggctgacctagaggattttacagaggctgcggtggatgaagatgacgaggatgaggaggaaggtgaagaggtcgtggaggatagggactactactatgataccttcaaaggagatgactacaacgaggaaaaccctactgaacctggctccgacgggaccatgtccgataaagaaatcactcacgacgttaaagcggtctgttcccaagaggccatgacaggcccatgtcgcgctgtgatgccgaggtggtattttgatctatccaagggtaagtgcgtgagatttatctacgggggctgcgggggtaatcgcaataatttcgagagtgaggactattgcatggcagtatgtaaggcaatgatcccgcctacccccttaccaactaatgatgtggacgtgtattttgaaacatcggcagatgacaacgagcacgcacgctttcagaaggctaaagaacagctggaaattcgacatagaaaccgcatggatagagttaagaaggaatgggaggaagctgagctgcaggccaaaaacctgcctaaggcagagcgccaaaccctcatccagcactttcaggcaatggtcaaagctctcgaaaaggaggcagccagcgaaaagcagcagttggtggaaactcatttagccagagtggaagccatgctgaacgaccggaggaggatggccctagaaaattatctcgcggctcttcagtctgacccgccacggccacaccgcatccttcaagccttgcgcaggtatgtaagagccgagaataaagacaggctccacacaatacgccattaccagcacgtcctggctgtggatcccgagaaggccgcacagatgaaatcccaagttatgacacatctccatgtcatcgaggaacgcaggaatcaatctctgtctttgctctacaaggttccttacgtggcccaggagatccaggaagaaatagacgaactccttcaggagcagagggctgacatggaccagttcactgcctccataagtgagactccagtggatgtgagggtgtcttcagaggaatctgaagagataccgccattccaccccttccatcccttcccggcactgcccgagaacgaaggatctggcgttggagagcaagacgggggcctgatcggagccgaagaaaaggttattaactccaagaataaggtggatgaaaacatggtaatcgatgagacactggatgttaaggaaatgatctttaacgctgagagagtgggcggtctggaggaggaaagagagagcgttggacctctacgggaggatttctctctctcaagcagcgcgctgatcggcctcctcgtgatcgccgtggcgattgcaaccgtgattgttatcagcttggtcatgctgagaaaacggcagtatggcactatcagtcatggtatcgttgaggtggaccctatgctgacaccagaggaacgccacttaaacaagatgcaaaatcacggttacgagaaccctacctacaaatacctagaacagatgcaaatctag

SEQ ID NO: 53034 - DNA, 3270 bp, Artificial Sequence
  derived and/or modified sequence
gcgaggagtccgagtgtgtgagcttgagagccgcgcgctagagcgacccggcgagggatggcggccaccgggaccgcggccgccgcagccacgggcaggctcctgcttctgctgctggtggggctcacggcgcctgccttggcgctggccggctacatcgaggctcttgcagccaatgccggaacaggatttgctgttgctgagcctcaaatcgcaatgttttgtgggaagttaaatatgcatgtgaacattcagactgggaaatgggaacctgatccaacaggcaccaagagctgctttgaaacaaaagaagaagttcttcagtactgtcaggagatgtatccagagctacagatcacaaatgtgatggaggcaaaccagcgggttagtattgacaactggtgccggagggacaaaaagcaatgcaagagtcgctttgttacacctttcaagtgtctcgtgggtgaatttgtaagtgatgtcctgctagttccagaaaagtgccagtttttccacaaagagcggatggaggtgtgtgagaatcaccagcactggcacacggtagtcaaagaggcatgtctgactcagggaatgaccttatatagctacggcatgctgctcccatgtggggtagaccagttccatggcactgaatatgtgtgctgccctcagacaaagattattggatctgtgtcaaaagaagaggaagaggaagatgaagaggaagaggaagaggaagatgaagaggaagactatgatgtttataaaagtgaatttcctactgaagcagatctggaagacttcacagaagcagctgtggatgaggatgatgaggatgaggaagaaggggaggaagtggtggaggaccgagattactactatgacaccttcaaaggagatgactacaatgaggagaatcctactgaacccggcagcgacggcaccatgtcagacaaggaaattactcatgatgtcaaagctgtctgctcccaggaggcgatgacggggccctgccgggccgtgatgcctcgttggtacttcgacctctccaagggaaagtgcgtgcgctttatatatggtggctgcggcggcaacaggaacaattttgagtctgaggattattgtatggctgtgtgtaaagcgatgattcctccaactcctctgccaaccaatgatgttgatgtgtatttcgagacctctgcagatgataatgagcatgctcgcttccagaaggctaaggagcagctggagattcggcaccgcaaccgaatggacagggtaaagaaggaatgggaagaggcagagcttcaagctaagaacctccccaaagcagagaggcagactctgattcagcacttccaagccatggttaaagctttagagaaggaagcagccagtgagaagcagcagctggtggagacccacctggcccgagtggaagctatgctgaatgaccgccgtcggatggctctggagaactacctggctgccttgcagtctgacccgccacggcctcatcgcattctccaggccttacggcgttatgtccgtgctgagaacaaagatcgcttacataccatccgtcattaccagcatgtgttggctgttgacccagaaaaggcggcccagatgaaatcccaggtgatgacacatctccacgtgattgaagaaaggaggaaccaaagcctctctctgctctacaaagtaccttatgtagcccaagaaattcaagaggaaattgatgagctccttcaggagcagcgtgcagatatggaccagttcactgcctcaatctcagagacccctgtggacgtccgggtgagctctgaggagagtgaggagatcccaccgttccaccccttccaccccttcccagccctacctgagaacgaaggatctggagtgggagagcaggatgggggactgatcggtgccgaagagaaagtgattaacagtaagaataaagtggatgaaaacatggtcattgacgagactctggatgttaaggaaatgattttcaatgccgagagagttggaggcctcgaggaagagcgggaatccgtgggcccactgcgggaggacttcagtctgagtagcagtgctctcattggcctgctggtcatcgcagtggccattgccacggtcatcgtcatcagcctggtgatgctgaggaagaggcagtatggcaccatcagccacgggatcgtggaggttgatccaatgctcaccccagaagagcgtcacctgaacaagatgcagaaccatggctatgagaaccccacctacaaatacctggagcagatgcagatttaggtggcagggagcgcggcagccctggcggagggatgcaggtgggccggaagatcccacgattccgatcgactgccaagcagcagccgctgccaggggctgcgtctgacatcctgacctcctggactgtaggactatataaagtactactgtagaactgcaatttccattcttttaaatgggtgaaaaatggtaatataacaatatatgatatataaaccttaaatgaaaaaaatgatctattgcagatatttgatgtagttttcttttttaaattaatcagaaaccccacttccattgtattgtctgacacatgctctcaatatataataaatgggaaatgtcgattttcaataatagacttatatgcaggctgtcgttccggttatgttgtgtaagtcaactcttcagcctcattcactgtcctggcttttatttaaagaaaaaaaaggcagtattccctttttaaatgagctttcaggaagttgctgagaaatggggtggaatagggaactgtaatggccactgaagcacgtgagagaccctcgcaaaatgatgtgaaaggaccagtttcttgaagtccagtgtttccacggctggatacctgtgtgtctccataaaagtcctgtcaccaaggacgttaaaggcattttattccagcgtcttctagagagcttagtgtatacagatgagggtgtccgctgctgctttccttcggaatccagtgcttccacagagattagcctgtagcttatatttgacattcttcactgtctgttgtttacctaccgtagctttttaccgttcacttccccttccaactatgtccagatgtgcaggctcctcctctctggactttctccaaaggcactgaccctcggcctctactttgtcccctcacctccaccccctcctgtcaccggccttgtgacattcactcagagaagaccacaccaagga

SEQ ID NO: 53035 - DNA, 2256 bp, Artificial Sequence
  derived and/or modified sequence
atggctgctacaggtactgctgctgctgctgcaaccggaaggttgttactccttctactggtgggtctgactgcgcctgcccttgctttggccggatacatcgaagccctggcagcaaacgctggaactggatttgctgtagcggagcctcagattgccatgttttgcgggaaactcaacatgcatgtgaatatccagaccggtaaatgggagcccgatcctacaggtaccaagtcttgtttcgaaacaaaggaagaagtgctgcaatactgtcaggagatgtaccccgagttgcagatcactaacgtgatggaagccaatcagcgggtctctatagacaattggtgtcggagagacaagaaacagtgtaagtcaagattcgtgacaccgtttaagtgcctggtaggtgagttcgtgagcgacgtgctcttggtccccgaaaagtgccagttcttccacaaagaacggatggaggtctgcgagaaccaccagcactggcatacagttgtgaaggaggcctgcctgacacagggcatgactctgtacagctacggcatgctcctgccctgtggtgtggatcagtttcatggtacggagtatgtctgttgtcctcagacaaagatcattggctcagtctctaaagaagaggaggaagaggacgaggaagaggaggaggaggaagatgaagaagaagactacgatgtgtataagagcgaattccctaccgaggcagacttagaagacttcacagaggccgcagtggatgaggacgacgaggacgaagaggagggcgaggaggttgtggaggacagggattactactacgacactttcaaaggagacgactacaacgaagaaaacccaacagaacctgggagtgatggcactatgtccgacaaagagatcacgcacgatgtcaaggccgtctgctcacaggaggctatgacggggccttgtagagccgtcatgccaagatggtatttcgatctgtccaagggcaagtgcgttcgattcatatacggcggttgcggaggcaatagaaataattttgagagtgaggactattgcatggcggtgtgcaaagctatgatccccccaacccctctccctacaaacgacgtggacgtctacttcgaaaccagcgccgatgacaatgagcacgcacgctttcagaaagccaaagaacagttggagatcaggcataggaatcggatggaccgtgtgaaaaaggagtgggaagaggccgagctacaagctaaaaacctgccaaaggcggagcggcaaacgcttatccagcacttccaggctatggtcaaggctctcgagaaagaagctgcaagtgagaagcagcaactggtggagacacacctcgctagagtggaagctatgctaaacgatagaaggcggatggcccttgagaactaccttgccgctcttcagagtgatccccctagaccacacagaattcttcaggccctccgccgttacgtgcgtgctgaaaataaagatcgcctgcatacgattcggcactatcagcacgtcttggcagtcgaccctgaaaaggcagctcagatgaagagccaggtaatgacccacctacacgttatcgaagagcggaggaatcagtccttgagcttactgtacaaggtcccatatgttgcacaggaaatacaggaagagatcgacgaattactgcaggagcagcgggctgacatggaccaatttactgctagtataagcgagacacctgtggacgtcagggtctcctcagaggaaagcgaggaaattccaccatttcatccctttcatcccttcccagccctaccggaaaatgaaggatccggtgtgggggagcaagacgggggacttatcggtgccgaggaaaaagtgatcaactctaagaataaagtggacgagaacatggttattgatgagactctcgatgtcaaggagatgatttttaacgctgaaagagtcggcggacttgaagaagagagggaaagtgttggacctctcagagaagatttctccctatcctcgtccgctctcatcgggctcttagtgatagccgtggcaattgcaaccgtcatagtcatctcactggtgatgctgagaaaaagacagtatggaacaatttctcacggcattgtcgaagttgaccctatgctaacccctgaggagcggcatcttaacaaaatgcagaatcatgggtatgaaaatcctacttacaaatacctggagcagatgcagatctag

SEQ ID NO: 53036 - DNA, 1977 bp, Artificial Sequence
  derived and/or modified sequence
atgtatccggagctgcagatcaccaatgtcatggaagctaatcaaagggtaagcatcgataactggtgccggcgagataagaagcagtgtaagtccaggttcgtcacaccatttaaatgtctcgttggagagtttgtgtccgatgtactcctggtcccagagaagtgtcagttctttcataaggagcgcatggaagtttgtgaaaaccatcaacactggcatacagtcgtgaaggaggcctgcctgacccaggggatgactctatactcctatggcatgctgttgccatgcggcgtagatcagtttcatgggaccgagtatgtgtgttgtcctcagacaaagatcatcggctccgtaagtaaagaagaggaagaggaagacgaggaggaggaggaggaggaggacgaggaagaggattacgatgtctacaaatctgaattccccacagaagctgacctggaggatttcaccgaggctgccgtggatgaggacgacgaggatgaggaggaaggtgaggaagtagtggaagatcgcgactattattacgacacattcaaaggggacgattataatgaagagaaccctactgaacctgggtcggacggaaccatgagcgataaggagatcactcacgacgtaaaggccgtttgttctcaggaagctatgacaggaccctgcagagccgtcatgcccaggtggtacttcgatctctccaaaggcaaatgtgtccgcttcatatatggtggctgtgggggtaatcggaacaatttcgaatcagaggattactgcatggcagtgtgcaaggctatgattccacccacccctttacccactaacgatgtagacgtgtactttgagacttcggccgatgataatgagcacgctcgcttccaaaaggccaaagagcagctcgagattagacaccgtaaccgcatggatcgcgtgaagaaagaatgggaggaggctgaactgcaggctaagaacttgccgaaagccgagcggcagactcttatccagcactttcaagccatggtcaaagccctggagaaggaggcggcatccgagaaacagcagctggtagagacacacctcgcaagggtggaggctatgctgaatgatcgtagaagaatggccctggaaaactacctcgctgccctgcagtcagacccaccgcgtccacaccggattctacaggctctgaggcggtatgtcagggccgagaacaaagatagactccataccattaggcattatcagcacgttctagcagtcgatcctgagaaagcagcccagatgaagagccaggtgatgacgcatctgcacgttattgaagagcgccgaaaccagtctcttagtctcctgtacaaggtcccttacgtcgcccaggagattcaggaagaaattgacgaactgctgcaggagcagagagcagacatggaccagttcacagcctccattagcgaaaccccggtagatgtgcgcgtgtcttccgaggaatccgaagagatcccacccttccacccgttccacccgtttccggcactgccagaaaacgaaggctctggtgtgggcgagcaggacgggggacttatcggggctgaggaaaaagtaattaactcaaagaataaggtggatgagaacatggtgatcgatgagacactggatgtcaaggagatgatttttaatgccgagagagtgggaggcctagaagaggagcgagagtccgtgggacccctgcgtgaggatttttcattgtccagtagcgccctgatcggccttctggtgattgccgtggccatagccaccgtgattgtgatctcacttgtcatgcttaggaaaagacaatatggtacaatatctcacggaattgtggaagtcgacccgatgctgacacctgaagagagacatctcaataagatgcagaaccatggttatgagaaccccacctacaagtacctggaacagatgcaaatttag

SEQ ID NO: 53037 - DNA, 2256 bp, Artificial Sequence
  derived and/or modified sequence
atggccgccaccggcaccgccgccgccgccgccaccggcagactgctgctgctgctgctggtgggcctgaccgcccccgccctggccctggccggctacatcgaggccctggccgccaacgccggcaccggcttcgccgtggccgagccccagatcgccatgttctgcggcaagctgaacatgcacgtgaacatccagaccggcaagtgggagcccgaccccaccggcaccaagagctgcttcgagaccaaggaggaggtgctgcagtactgccaggagatgtaccccgagctgcagatcaccaacgtgatggaggccaaccagagagtgagcatcgacaactggtgcagaagagacaagaagcagtgcaagagcagattcgtgacccccttcaagtgcctggtgggcgagttcgtgagcgacgtgctgctggtgcccgagaagtgccagttcttccacaaggagagaatggaggtgtgcgagaaccaccagcactggcacaccgtggtgaaggaggcctgcctgacccagggcatgaccctgtacagctacggcatgctgctgccctgcggcgtggaccagttccacggcaccgagtacgtgtgctgcccccagaccaagatcatcggcagcgtgagcaaggaggaggaggaggaggacgaggaggaggaggaggaggaggacgaggaggaggactacgacgtgtacaagagcgagttccccaccgaggccgacctggaggacttcaccgaggccgccgtggacgaggacgacgaggacgaggaggagggcgaggaggtggtggaggacagagactactactacgacaccttcaagggcgacgactacaacgaggagaaccccaccgagcccggcagcgacggcaccatgagcgacaaggagatcacccacgacgtgaaggccgtgtgcagccaggaggccatgaccggcccctgcagagccgtgatgcccagatggtacttcgacctgagcaagggcaagtgcgtgagattcatctacggcggctgcggcggcaacagaaacaacttcgagagcgaggactactgcatggccgtgtgcaaggccatgatcccccccacccccctgcccaccaacgacgtggacgtgtacttcgagaccagcgccgacgacaacgagcacgccagattccagaaggccaaggagcagctggagatcagacacagaaacagaatggacagagtgaagaaggagtgggaggaggccgagctgcaggccaagaacctgcccaaggccgagagacagaccctgatccagcacttccaggccatggtgaaggccctggagaaggaggccgccagcgagaagcagcagctggtggagacccacctggccagagtggaggccatgctgaacgacagaagaagaatggccctggagaactacctggccgccctgcagagcgacccccccagaccccacagaatcctgcaggccctgagaagatacgtgagagccgagaacaaggacagactgcacaccatcagacactaccagcacgtgctggccgtggaccccgagaaggccgcccagatgaagagccaggtgatgacccacctgcacgtgatcgaggagagaagaaaccagagcctgagcctgctgtacaaggtgccctacgtggcccaggagatccaggaggagatcgacgagctgctgcaggagcagagagccgacatggaccagttcaccgccagcatcagcgagacccccgtggacgtgagagtgagcagcgaggagagcgaggagatcccccccttccaccccttccaccccttccccgccctgcccgagaacgagggcagcggcgtgggcgagcaggacggcggcctgatcggcgccgaggagaaggtgatcaacagcaagaacaaggtggacgagaacatggtgatcgacgagaccctggacgtgaaggagatgatcttcaacgccgagagagtgggcggcctggaggaggagagagagagcgtgggccccctgagagaggacttcagcctgagcagcagcgccctgatcggcctgctggtgatcgccgtggccatcgccaccgtgatcgtgatcagcctggtgatgctgagaaagagacagtacggcaccatcagccacggcatcgtggaggtggaccccatgctgacccccgaggagagacacctgaacaagatgcagaaccacggctacgagaaccccacctacaagtacctggagcagatgcagatctag

SEQ ID NO: 53038 - DNA, 1977 bp, Artificial Sequence
  derived and/or modified sequence
atgtaccccgagctgcagatcaccaacgtgatggaggccaaccagagagtgagcatcgacaactggtgcagaagagacaagaagcagtgcaagagcagattcgtgacccccttcaagtgcctggtgggcgagttcgtgagcgacgtgctgctggtgcccgagaagtgccagttcttccacaaggagagaatggaggtgtgcgagaaccaccagcactggcacaccgtggtgaaggaggcctgcctgacccagggcatgaccctgtacagctacggcatgctgctgccctgcggcgtggaccagttccacggcaccgagtacgtgtgctgcccccagaccaagatcatcggcagcgtgagcaaggaggaggaggaggaggacgaggaggaggaggaggaggaggacgaggaggaggactacgacgtgtacaagagcgagttccccaccgaggccgacctggaggacttcaccgaggccgccgtggacgaggacgacgaggacgaggaggagggcgaggaggtggtggaggacagagactactactacgacaccttcaagggcgacgactacaacgaggagaaccccaccgagcccggcagcgacggcaccatgagcgacaaggagatcacccacgacgtgaaggccgtgtgcagccaggaggccatgaccggcccctgcagagccgtgatgcccagatggtacttcgacctgagcaagggcaagtgcgtgagattcatctacggcggctgcggcggcaacagaaacaacttcgagagcgaggactactgcatggccgtgtgcaaggccatgatcccccccacccccctgcccaccaacgacgtggacgtgtacttcgagaccagcgccgacgacaacgagcacgccagattccagaaggccaaggagcagctggagatcagacacagaaacagaatggacagagtgaagaaggagtgggaggaggccgagctgcaggccaagaacctgcccaaggccgagagacagaccctgatccagcacttccaggccatggtgaaggccctggagaaggaggccgccagcgagaagcagcagctggtggagacccacctggccagagtggaggccatgctgaacgacagaagaagaatggccctggagaactacctggccgccctgcagagcgacccccccagaccccacagaatcctgcaggccctgagaagatacgtgagagccgagaacaaggacagactgcacaccatcagacactaccagcacgtgctggccgtggaccccgagaaggccgcccagatgaagagccaggtgatgacccacctgcacgtgatcgaggagagaagaaaccagagcctgagcctgctgtacaaggtgccctacgtggcccaggagatccaggaggagatcgacgagctgctgcaggagcagagagccgacatggaccagttcaccgccagcatcagcgagacccccgtggacgtgagagtgagcagcgaggagagcgaggagatcccccccttccaccccttccaccccttccccgccctgcccgagaacgagggcagcggcgtgggcgagcaggacggcggcctgatcggcgccgaggagaaggtgatcaacagcaagaacaaggtggacgagaacatggtgatcgacgagaccctggacgtgaaggagatgatcttcaacgccgagagagtgggcggcctggaggaggagagagagagcgtgggccccctgagagaggacttcagcctgagcagcagcgccctgatcggcctgctggtgatcgccgtggccatcgccaccgtgatcgtgatcagcctggtgatgctgagaaagagacagtacggcaccatcagccacggcatcgtggaggtggaccccatgctgacccccgaggagagacacctgaacaagatgcagaaccacggctacgagaaccccacctacaagtacctggagcagatgcagatctag

SEQ ID NO: 53039 - protein, 695 aa, Artificial Sequence
  derived and/or modified sequence
MAATGTAAAAATGRLLLLLLVGLTAPALALAGYIEALAANAGTGFAVAEPQIAMFCGKLNMHVNIQTGKWEPDPTGTKSCFETKEEVLQYCQEMYPELQITNVMEANQRVSIDNWCRRDKKQCKSRFVTPFKCLVGEFVSDVLLVPEKCQFFHKERMEVCENHQHWHTVVKEACLTQGMTLYSYGMLLPCGVDQFHGTEYVCCPQTKIIGSVSKEEEEEDEEEEEEEDEEEDYDVYKSEFPTEADLEDFTEAAVDEDDEDEEEGEEVVEDRDYYYDTFKGDDYNEENPTEPGSDGTMSDKEITHDVKVPPTPLPTNDVDVYFETSADDNEHARFQKAKEQLEIRHRNRMDRVKKEWEEAELQAKNLPKAERQTLIQHFQAMVKALEKEAASEKQQLVETHLARVEAMLNDRRRMALENYLAALQSDPPRPHRILQALRRYVRAENKDRLHTIRHYQHVLAVDPEKAAQMKSQVMTHLHVIEERRNQSLSLLYKVPYVAQEIQEEIDELLQEQRADMDQFTASISETPVDVRVSSEESEEIPPFHPFHPFPALPENEGSGVGEQDGGLIGAEEKVINSKNKVDENMVIDETLDVKEMIFNAERVGGLEEERESVGPLREDFSLSSSALIGLLVIAVAIATVIVISLVMLRKRQYGTISHGIVEVDPMLTPEERHLNKMQNHGYENPTYKYLEQMQI

SEQ ID NO: 53040 - protein, 159 aa, Artificial Sequence [sequence omitted]

SEQ ID NO: 53041 - protein, 116 aa, Artificial Sequence
  derived and/or modified sequence
MAATGTAAAAATGRLLLLLLVGLTAPALALAGYIEALAANAGTGFAVAEPQIAMFCGKLNMHVNIQTGKWEPDPTGTKSCFETKEEVLQYCQEMYPELQITNSGWRCVRITSTGTR

SEQ ID NO: 53042 - protein, 551 aa, Artificial Sequence
  derived and/or modified sequence
MEVCENHQHWHTVVKEACLTQGMTLYSYGMLLPCGVDQFHGTEYVCCPQTKIIGSVSKEEEEEDEEEEEEEDEEEDYDVYKSEFPTEADLEDFTEAAVDEDDEDEEEGEEVVEDRDYYYDTFKGDDYNEENPTEPGSDGTMSDKEITHDVKVPPTPLPTNDVDVYFETSADDNEHARFQKAKEQLEIRHRNRMDRVKKEWEEAELQAKNLPKAERQTLIQHFQAMVKALEKEAASEKQQLVETHLARVEAMLNDRRRMALENYLAALQSDPPRPHRILQALRRYVRAENKDRLHTIRHYQHVLAVDPEKAAQMKSQVMTHLHVIEERRNQSLSLLYKVPYVAQEIQEEIDELLQEQRADMDQFTASISETPVDVRVSSEESEEIPPFHPFHPFPALPENEDTQPELYHPMKKGSGVGEQDGGLIGAEEKVINSKNKVDENMVIDETLDVKEMIFNAERVGGLEEERESVGPLREDFSLSSSALIGLLVIAVAIATVIVISLVMLRKRQYGTISHGIVEVDPMLTPEERHLNKMQNHGYENPTYKYLEQMQI

SEQ ID NO: 53043 - DNA, 2088 bp, Artificial Sequence
  derived and/or modified sequence
atggcagccactgggaccgcagcagctgccgcaactggccgtcttcttctcctgctgctagttggtctcaccgcaccggcactggctttagctggctacattgaagctctggccgcaaacgcgggcacgggatttgccgtagccgaaccgcagattgcaatgttctgcggaaagctgaacatgcatgttaacatccagactggcaagtgggaacctgacccaacaggaacaaaatcttgcttcgaaaccaaggaggaggttttgcaatactgccaggagatgtacccggagctacagataactaacgtaatggaggcaaaccaaagagtatcaatcgataactggtgtagaagagacaagaagcaatgtaagagtcgattcgtcacccctttcaaatgcctggttggggaattcgtatctgacgtgctgctcgttcctgaaaagtgccagtttttccacaaggaacgtatggaggtttgcgagaatcaccagcactggcataccgttgttaaggaggcttgtctcacacagggcatgacgctgtactcctatgggatgctgttgccctgcggagtggatcagttccacggcacagagtatgtctgttgccctcaaaccaaaattatcggttcggtttcgaaggaggaggaggaagaagacgaggaggaggaagaagaagaggacgaagaggaggattacgatgtgtacaaatctgaatttccaaccgaagcggatctcgaggacttcacggaagctgccgtggatgaggatgacgaagatgaagaagagggagaagaggtcgtcgaagaccgggattattattatgacaccttcaagggtgatgattataacgaagagaaccctacggaaccgggatcggatggtaccatgtccgataaagaaataactcacgacgtaaaagtgccccctacccctctgccaactaatgatgttgatgtctacttcgaaacgtctgctgatgataatgagcatgctcgatttcaaaaggcaaaagaacagctcgaaatccgacatcggaaccgaatggatcgtgtcaagaaggagtgggaagaagcagaactgcaagctaaaaacttgcctaaggcggagagacagaccctgatccaacactttcaggccatggtgaaagccctcgaaaaggaggccgcaagcgagaagcaacaacttgttgagacgcatttggctcgggtggaggcaatgcttaatgatagaaggaggatggcccttgagaattatctcgccgccctgcagagtgacccaccccggcctcatcgcattctccaggccctgcggaggtatgtgcgggccgagaataaggatcgacttcacacaatcagacattaccagcatgtgctggcagtagaccctgaaaaagcggcccagatgaagtcgcaggtgatgacacacctgcatgtgatagaggagaggagaaaccagagtctgagcttgctttataaagtgccgtatgttgcacaagagattcaggaggaaatcgatgaattgctccaggaacaacgcgcagatatggatcagttcacagccagtatatctgaaactccggttgatgtacgagtcagcagtgaagagagcgaggagattcctccattccacccattccacccattcccagctctgcctgaaaatgaaggcagcggagtgggcgaacaggatggaggtttgatcggcgccgaggagaaggtgatcaattctaaaaacaaagtggatgagaacatggtgatagacgagactctcgacgtgaaggagatgatctttaacgccgagcgagtcgggggtcttgaggaagaacgcgaaagtgtaggtcctctcagggaagactttagcctctctagttccgctcttattggtctcctggtcatagcagtggcaatcgctacagtgattgtgatctccctggtgatgcttcgcaaacggcagtacggcactatttctcatggcattgttgaggtggaccccatgttgactccagaagagcgccacctcaacaagatgcagaaccacggatacgaaaaccctacttataagtacctggaacagatgcagatatag

SEQ ID NO: 53044 - DNA, 1656 bp, Artificial Sequence
  derived and/or modified sequence
atggaagtgtgcgaaaatcaccaacattggcacactgtagtgaaagaggcttgccttacccaagggatgaccctatatagctatgggatgttgctgccttgtggcgtggatcagttccacggcactgagtatgtgtgctgtccccagactaaaatcattggtagcgtgtccaaggaggaggaagaggaggacgaagaagaagaagaggaggaggacgaggaggaggactacgacgtttacaaatccgaatttcccactgaggccgacctggaggacttcaccgaggccgcagttgatgaagacgacgaggacgaggaggagggggaggaggtggtggaggatcgcgactactactacgatactttcaagggcgacgactataacgaagagaatccaacggagccaggctctgacgggaccatgagcgacaaggaaattacccacgacgtgaaagtgccccctacaccgcttcctaccaatgatgtagacgtctacttcgagaccagcgccgatgacaatgagcatgcacggttccagaaggcgaaagaacagttggaaatccgtcatagaaaccgcatggacagggtcaaaaaggaatgggaagaggcagaattgcaggcaaagaatctgcccaaagccgagcgacagaccctcatccaacactttcaggcaatggtgaaagccttagaaaaggaagcagccagcgagaaacagcaattggtcgagacccacttggcccgggtcgaagccatgttaaacgacaggagacgaatggcacttgagaattacttggctgcactgcagtctgatccccctcggccacatcgtatcctccaggccctgcggcgctatgtccgagccgagaataaggatcgactccacactatccgacattatcagcacgtcctcgccgtggatccggagaaagctgcccaaatgaaatctcaggtgatgacacacctgcacgtaatagaagaacgacgcaaccagagcctgtctctcctatataaagttccttacgtggcacaggaaattcaggaggaaattgatgagctgctgcaggagcagcgagcggacatggaccagttcaccgcctccatatctgaaacccctgtagacgtaagggtaagttcagaggagtcagaggagatcccccctttccacccgttccatccatttcccgcgctgcctgagaatgaggacacgcaacctgagctttaccatccaatgaagaaaggctcaggggtgggcgaacaggatggcgggctaattggtgcggaagagaaagttatcaattctaagaacaaagtcgatgagaacatggttattgatgagacactcgatgtcaaagaaatgattttcaatgctgaaagggtgggagggcttgaagaagaaagggagtcagtggggccactgcgggaggacttctcactgagctcttccgcccttatcgggttactggtgatcgcggttgccattgcaactgtcatcgtcattagcctggtgatgctccgaaagcggcagtatggaaccatctcacacgggatcgtagaagtcgaccccatgttgactccagaggagcgtcatcttaacaagatgcagaatcacggttatgaaaacccgacatataagtacctggagcaaatgcagatttag

SEQ ID NO: 53045 - DNA, 2088 bp, Artificial Sequence
  derived and/or modified sequence
atggccgccaccggcacagctgctgctgctgccaccggccgcctgctgctgctgctgctggtgggcctgacagccccagccctggccctggccggctacatcgaggccctggccgccaatgccggcactggatttgctgtggccgagccccagatcgccatgttctgtgggaagctgaacatgcacgtgaacatccagacaggcaagtgggagccagaccccaccggcaccaagagctgctttgagaccaaggaggaggtgctgcagtactgccaggagatgtacccagagctgcagatcaccaacgtgatggaggccaaccagagggtgtccattgacaactggtgcagaagagacaagaagcagtgcaagagcagatttgtgacccccttcaagtgcctggtgggggagtttgtgtctgatgtgctgctggtgcctgagaagtgccagttcttccacaaggagaggatggaggtgtgtgagaaccaccagcactggcacacagtggtgaaggaggcctgcctgacccagggcatgaccctgtacagctatggcatgctgctgccctgtggggtggaccagttccacggcacagaatatgtgtgctgcccccagaccaagatcatcggctctgtgtccaaggaggaggaggaggaggatgaggaggaggaggaggaggaggatgaggaggaggactatgatgtgtacaagtctgagttccccacagaggccgacctggaggacttcacagaggccgctgtggatgaagatgatgaagatgaggaggagggggaggaggtggtggaggaccgggactactactatgacaccttcaagggagatgactacaatgaggagaaccccacagagcccggcagtgatggcaccatgtctgacaaggagatcacccatgatgtgaaggtgccccccacccccctgcccaccaatgatgtggatgtgtactttgagaccagcgcagatgacaatgaacatgcccgcttccagaaggccaaggagcagctggagatccgccacaggaacaggatggacagagtgaagaaggagtgggaggaggccgagctgcaggccaagaacctgcccaaggccgagcggcagaccctcatccagcacttccaggccatggtgaaggccctggagaaggaggccgccagcgagaagcagcagctggtggagacccacctggcccgggtggaggccatgctgaatgacagaagaaggatggccctggagaactacctggccgccctgcagagcgaccccccccggccccaccgcatcctgcaggccctgcggcgctacgtgcgggcagagaacaaggaccggctgcacaccatccgccactaccagcacgtgctggccgtggaccctgagaaggccgcccagatgaagagccaggtgatgacccacctgcacgtgattgaggagaggaggaaccagagcctgagcctgctgtacaaggtgccctacgtggcccaggagatccaggaggagattgatgagctgctgcaggagcagagagctgacatggaccagttcaccgccagcatcagcgagacccctgtggatgtgcgggtgagcagcgaggagagcgaggagatcccccccttccaccccttccaccccttccctgccctgcctgaaaatgaaggcagcggcgtgggggagcaggacggcggcctcatcggggctgaggagaaggtgatcaacagcaagaacaaggtggatgagaacatggtgattgatgagaccctggatgtgaaggagatgatcttcaatgctgagcgggtgggcggcctggaggaggagcgggagagcgtgggccccctgcgggaggacttcagcctgagcagcagcgccctgattggcctgctggtgattgctgtggccatcgccaccgtgattgtcatcagcctggtgatgctgaggaagaggcagtatggcaccatcagccacggcatcgtggaggtggaccccatgctgaccccagaggagcggcacctgaacaagatgcagaaccacggctatgagaaccccacctacaagtacctggagcagatgcagatctag

SEQ ID NO: 53046 - DNA, 1656 bp, Artificial Sequence
  derived and/or modified sequence
atggaggtgtgtgagaaccaccagcactggcacacagtggtgaaggaggcctgcctgacccagggcatgaccctgtacagctatggcatgctgctgccctgtggggtggaccagttccacggcacagaatatgtgtgctgcccccagaccaagatcatcggctctgtgtccaaggaggaggaggaggaggatgaggaggaggaggaggaggaggatgaggaggaggactatgatgtgtacaagtctgagttccccacagaggccgacctggaggacttcacagaggccgctgtggatgaagatgatgaagatgaggaggagggggaggaggtggtggaggaccgggactactactatgacaccttcaagggagatgactacaatgaggagaaccccacagagcccggcagtgatggcaccatgtctgacaaggagatcacccatgatgtgaaggtgccccccacccccctgcccaccaatgatgtggatgtgtactttgagaccagcgcagatgacaatgaacatgcccgcttccagaaggccaaggagcagctggagatccgccacaggaacaggatggacagagtgaagaaggagtgggaggaggccgagctgcaggccaagaacctgcccaaggccgagcggcagaccctcatccagcacttccaggccatggtgaaggccctggagaaggaggccgccagcgagaagcagcagctggtggagacccacctggcccgggtggaggccatgctgaatgacagaagaaggatggccctggagaactacctggccgccctgcagagcgaccccccccggccccaccgcatcctgcaggccctgcggcgctacgtgcgggcagagaacaaggaccggctgcacaccatccgccactaccagcacgtgctggccgtggaccctgagaaggccgcccagatgaagagccaggtgatgacccacctgcacgtgattgaggagaggaggaaccagagcctgagcctgctgtacaaggtgccctacgtggcccaggagatccaggaggagattgatgagctgctgcaggagcagagagctgacatggaccagttcaccgccagcatcagcgagacccctgtggatgtgcgggtgagcagcgaggagagcgaggagatcccccccttccaccccttccaccccttccctgccctgcctgaaaatgaagacacccagcctgagctgtaccaccccatgaagaagggcagcggcgtgggggagcaggacggcggcctcatcggggctgaggagaaggtgatcaacagcaagaacaaggtggatgagaacatggtgattgatgagaccctggatgtgaaggagatgatcttcaatgctgagcgggtgggcggcctggaggaggagcgggagagcgtgggccccctgcgggaggacttcagcctgagcagcagcgccctgattggcctgctggtgattgctgtggccatcgccaccgtgattgtcatcagcctggtgatgctgaggaagaggcagtatggcaccatcagccacggcatcgtggaggtggaccccatgctgaccccagaggagcggcacctgaacaagatgcagaaccacggctatgagaaccccacctacaagtacctggagcagatgcagatctag

SEQ ID NO: 53047 - DNA, 2088 bp, Artificial Sequence
  derived and/or modified sequence
atggccgccaccggcaccgccgccgccgccgccaccggccggctgcttctgctcttgttggtgggacttactgcccccgccttagctctggcaggttacattgaagccctggctgccaatgcagggactgggttcgccgtggccgaaccacagattgctatgttctgtggtaaattaaatatgcacgtgaatattcagacggggaaatgggagccggaccccaccggtaccaaatcatgcttcgagactaaagaggaggtcttacaatactgccaggaaatgtaccccgaactgcagatcacaaacgttatggaggccaatcagcgggtatccatcgacaattggtgcaggcgggataaaaaacagtgtaaatcaaggtttgtgactcctttcaaatgtcttgtgggtgaatttgtaagtgacgtattactggtgcctgagaagtgccagtttttccacaaggagcgcatggaggtatgcgaaaatcatcagcattggcacacagtggtcaaggaggcctgtctgacacaggggatgaccctatactcctacgggatgctcctgccttgtggggtcgaccaatttcacggtactgagtacgtatgttgccctcagactaaaattattgggagtgtgtccaaagaggaggaggaagaagatgaggaagaagaagaagaggaggacgaagaagaagactatgatgtatataagtccgagtttcctaccgaggcagatctggaggatttcaccgaggctgcagtggacgaggatgatgaggacgaagaggagggcgaggaagtggtcgaagacagggactattactatgacacgttcaaaggggacgactataacgaggagaatcccaccgagccaggatccgatggcaccatgagcgacaaagagatcacacacgatgtaaaagtgcctcccacacccctccctacaaatgacgtagatgtgtatttcgagacatccgccgatgataacgagcatgcgcggttccagaaagcaaaggagcaactggaaatacgccaccggaaccggatggaccgggtcaaaaaggagtgggaagaagctgagctccaggcgaagaacctgcccaaggctgagcgccagactctgatccagcattttcaggccatggtcaaggctctggagaaagaggcggctagtgagaaacagcaactggtggagacccatctcgccagagtcgaagccatgcttaacgaccggaggaggatggcgttagagaattacttggcagcgctgcagtcggatccaccccgtccccatagaatcctgcaagcgcttcgaagatacgtgagagctgagaacaaagatagactgcatactattaggcactaccagcatgtgctcgcagtcgacccagaaaaagcagctcaaatgaagtcccaggtcatgacccacttacacgtgatcgaagagagacgtaatcagagcctgtcgcttctgtataaagtgccgtatgtggcccaggagatacaagaggagattgacgaacttctacaggagcaacgggccgacatggaccagttcacggcttccatcagtgaaactcctgtggatgttcgagtgtcttcggaagagtcagaagaaatccccccttttcacccgtttcaccccttcccagccctgccagagaatgaagggtccggtgtgggcgaacaagatggcgggctgattggggccgaggagaaggtgattaattctaagaacaaagtggacgagaatatggttatagatgaaactctagatgtcaaggaaatgatttttaacgctgagagagttggcgggcttgaggaggaacgggaatccgtgggtcccctccgcgaggacttttcactcagcagcagcgcgctgatcggactactggttattgcagttgccatcgcgacagtgatcgtaatctcattggtgatgctgcgtaagcgccagtatggaaccatatcccacggcattgtggaggtggaccctatgcttacccccgaggagcgtcacttaaataaaatgcagaatcatggatatgagaacccgacttacaaatatttggaacagatgcagatctag

SEQ ID NO: 53048 - DNA, 1656 bp, Artificial Sequence
  derived and/or modified sequence
atggaggtgtgcgagaaccaccagcactggcacaccgtggtgaaggaggcctgcctgactcaggggatgaccctgtattcgtatggcatgctgctgccttgtggcgtcgatcagtttcacgggactgagtacgtctgctgtccacagactaagattatcggatccgtcagcaaagaggaggaggaagaggacgaagaggaggaggaagaggaagacgaggaggaagattatgacgtctacaaatctgagttccccacggaggccgatttggaggatttcacggaggccgctgtggatgaggacgatgaggatgaggaggagggggaggaggttgtggaagatcgcgactactactatgacacattcaagggcgatgattataacgaagagaacccaaccgagcccggcagcgacggtaccatgtccgacaaggagataacacatgacgtgaaggtgccccctacccctctccctacgaacgatgtggacgtctatttcgagacctctgccgatgataacgagcatgcaagattccagaaagcgaaagaacagctggagattagacaccgcaatagaatggaccgcgtcaagaaggagtgggaagaagctgagcttcaggcgaagaacctgcctaaggcagagcgccaaaccttaatacagcactttcaggctatggttaaggcactagaaaaggaagccgcgtccgaaaaacagcagctcgtggaaacacatttggcacgagttgaggctatgttaaatgataggagacggatggcccttgagaattatctggctgccctccaatcagacccccctaggcctcatcggatcttgcaggcactacgacggtatgttagggctgagaataaggatagactgcacacaattcgccattaccagcatgtacttgcagtcgatccagaaaaggccgcacagatgaaatcacaagtgatgacacacctgcatgtgatcgaggaaagaaggaatcagtccctaagcctgctctacaaggttccttatgtcgcccaggagattcaggaggagattgacgaacttctgcaggaacaacgtgccgacatggatcagtttaccgccagcatcagtgaaacccctgtcgatgtgagagtgtccagcgaggagagcgaagagatcccaccattccacccctttcatccctttccagccctgcctgagaatgaagatacgcaacccgaactgtaccacccaatgaagaaaggtagcggggtcggtgagcaggacggcggactcatcggtgccgaagaaaaggtgatcaatagtaagaacaaggtcgatgagaacatggtgattgacgagacacttgatgtcaaggaaatgattttcaatgccgagcgcgtcggcggactcgaggaggagagagagagcgttggacctttgcgtgaggatttcagtctcagcagctcagcactgatcggattactcgtcattgcggttgccattgctaccgtgatcgtgattagcttggtaatgcttagaaaaaggcagtatgggaccatcagccacggtatcgtggaggtcgatcctatgcttactcctgaggagcggcacctcaacaaaatgcagaaccacggttacgaaaatcccacttataaatacctggagcagatgcagatttag

SEQ ID NO: 53049 - DNA, 2530 bp, Artificial Sequence
  derived and/or modified sequence
agatgcttctgggtcgcggtgtgctaagcgaggagtccgagtgtgtgagcttgagagccgcgcgctagagcgacccggcgagggatggcggccaccgggaccgcggccgccgcagccacgggcaggctcctgcttctgctgctggtggggctcacggcgcctgccttggcgctggccggctacatcgaggctcttgcagccaatgccggaacaggatttgctgttgctgagcctcaaatcgcaatgttttgtgggaagttaaatatgcatgtgaacattcagactgggaaatgggaacctgatccaacaggcaccaagagctgctttgaaacaaaagaagaagttcttcagtactgtcaggagatgtatccagagctacagatcacaaatgtgatggaggcaaaccagcgggttagtattgacaactggtgccggagggacaaaaagcaatgcaagagtcgctttgttacacctttcaagtgtctcgtgggtgaatttgtaagtgatgtcctgctagttccagaaaagtgccagtttttccacaaagagcggatggaggtgtgtgagaatcaccagcactggcacacggtagtcaaagaggcatgtctgactcagggaatgaccttatatagctacggcatgctgctcccatgtggggtagaccagttccatggcactgaatatgtgtgctgccctcagacaaagattattggatctgtgtcaaaagaagaggaagaggaagatgaagaggaagaggaagaggaagatgaagaggaagactatgatgtttataaaagtgaatttcctactgaagcagatctggaagacttcacagaagcagctgtggatgaggatgatgaggatgaggaagaaggggaggaagtggtggaggaccgagattactactatgacaccttcaaaggagatgactacaatgaggagaatcctactgaacccggcagcgacggcaccatgtcagacaaggaaattactcatgatgtcaaagttcctccaactcctctgccaaccaatgatgttgatgtgtatttcgagacctctgcagatgataatgagcatgctcgcttccagaaggctaaggagcagctggagattcggcaccgcaaccgaatggacagggtaaagaaggaatgggaagaggcagagcttcaagctaagaacctccccaaagcagagaggcagactctgattcagcacttccaagccatggttaaagctttagagaaggaagcagccagtgagaagcagcagctggtggagacccacctggcccgagtggaagctatgctgaatgaccgccgtcggatggctctggagaactacctggctgccttgcagtctgacccgccacggcctcatcgcattctccaggccttacggcgttatgtccgtgctgagaacaaagatcgcttacataccatccgtcattaccagcatgtgttggctgttgacccagaaaaggcggcccagatgaaatcccaggtgatgacacatctccacgtgattgaagaaaggaggaaccaaagcctctctctgctctacaaagtaccttatgtagcccaagaaattcaagaggaaattgatgagctccttcaggagcagcgtgcagatatggaccagttcactgcctcaatctcagagacccctgtggacgtccgggtgagctctgaggagagtgaggagatcccaccgttccaccccttccaccccttcccagccctacctgagaacgaaggatctggagtgggagagcaggatgggggactgatcggtgccgaagagaaagtgattaacagtaagaataaagtggatgaaaacatggtcattgacgagactctggatgttaaggaaatgattttcaatgccgagagagttggaggcctcgaggaagagcgggaatccgtgggcccactgcgggaggacttcagtctgagtagcagtgctctcattggcctgctggtcatcgcagtggccattgccacggtcatcgtcatcagcctggtgatgctgaggaagaggcagtatggcaccatcagccacgggatcgtggaggttgatccaatgctcaccccagaagagcgtcacctgaacaagatgcagaaccatggctatgagaaccccacctacaaatacctggagcagatgcagatttaggtggcagggagcgcggcagccctggcggagggatgcaggtgggccggaagatcccacgattccgatcgactgccaagcagcagccgctgccaggggctgcgtctgacatcctgacctcctggactgtaggactatataaagtactactgtagaactgcaatttccattcttttaaatgggtgaaaaatggtaatataacaatatatgatatataaaccttaaatgaaaaaaatgatctattgcagatatttgatgtagttttcttttttaaattaatcagaaaccccacttccattgtattgtctgacacatgctctcaatatataataaatgggaaatgtcgattttcaataataga

SEQ ID NO: 53050 - DNA, 1984 bp, Artificial Sequence
  derived and/or modified sequence
agatgcttctgggtcgcggtgtgctaagcgaggagtccgagtgtgtgagcttgagagccgcgcgctagagcgacccggcgagggatggcggccaccgggaccgcggccgccgcagccacgggcaggctcctgcttctgctgctggtggggctcacggcgcctgccttggcgctggccggctacatcgagtgggtgaatttgtaagtgatgtcctgctagttccagaaaagtgccagtttttccacaaagagcggatggaggtgtgtgagaatcaccagcactggcacacggtagtcaaagaggcatgtctgactcagggaatgaccttatatagctacggcatgctgctcccatgtggggtagaccagttccatggcactgaatatgtgtgctgccctcagacaaagattattggatctgtgtcaaaagaagaggaagaggaagatgaagaggaagaggaagaggaagatgaagaggaagactatgatgtttataaaagtgaatttcctactgaagcagatctggaagacttcacagaagcagctgtggatgaggatgatgaggatgaggaagaaggggaggaagtggtggaggaccgagattactactatgacaccttcaaaggagatgactacaatgaggagaatcctactgaacccggcagcgacggcaccatgtcagacaaggaaattactcatgatgtcaaagttcctccaactcctctgccaaccaatgatgttgatgtgtatttcgagacctctgcagatgataatgagcatgctcgcttccagaaggctaaggagcagctggagattcggcaccgcaaccgaatggacagggtaaagaaggaatgggaagaggcagagcttcaagctaagaacctccccaaagcagagaggcagactctgattcagcacttccaagccatggttaaagctttagagaaggaagcagccagtgagaagcagcagctggtggagacccacctggcccgagtggaagctatgctgaatgaccgccgtcggatggctctggagaactacctggctgccttgcagtctgacccgccacggcctcatcgcattctccaggccttacggcgttatgtccgtgctgagaacaaagatcgcttacataccatccgtcattaccagcatgtgttggctgttgacccagaaaaggcggcccagatgaaatcccaggtgatgacacatctccacgtgattgaagaaaggaggaaccaaagcctctctctgctctacaaagtaccttatgtagcccaagaaattcaagaggaaattgatgagctccttcaggagcagcgtgcagatatggaccagttcactgcctcaatctcagagacccctgtggacgtccgggtgagctctgaggagagtgaggagatcccaccgttccaccccttccaccccttcccagccctacctgagaacgaagacactcagccggagttgtaccacccaatgaaaaaaggatctggagtgggagagcaggatgggggactgatcggtgccgaagagaaagtgattaacagtaagaataaagtggatgaaaacatggtcattgacgagactctggatgttaaggaaatgattttcaatgccgagagagttggaggcctcgaggaagagcgggaatccgtgggcccactgcgggaggacttcagtctgagtagcagtgctctcattggcctgctggtcatcgcagtggccattgccacggtcatcgtcatcagcctggtgatgctgaggaagaggcagtatggcaccatcagccacgggatcgtggaggttgatccaatgctcaccccagaagagcgtcacctgaacaagatgcagaaccatggctatgagaaccccacctacaaatacctggagcagatgcagatttaggtggcagggagcgcggcagccctggcggagggatgcaggtgggccggaagatcccacgattccgatcgactgcc

SEQ ID NO: 53051 - DNA, 2088 bp, Artificial Sequence
  derived and/or modified sequence
atggctgccaccggaacagccgctgctgctgccactggacgtcttctcctgctgctgctggtgggactgaccgctcccgctcttgccctggccggatacatcgaagctctagccgctaatgccggtactggatttgccgtggctgaaccgcagatcgctatgttctgcggcaagctgaacatgcatgtgaatattcagacagggaagtgggaaccggatccaactgggaccaaatcctgttttgaaacaaaagaggaggtattgcagtactgtcaggaaatgtatcctgagctccagatcacgaacgtaatggaggctaaccagcgggtttctatcgacaattggtgtagacgggataaaaaacagtgcaagagtcgctttgtgaccccattcaagtgtttggtgggagagttcgtgtcagacgtattgttagtgcctgaaaaatgtcagttcttccacaaagaacggatggaggtgtgcgagaatcatcagcactggcatacagtggtcaaggaagcatgtttaacacaaggcatgactctatacagttatggtatgctactgccctgtggagtggaccaattccatgggaccgagtatgtgtgctgcccacaaactaaaatcatcgggtctgttagcaaggaggaggaggaggaggatgaggaagaggaggaagaagaggatgaggaggaggactatgatgtgtacaagtcagagttcccgacagaagccgatcttgaggatttcacagaagctgcggttgacgaagatgatgaggacgaggaggagggtgaagaagtggtggaggatagggactattactacgacaccttcaaaggagacgactacaacgaggagaatccgacagaaccagggagcgatggaactatgagcgacaaggagatcacccacgatgtgaaagtgccccctacacctcttcctacaaatgacgtggacgtctacttcgaaacaagcgccgatgacaatgagcatgccaggttccagaaagctaaggaacagttagaaatacggcatagaaacagaatggatagagtaaaaaaggaatgggaagaggctgagttacaggctaaaaatctgcccaaagcagaaagacaaactctgatccagcacttccaggccatggtcaaggcactggaaaaggaagccgcttcagagaaacaacagctggtggaaacacatctcgcccgagtcgaggcaatgctgaatgacaggaggaggatggcactggaaaactatctggcagcactccaatcagaccccccaagaccacacaggatcctgcaagcccttaggcggtacgtgagggccgagaacaaggatagattgcacaccatccgccactaccagcatgtgctggctgtggaccctgagaaggccgcacagatgaagagccaagttatgactcacctgcatgtgatcgaggagcgcagaaaccagtctctgagcttgctctacaaagtgccctatgttgcgcaggaaatccaggaagaaatcgacgagctcctgcaggaacagagggcggacatggaccagtttacggcaagtattagtgagacaccagtggacgtacgggtgtcgagcgaggagtccgaagaaatcccgcctttccatcctttccatcctttcccagccctgcccgaaaatgagggatctggcgtgggcgagcaggatggagggctgataggcgctgaggagaaggtgatcaactctaagaataaggtcgatgagaacatggtgatcgacgagacgctggacgttaaggaaatgattttcaacgctgaaagggtcggtggcttggaggaagaacgtgagagcgtagggcctttgagagaggatttttctctatccagttctgccctgatcgggctgctggtcatcgcggtggcaatcgccaccgttattgtgatctctttggtgatgcttaggaagcgccagtacggtactataagccacggaatagtcgaggttgaccctatgctgaccccggaggaacggcatctgaacaagatgcagaaccacggatatgagaatccaacctataagtatctggagcagatgcagatctag

SEQ ID NO: 53052 - DNA, 1656 bp, Artificial Sequence
  derived and/or modified sequence
atggaggtgtgcgagaaccatcagcattggcacactgtcgtgaaggaagcctgtctgacacaggggatgacactgtacagctacggcatgcttttgccatgtggggtggatcaattccacggaaccgaatatgtgtgctgtccacagacaaaaattatcggtagtgtttcgaaggaggaggaggaggaggacgaagaggaagaggaggaggaagacgaggaagaggattatgatgtctataaatcagagttccctactgaggcggacttagaggatttcaccgaagcggcagtagacgaagatgacgaagacgaagaagaaggagaagaagtagtagaagacagagactattactacgatacgttcaaaggtgacgattataatgaagaaaaccccaccgagcccggaagtgatggtactatgagcgacaaagagataactcacgatgtaaaggtaccgccaactccccttccgactaacgatgtcgatgtgtacttcgagacaagcgccgatgacaatgagcacgcccgtttccagaaggccaaggagcagcttgagatacgtcatcggaaccggatggacagagttaagaaggaatgggaagaagcggaattacaggccaagaacctgccaaaggccgagaggcagaccctgatccagcattttcaagccatggttaaagccctggagaaggaggccgcatccgagaagcagcagttggtcgaaacccatctcgcccgagttgaggcaatgttgaacgatcgtcgtagaatggccctcgagaattacctggccgcactccaatccgatcctccacgcccacacagaattctccaggcccttcgtcggtatgtcagagcggaaaacaaggatcggctgcatacaatccggcattaccagcatgtgctggcagtggatcccgaaaaagctgcgcaaatgaagagccaggtgatgacacacctacacgtgatcgaagagcgcagaaatcagtcactctcactgctttacaaggttccatatgtggcgcaggagatccaggaggaaatagatgagctgctgcaggagcagagagcagacatggatcaatttacagcctcaataagtgagacaccggtggacgtacgcgtatcctccgaagagagcgaggagattccccctttccacccattccaccccttcccagcactgcctgaaaacgaggacactcagccagagctttaccacccaatgaagaagggctcaggtgtgggagagcaggacgggggactgattggagccgaagaaaaagtgattaacagcaagaataaagtggacgaaaatatggtaattgacgagactttggatgtgaaagaaatgatctttaacgcagaacgagttggtggcctcgaggaagaacgggaatctgtggggccactcagagaggatttttccctttcgtcttccgcccttataggactgttagtgattgccgttgccatagccaccgtgatcgttatcagtttggtcatgctccgcaaacgccagtacggaaccatctcacacggaatagtggaagtcgacccaatgcttacacctgaagagcgccacctgaataagatgcaaaatcatgggtacgagaatcctacttacaagtacctggagcaaatgcaaatatag

SEQ ID NO: 53053 - DNA, 2088 bp, Artificial Sequence
  derived and/or modified sequence
atggccgccaccggcaccgccgccgccgccgccaccggcagactgctgctgctgctgctggtgggcctgaccgcccccgccctggccctggccggctacatcgaggccctggccgccaacgccggcaccggcttcgccgtggccgagccccagatcgccatgttctgcggcaagctgaacatgcacgtgaacatccagaccggcaagtgggagcccgaccccaccggcaccaagagctgcttcgagaccaaggaggaggtgctgcagtactgccaggagatgtaccccgagctgcagatcaccaacgtgatggaggccaaccagagagtgagcatcgacaactggtgcagaagagacaagaagcagtgcaagagcagattcgtgacccccttcaagtgcctggtgggcgagttcgtgagcgacgtgctgctggtgcccgagaagtgccagttcttccacaaggagagaatggaggtgtgcgagaaccaccagcactggcacaccgtggtgaaggaggcctgcctgacccagggcatgaccctgtacagctacggcatgctgctgccctgcggcgtggaccagttccacggcaccgagtacgtgtgctgcccccagaccaagatcatcggcagcgtgagcaaggaggaggaggaggaggacgaggaggaggaggaggaggaggacgaggaggaggactacgacgtgtacaagagcgagttccccaccgaggccgacctggaggacttcaccgaggccgccgtggacgaggacgacgaggacgaggaggagggcgaggaggtggtggaggacagagactactactacgacaccttcaagggcgacgactacaacgaggagaaccccaccgagcccggcagcgacggcaccatgagcgacaaggagatcacccacgacgtgaaggtgccccccacccccctgcccaccaacgacgtggacgtgtacttcgagaccagcgccgacgacaacgagcacgccagattccagaaggccaaggagcagctggagatcagacacagaaacagaatggacagagtgaagaaggagtgggaggaggccgagctgcaggccaagaacctgcccaaggccgagagacagaccctgatccagcacttccaggccatggtgaaggccctggagaaggaggccgccagcgagaagcagcagctggtggagacccacctggccagagtggaggccatgctgaacgacagaagaagaatggccctggagaactacctggccgccctgcagagcgacccccccagaccccacagaatcctgcaggccctgagaagatacgtgagagccgagaacaaggacagactgcacaccatcagacactaccagcacgtgctggccgtggaccccgagaaggccgcccagatgaagagccaggtgatgacccacctgcacgtgatcgaggagagaagaaaccagagcctgagcctgctgtacaaggtgccctacgtggcccaggagatccaggaggagatcgacgagctgctgcaggagcagagagccgacatggaccagttcaccgccagcatcagcgagacccccgtggacgtgagagtgagcagcgaggagagcgaggagatcccccccttccaccccttccaccccttccccgccctgcccgagaacgagggcagcggcgtgggcgagcaggacggcggcctgatcggcgccgaggagaaggtgatcaacagcaagaacaaggtggacgagaacatggtgatcgacgagaccctggacgtgaaggagatgatcttcaacgccgagagagtgggcggcctggaggaggagagagagagcgtgggccccctgagagaggacttcagcctgagcagcagcgccctgatcggcctgctggtgatcgccgtggccatcgccaccgtgatcgtgatcagcctggtgatgctgagaaagagacagtacggcaccatcagccacggcatcgtggaggtggaccccatgctgacccccgaggagagacacctgaacaagatgcagaaccacggctacgagaaccccacctacaagtacctggagcagatgcagatctag

SEQ ID NO: 53054 - DNA, 1656 bp, Artificial Sequence
  derived and/or modified sequence
atggaggtgtgcgagaaccaccagcactggcacaccgtggtgaaggaggcctgcctgacccagggcatgaccctgtacagctacggcatgctgctgccctgcggcgtggaccagttccacggcaccgagtacgtgtgctgcccccagaccaagatcatcggcagcgtgagcaaggaggaggaggaggaggacgaggaggaggaggaggaggaggacgaggaggaggactacgacgtgtacaagagcgagttccccaccgaggccgacctggaggacttcaccgaggccgccgtggacgaggacgacgaggacgaggaggagggcgaggaggtggtggaggacagagactactactacgacaccttcaagggcgacgactacaacgaggagaaccccaccgagcccggcagcgacggcaccatgagcgacaaggagatcacccacgacgtgaaggtgccccccacccccctgcccaccaacgacgtggacgtgtacttcgagaccagcgccgacgacaacgagcacgccagattccagaaggccaaggagcagctggagatcagacacagaaacagaatggacagagtgaagaaggagtgggaggaggccgagctgcaggccaagaacctgcccaaggccgagagacagaccctgatccagcacttccaggccatggtgaaggccctggagaaggaggccgccagcgagaagcagcagctggtggagacccacctggccagagtggaggccatgctgaacgacagaagaagaatggccctggagaactacctggccgccctgcagagcgacccccccagaccccacagaatcctgcaggccctgagaagatacgtgagagccgagaacaaggacagactgcacaccatcagacactaccagcacgtgctggccgtggaccccgagaaggccgcccagatgaagagccaggtgatgacccacctgcacgtgatcgaggagagaagaaaccagagcctgagcctgctgtacaaggtgccctacgtggcccaggagatccaggaggagatcgacgagctgctgcaggagcagagagccgacatggaccagttcaccgccagcatcagcgagacccccgtggacgtgagagtgagcagcgaggagagcgaggagatcccccccttccaccccttccaccccttccccgccctgcccgagaacgaggacacccagcccgagctgtaccaccccatgaagaagggcagcggcgtgggcgagcaggacggcggcctgatcggcgccgaggagaaggtgatcaacagcaagaacaaggtggacgagaacatggtgatcgacgagaccctggacgtgaaggagatgatcttcaacgccgagagagtgggcggcctggaggaggagagagagagcgtgggccccctgagagaggacttcagcctgagcagcagcgccctgatcggcctgctggtgatcgccgtggccatcgccaccgtgatcgtgatcagcctggtgatgctgagaaagagacagtacggcaccatcagccacggcatcgtggaggtggaccccatgctgacccccgaggagagacacctgaacaagatgcagaaccacggctacgagaaccccacctacaagtacctggagcagatgcagatctag

SEQ ID NO: 53055 - protein, 522 aa, Artificial Sequence
  derived and/or modified sequence
MAATGTAAAAATGRLLLLLLVGLTAPALALAGYIEALAANAGTGFAVAEPQIAMFCGKLNMHVNIQTGKWEPDPTGTKSCFETKEEVLQYCQEMYPELQITNVMEANQRVSIDNWCRRDKKQCKSRFVTPFKCLVPPTPLPTNDVDVYFETSADDNEHARFQKAKEQLEIRHRNRMDRVKKEWEEAELQAKNLPKAERQTLIQHFQAMVKALEKEAASEKQQLVETHLARVEAMLNDRRRMALENYLAALQSDPPRPHRILQALRRYVRAENKDRLHTIRHYQHVLAVDPEKAAQMKSQVMTHLHVIEERRNQSLSLLYKVPYVAQEIQEEIDELLQEQRADMDQFTASISETPVDVRVSSEESEEIPPFHPFHPFPALPENEGSGVGEQDGGLIGAEEKVINSKNKVDENMVIDETLDVKEMIFNAERVGGLEEERESVGPLREDFSLSSSALIGLLVIAVAIATVIVISLVMLRKRQYGTISHGIVEVDPMLTPEERHLNKMQNHGYENPTYKYLEQMQI

SEQ ID NO: 53056 - DNA, 1569 bp, Artificial Sequence
  derived and/or modified sequence
atggctgccaccggcactgccgcagccgctgctactgggcgcttgctcttactgctgttggtggggctcactgctcccgcactggctctcgcaggctatattgaggcactcgctgcaaacgctggaacgggatttgcagtcgccgaaccccagattgccatgttttgtggcaaactgaacatgcatgtgaatatacagactgggaagtgggagcctgatcccacgggcactaagtcgtgttttgagacaaaggaggaggttctacagtactgccaggagatgtaccccgagctccagatcactaatgtcatggaggctaaccaacgggtctctatcgataactggtgccgaagggacaaaaaacagtgtaagtctcgattcgtgacaccatttaaatgcctcgtacccccaactccactccctacaaatgatgtggatgtctattttgagacctccgctgacgataacgagcatgcccggttccaaaaggccaaagagcaactggagatccgacatagaaataggatggaccgtgtgaagaaggaatgggaggaggcagaactccaggcgaagaacctgcccaaggctgagcgccagacccttatacagcacttccaggctatggtcaaagccttagagaaggaagcagcgagcgaaaagcagcaactagttgaaacacacctggcacgggtagaagcgatgctgaatgaccgacggcgcatggcattggaaaactacctggcggccttgcaatcagatccccctcgcccccatcgcattctacaggctctgcgccgctatgtgcgggccgaaaataaagatcgtctccatactatccgccattaccagcatgtgttggcagtcgatccggagaaggctgctcagatgaagagccaggtgatgacgcacctgcacgtgatcgaggagcggaggaatcagtccctgagtctcctttacaaggtcccatatgtggctcaggagattcaggaggagatcgatgaattactgcaggagcagagagcggatatggatcaatttacagcgagcattagcgaaaccccagttgacgtgcgcgtgagctcggaggagtcagaagagatcccccctttccaccccttccacccgttcccagccctaccggaaaatgagggttccggcgtgggggaacaggatgggggactgataggagccgaggagaaggtgatcaattccaaaaataaggtagatgagaatatggtgatcgatgaaactcttgatgtgaaggaaatgatcttcaacgccgaaagggtgggtgggttggaggaggagagagagagcgtggggcccctgagggaagatttctccctgagctcctccgcattgatcggtctgctcgtgatcgctgttgctatcgccacagttatcgtgataagcttggttatgctccgcaaaagacagtacggaaccatcagccacggcatcgtggaagtggacccaatgctcacacctgaagagcggcatctcaacaaaatgcagaatcacgggtatgaaaaccctacctataaatatctcgagcagatgcagatatag

SEQ ID NO: 53057 - DNA, 480 bp, Artificial Sequence
  derived and/or modified sequence
atggcagctaccggtacagccgcagccgctgccaccgggaggctcctgttgctcctgctggtcggcctgactgcgcctgcacttgcccttgctggctacattgaatctagccagatctgctgctccccgagaagctttcttatcagcactcttaagtgtttgatcgtcgacgagatcaatgcactcgccgcaaatgctggcactgggtttgccgtggctgaaccacagattgctatgttctgtggcaagcttaatatgcacgtgaacattcaaaccggcaagtgggaacccgaccctaccggaactaagtcttgcttcgaaactaaagaagaagttttacagtattgtcaggagatgtatcccgaactgcagatcactaacgtgatggaagcaaaccagagagtgtctatcgataattggtgtagaagagataagaagcagtgtaagtcacgatttgtgaccccattcaaatgcttatag

SEQ ID NO: 53058 - DNA, 351 bp, Artificial Sequence
  derived and/or modified sequence
atggctgcaaccggaaccgctgctgcagctgccacagggcgtctgctcctccttctgctagtgggtctgactgctccagcactggccctggccggatatattgaagcccttgcggcaaatgctggaaccggctttgccgtcgccgagccacagatcgctatgttttgtgggaaattaaacatgcatgtgaacatccaaacggggaaatgggagccagacccgactgggacaaaatcttgtttcgaaactaaggaggaagtgctccaatactgtcaagaaatgtatcctgaactgcaaataactaactcgggctggagatgcgtgcggattactagcacggggacacgttag

SEQ ID NO: 53059 - DNA, 1569 bp, Artificial Sequence
  derived and/or modified sequence
atggccgccaccggcacagctgctgctgctgccaccggccgcctgctgctgctgctgctggtgggcctgacagccccagccctggccctggccggctacatcgaggccctggccgccaatgccggcactggatttgctgtggccgagccccagatcgccatgttctgtgggaagctgaacatgcacgtgaacatccagacaggcaagtgggagccagaccccaccggcaccaagagctgctttgagaccaaggaggaggtgctgcagtactgccaggagatgtacccagagctgcagatcaccaacgtgatggaggccaaccagagggtgtccattgacaactggtgcagaagagacaagaagcagtgcaagagcagatttgtgacccccttcaagtgcctggtgccccccacccccctgcccaccaatgatgtggatgtgtactttgagaccagcgcagatgacaatgagcacgcccgcttccagaaggccaaggagcagctggagatccgccacaggaacaggatggacagagtgaagaaggagtgggaggaggccgagctgcaggccaagaacctgcccaaggccgagcggcagaccctcatccagcacttccaggccatggtgaaggccctggagaaggaggccgccagcgagaagcagcagctggtggagacccacctggcccgggtggaggccatgctgaatgacagaagaaggatggccctggagaactacctggccgccctgcagagcgaccccccccggccccaccgcatcctgcaggccctgcggcgctacgtgcgggcagagaacaaggaccggctgcacaccatccgccactaccagcacgtgctggccgtggaccctgagaaggccgcccagatgaagagccaggtgatgacccacctgcacgtgattgaggagaggaggaaccagagcctgagcctgctgtacaaggtgccctacgtggcccaggagatccaggaggagattgatgagctgctgcaggagcagagagctgacatggaccagttcaccgccagcatcagcgagacccctgtggatgtgcgggtgtcctctgaggagagcgaggagatcccccccttccaccccttccaccccttccctgccctgcctgaaaatgaaggcagcggcgtgggggagcaggacggcggcctgattggagctgaggagaaggtgatcaacagcaagaacaaggtggatgagaacatggtgattgatgagaccctggatgtgaaggagatgatcttcaatgctgagcgggtgggcggcctggaggaggagcgggagagcgtgggccccctgcgggaggacttcagcctgagcagcagcgccctgattggcctgctggtgattgctgtggccatcgccaccgtcatcgtcatcagcctggtgatgctgaggaagaggcagtatggcaccatcagccatggaattgtggaggtggaccccatgctgaccccagaggagcggcacctgaacaagatgcagaaccacggctatgagaaccccacctacaagtacctggagcagatgcagatctag

SEQ ID NO: 53060 - DNA, 480 bp, Artificial Sequence
  derived and/or modified sequence
atggccgccaccggcacagctgctgctgctgccaccggccgcctgctgctgctgctgctggtgggcctgacagccccagccctggccctggccggctacatcgagagcagccagatctgctgcagccccaggagcttcctgatcagcaccctgaagtgcctgattgtggatgagatcaatgccctggccgccaatgccggcaccggctttgctgtggccgagccccagatcgccatgttctgtgggaagctgaacatgcacgtgaacatccagacaggcaagtgggagccagaccccaccggcaccaagagctgctttgagaccaaggaggaggtgctgcagtactgccaggagatgtacccagagctgcagatcaccaacgtgatggaggccaaccagagggtgtccattgacaactggtgccggcgggacaagaagcagtgcaagagcagatttgtgacccccttcaagtgcctgtag

SEQ ID NO: 53061 - DNA, 351 bp, Artificial Sequence
  derived and/or modified sequence
atggccgccaccggcacagctgctgctgctgccaccggccgcctgctgctgctgctgctggtgggcctgacagccccagccctggccctggccggctacatcgaggccctggccgccaatgccggcactggatttgctgtggccgagccccagatcgccatgttctgtgggaagctgaacatgcacgtgaacatccagacaggcaagtgggagccagaccccaccggcaccaagagctgctttgagaccaaggaggaggtgctgcagtactgccaggagatgtacccagagctgcagatcaccaacagcggctggaggtgtgtgcgcatcaccagcacaggcaccaggtag

SEQ ID NO: 53062 - DNA, 1569 bp, Artificial Sequence
  derived and/or modified sequence
atggccgccaccggcaccgccgccgccgccgccaccggccggctgttgttattattgctggtgggcttgaccgccccagctttggccctcgcaggctatatagaagctctcgcagctaacgctggcactgggttcgccgtcgctgaacctcagattgctatgttttgtggtaaattaaacatgcacgttaatatccagaccggcaagtgggagccagatcctaccggaactaagagttgctttgaaacgaaggaagaggtattgcagtactgccaggagatgtatccagagctgcagatcacaaacgtgatggaggctaaccagcgtgtgtccatagacaactggtgtagaagagataagaagcagtgtaagagtcgcttcgttacacctttcaaatgcttggtgcctccgacccctctgcctaccaacgatgtggatgtgtacttcgaaaccagcgctgatgacaacgagcacgcccgctttcagaaggcaaaggagcagctggagatacgtcaccggaatagaatggatcgggtgaagaaggaatgggaagaagccgagcttcaggcaaaaaacctcccgaaggccgaacggcaaactctaatacagcactttcaggccatggtgaaggcactggagaaggaggccgcgagtgaaaagcagcagctggtggaaactcaccttgcaagggttgaagccatgcttaatgacaggaggaggatggccttagaaaactatttagctgcgctgcagtctgatccaccccgccctcaccgcatcctccaagccttgcggcggtacgtgagagccgagaataaggaccgccttcacactattcgccattatcaacacgtcctggccgtggaccccgaaaaagccgcccaaatgaagtctcaggttatgacccacttacatgttattgaagaaagacggaaccagtcattaagccttctgtacaaagtcccctacgttgcgcaagaaatacaggaggagatagatgaacttctccaggagcagcgagcagacatggatcagttcacagcaagtatcagcgagaccccagtggacgtaagggtttcctcggaagaatccgaagagatcccccccttccacccattccacccttttccagctctgcccgagaatgagggaagcggggtcggggagcaggacggtgggctgatcggagcggaagaaaaagttattaactctaagaacaaggtggacgagaatatggtgatagacgaaacattggacgtgaaggagatgattttcaatgcagagcgggtggggggactggaggaggaacgggaaagcgttgggccattgcgggaagatttctccctcagtagcagcgcactaattggcttgttagtgattgcggtggcgattgctactgttatcgtgatttcccttgtgatgctgaggaaacgacaatacggcacaatctctcacggtattgttgaagtggacccgatgttgactccagaagaacgacacctgaacaagatgcagaaccacggatatgagaacccaacatacaaatatctggagcaaatgcagatttag

SEQ ID NO: 53063 - DNA, 480 bp, Artificial Sequence
  derived and/or modified sequence
atggccgccaccggcaccgccgccgccgccgccaccggccggctgctcttattgttgctcgtgggattgacagcccctgccctggccctcgcagggtatatcgaaagctcccagatatgttgcagcccgaggagttttctgatcagtaccctcaaatgtctcatcgtagatgaaatcaatgctctcgccgctaacgccggaacgggcttcgccgtcgctgaacctcaaatcgctatgttctgcggaaagctgaacatgcacgttaatattcagaccggaaaatgggaacccgaccccacaggaacaaaatcttgctttgaaactaaagaagaagtattacagtactgtcaggaaatgtacccggagctgcagattactaacgttatggaggcaaatcaacgcgtgtcaatcgataactggtgccgacgcgacaagaaacagtgcaaaagccgcttcgttaccccattcaagtgtctatag

SEQ ID NO: 53064 - DNA, 351 bp, Artificial Sequence
  derived and/or modified sequence
atggccgccaccggcaccgccgccgccgccgccaccggccggctgttattactgctgttggtcgggctcacggctcctgcactggctcttgctggatatatcgaggccctagcagccaatgcaggaacagggttcgctgtcgcagagccacagatcgctatgttttgcggcaagttaaacatgcatgtcaatattcagactggaaagtgggagcccgatccaactggcactaagagctgcttcgaaacaaaagaagaagtcttacaatattgtcaggaaatgtaccccgagctccagataaccaactcaggatggaggtgcgtaaggattactagcacaggaacacgctag

SEQ ID NO: 53065 - DNA, 1862 bp, Artificial Sequence
  derived and/or modified sequence
gctaagcgaggagtccgagtgtgtgagcttgagagccgcgcgctagagcgacccggcgagggatggcggccaccgggaccgcggccgccgcagccacgggcaggctcctgcttctgctgctggtggggctcacggcgcctgccttggcgctggccggctacatcgaggctcttgcagccaatgccggaacaggatttgctgttgctgagcctcaaatcgcaatgttttgtgggaagttaaatatgcatgtgaacattcagactgggaaatgggaacctgatccaacaggcaccaagagctgctttgaaacaaaagaagaagttcttcagtactgtcaggagatgtatccagagctacagatcacaaatgtgatggaggcaaaccagcgggttagtattgacaactggtgccggagggacaaaaagcaatgcaagagtcgctttgttacacctttcaagtgtctcgttcctccaactcctctgccaaccaatgatgttgatgtgtatttcgagacctctgcagatgataatgagcatgctcgcttccagaaggctaaggagcagctggagattcggcaccgcaaccgaatggacagggtaaagaaggaatgggaagaggcagagcttcaagctaagaacctccccaaagcagagaggcagactctgattcagcacttccaagccatggttaaagctttagagaaggaagcagccagtgagaagcagcagctggtggagacccacctggcccgagtggaagctatgctgaatgaccgccgtcggatggctctggagaactacctggctgccttgcagtctgacccgccacggcctcatcgcattctccaggccttacggcgttatgtccgtgctgagaacaaagatcgcttacataccatccgtcattaccagcatgtgttggctgttgacccagaaaaggcggcccagatgaaatcccaggtgatgacacatctccacgtgattgaagaaaggaggaaccaaagcctctctctgctctacaaagtaccttatgtagcccaagaaattcaagaggaaattgatgagctccttcaggagcagcgtgcagatatggaccagttcactgcctcaatctcagagacccctgtggacgtccgggtgagctctgaggagagtgaggagatcccaccgttccaccccttccaccccttcccagccctacctgagaacgaaggatctggagtgggagagcaggatgggggactgatcggtgccgaagagaaagtgattaacagtaagaataaagtggatgaaaacatggtcattgacgagactctggatgttaaggaaatgattttcaatgccgagagagttggaggcctcgaggaagagcgggaatccgtgggcccactgcgggaggacttcagtctgagtagcagtgctctcattggcctgctggtcatcgcagtggccattgccacggtcatcgtcatcagcctggtgatgctgaggaagaggcagtatggcaccatcagccacgggatcgtggaggttgatccaatgctcaccccagaagagcgtcacctgaacaagatgcagaaccatggctatgagaaccccacctacaaatacctggagcagatgcagatttaggtggcagggagcgcggcagccctggcggagggatgcaggtgggccggaagatcccacgattccgatcgactgccaagcagcagccgctgccaggggctgcgtctgacatcctgacctcctggactgtaggactatataaagtactactgtagaactgcaatttccattcttttaaatgggtgaaaaatggtaatataacaatatatgatatataaaccttaaatgaaaaaa

SEQ ID NO: 53066 - DNA, 560 bp, Artificial Sequence
  derived and/or modified sequence
agatgcttctgggtcgcggtgtgctaagcgaggagtccgagtgtgtgagcttgagagccgcgcgctagagcgacccggcgagggatggcggccaccgggaccgcggccgccgcagccacgggcaggctcctgcttctgctgctggtggggctcacggcgcctgccttggcgctggccggctacatcgagtcttctcagatctgttgcagtccccggtctttcctgatcagcaccctcaaatgtctcattgtggatgagattaatgctcttgcagccaatgccggaacaggatttgctgttgctgagcctcaaatcgcaatgttttgtgggaagttaaatatgcatgtgaacattcagactgggaaatgggaacctgatccaacaggcaccaagagctgctttgaaacaaaagaagaagttcttcagtactgtcaggagatgtatccagagctacagatcacaaatgtgatggaggcaaaccagcgggttagtattgacaactggtgccggagggacaaaaagcaatgcaagagtcgctttgttacacctttcaagtgtct

SEQ ID NO: 53067 - DNA, 556 bp, Artificial Sequence
  derived and/or modified sequence
agatgcttctgggtcgcggtgtgctaagcgaggagtccgagtgtgtgagcttgagagccgcgcgctagagcgacccggcgagggatggcggccaccgggaccgcggccgccgcagccacgggcaggctcctgcttctgctgctggtggggctcacggcgcctgccttggcgctggccggctacatcgaggctcttgcagccaatgccggaacaggatttgctgttgctgagcctcaaatcgcaatgttttgtgggaagttaaatatgcatgtgaacattcagactgggaaatgggaacctgatccaacaggcaccaagagctgctttgaaacaaaagaagaagttcttcagtactgtcaggagatgtatccagagctacagatcacaaatagcggatggaggtgtgtgagaatcaccagcactggcacacggtagtcaaagaggcatgtctgactcagggaatgaccttatatagctacggcatgctgctcccatgtggggtagaccagttccatggcactgaatatgtgtgctgccctcagacaaagattattgg

SEQ ID NO: 53068 - DNA, 1569 bp, Artificial Sequence
  derived and/or modified sequence
atggctgccacaggtactgctgctgccgcagccacgggtcgcttgttgttgctactactggtggggctgactgcaccagcccttgcactggccggatacatcgaggccctcgcggcaaatgccggaacgggtttcgccgtagccgagccacaaatagccatgttctgcgggaagctaaacatgcacgtgaatatccaaaccggaaaatgggagcccgatcctaccggaacgaagagttgctttgaaactaaagaggaagtcctccaatactgccaggagatgtaccctgagctgcagattaccaatgtgatggaggctaatcagagggtctcaatcgataactggtgcaggagagacaagaagcagtgcaagagtagattcgtcaccccttttaagtgtctggtacctccaacgccattgccaaccaacgatgtagatgtctactttgaaacaagcgccgacgataatgagcatgctcgctttcagaaggccaaggagcaactggagatccgccataggaataggatggatagagtaaagaaggaatgggaggaagcagaactccaggcaaagaatcttccaaaagccgaacgccagactctcattcaacactttcaagctatggtaaaggcgctagaaaaggaggcagctagcgaaaagcagcagcttgtagagacacacctggcccgtgtggaagccatgcttaacgataggcgtcgcatggccctggagaattatctggccgctctccagagcgaccctcctcgaccacacaggatcttgcaggcacttagacgttacgtgcgcgctgaaaacaaagacagactgcacacaattagacactatcagcacgttctcgctgtggatccagaaaaggccgcacaaatgaagagccaagtgatgactcacttacatgtcatcgaggagagaaggaaccagtcattgagcctgctgtacaaggtgccctatgttgcgcaggaaatccaagaggagattgacgagctgttacaggagcagcgggctgatatggatcagtttactgcatctatttctgaaaccccagtcgacgtgagagtcagttctgaggagtcagaggagatccctcctttccatccgttccacccattccctgcccttccggagaacgaaggaagcggcgtaggcgagcaggacgggggtttgattggcgctgaggagaaagtcatcaacagcaagaacaaagtggatgagaacatggtgattgacgaaacactggatgtgaaagaaatgattttcaatgcagagcgggtcggtggtctcgaagaagaacgcgagtcagtaggacccctgcgggaggactttagtttatcatcaagtgcccttattggcctgttggtgatagcagttgccatcgcgactgtgatcgtgatctccctcgtgatgcttcggaaacgccagtatgggacgatcagccacgggattgtggaggtcgatccaatgctaacacctgaagagcgacatctcaacaaaatgcaaaaccacgggtacgagaatccgacttataagtatcttgaacagatgcagatatag

SEQ ID NO: 53069 - DNA, 480 bp, Artificial Sequence
  derived and/or modified sequence
atggccgcaaccggcactgccgcagccgcagccactggtagactcctgctgctgctcctcgttggccttaccgcgccagcccttgcccttgccggttatatcgaatcctctcagatttgctgtagccctcgcagtttcctgatttctaccctcaagtgccttatagtggatgagattaacgcgctggccgctaatgccggaaccgggttcgctgtggccgaacctcaaattgccatgttctgcggcaaactgaacatgcatgtcaacatccagaccggcaagtgggagcccgatcccacaggcactaaaagctgcttcgagactaaagaggaggtgctgcagtattgtcaggagatgtacccagaattgcagatcacaaacgtgatggaagcaaaccaaagagtgagcattgataattggtgccgtagagacaagaagcaatgtaaatccagattcgtgacgccctttaagtgcttgtag

SEQ ID NO: 53070 - DNA, 351 bp, Artificial Sequence
  derived and/or modified sequence
atggctgccaccggtaccgccgcagcggctgccacgggccgactgctgctgctgttgttggttggcctcactgctccggctcttgcattggccggatatatcgaggcattggccgcaaacgccggtactgggtttgccgtcgcggagccacagatagcaatgttctgtggcaaactcaatatgcatgttaatattcagactgggaaatgggagcccgatccaacagggactaagtcatgttttgagacaaaggaggaggtgctgcaatattgccaggagatgtatcctgaactgcagatcaccaactccgggtggcgttgcgtgcgcataacctctacaggtacaagatag

SEQ ID NO: 53071 - DNA, 1569 bp, Artificial Sequence
  derived and/or modified sequence
atggccgccaccggcaccgccgccgccgccgccaccggcagactgctgctgctgctgctggtgggcctgaccgcccccgccctggccctggccggctacatcgaggccctggccgccaacgccggcaccggcttcgccgtggccgagccccagatcgccatgttctgcggcaagctgaacatgcacgtgaacatccagaccggcaagtgggagcccgaccccaccggcaccaagagctgcttcgagaccaaggaggaggtgctgcagtactgccaggagatgtaccccgagctgcagatcaccaacgtgatggaggccaaccagagagtgagcatcgacaactggtgcagaagagacaagaagcagtgcaagagcagattcgtgacccccttcaagtgcctggtgccccccacccccctgcccaccaacgacgtggacgtgtacttcgagaccagcgccgacgacaacgagcacgccagattccagaaggccaaggagcagctggagatcagacacagaaacagaatggacagagtgaagaaggagtgggaggaggccgagctgcaggccaagaacctgcccaaggccgagagacagaccctgatccagcacttccaggccatggtgaaggccctggagaaggaggccgccagcgagaagcagcagctggtggagacccacctggccagagtggaggccatgctgaacgacagaagaagaatggccctggagaactacctggccgccctgcagagcgacccccccagaccccacagaatcctgcaggccctgagaagatacgtgagagccgagaacaaggacagactgcacaccatcagacactaccagcacgtgctggccgtggaccccgagaaggccgcccagatgaagagccaggtgatgacccacctgcacgtgatcgaggagagaagaaaccagagcctgagcctgctgtacaaggtgccctacgtggcccaggagatccaggaggagatcgacgagctgctgcaggagcagagagccgacatggaccagttcaccgccagcatcagcgagacccccgtggacgtgagagtgagcagcgaggagagcgaggagatcccccccttccaccccttccaccccttccccgccctgcccgagaacgagggcagcggcgtgggcgagcaggacggcggcctgatcggcgccgaggagaaggtgatcaacagcaagaacaaggtggacgagaacatggtgatcgacgagaccctggacgtgaaggagatgatcttcaacgccgagagagtgggcggcctggaggaggagagagagagcgtgggccccctgagagaggacttcagcctgagcagcagcgccctgatcggcctgctggtgatcgccgtggccatcgccaccgtgatcgtgatcagcctggtgatgctgagaaagagacagtacggcaccatcagccacggcatcgtggaggtggaccccatgctgacccccgaggagagacacctgaacaagatgcagaaccacggctacgagaaccccacctacaagtacctggagcagatgcagatctag

SEQ ID NO: 53072 - DNA, 480 bp, Artificial Sequence
  derived and/or modified sequence
atggccgccaccggcaccgccgccgccgccgccaccggcagactgctgctgctgctgctggtgggcctgaccgcccccgccctggccctggccggctacatcgagagcagccagatctgctgcagccccagaagcttcctgatcagcaccctgaagtgcctgatcgtggacgagatcaacgccctggccgccaacgccggcaccggcttcgccgtggccgagccccagatcgccatgttctgcggcaagctgaacatgcacgtgaacatccagaccggcaagtgggagcccgaccccaccggcaccaagagctgcttcgagaccaaggaggaggtgctgcagtactgccaggagatgtaccccgagctgcagatcaccaacgtgatggaggccaaccagagagtgagcatcgacaactggtgcagaagagacaagaagcagtgcaagagcagattcgtgacccccttcaagtgcctgtag

SEQ ID NO: 53073 - DNA, 351 bp, Artificial Sequence
  derived and/or modified sequence
atggccgccaccggcaccgccgccgccgccgccaccggcagactgctgctgctgctgctggtgggcctgaccgcccccgccctggccctggccggctacatcgaggccctggccgccaacgccggcaccggcttcgccgtggccgagccccagatcgccatgttctgcggcaagctgaacatgcacgtgaacatccagaccggcaagtgggagcccgaccccaccggcaccaagagctgcttcgagaccaaggaggaggtgctgcagtactgccaggagatgtaccccgagctgcagatcaccaacagcggctggagatgcgtgagaatcaccagcaccggcaccagatag

SEQ ID NO: 53074 - protein, 257 aa, Artificial Sequence
  derived and/or modified sequence
MAAGVDCGDGVGARQHVFLVSEYLKDASKKMKNGLMFVKLVNPCSGEGAIYLFNMCLQQLFEVKVFKEKHHSWFINQSVQSGGLLHFATPVDPLFLLLHYLIKADKEGKFQPLDQVVVDNVFPNCILLLKLPGLEKLLHHVTEEKGNPEIDNKKYYKYSKEKTLKWLEKKVNQTVAALKTNNVNVSSRVQSTAFFSGDQASTDKEEDYIRYAHGLISDYIPKELSDDLSKYLKLPEPSASLPNPPSKMAAQRQKRGK

SEQ ID NO: 53075 - DNA, 774 bp, Artificial Sequence
  derived and/or modified sequence
atggcagccggcgtcgattgcggtgacggggtgggcgcccggcagcacgtgtttcttgtatccgagtatctgaaggatgctagcaagaaaatgaaaaacggcctgatgtttgtgaagttagtcaatccctgttccggtgagggggcgatctacctgtttaatatgtgcctgcaacagctgtttgaggtgaaggtgtttaaagaaaaacaccattcctggttcataaaccagtccgtgcagtctggaggcttactgcatttcgccacacctgtggatcccctgtttcttttgcttcattacctgattaaggccgataaggagggcaagtttcagcctttggatcaggtcgtggttgacaacgtgtttccaaactgcatactgctcctgaagctccccggcctggagaaactgttgcatcatgttaccgaggaaaagggtaatcctgaaatagataataaaaagtactacaaatattccaaagaaaaaacactgaaatggctcgagaagaaagtgaatcagacagtggcggcccttaaaaccaataatgtgaatgtctccagccgcgtgcaatccaccgcgttcttctccggcgaccaggcctctactgacaaggaagaggactatattcggtacgcgcatggactgatcagcgactatataccgaaggaattgagtgacgatctgtctaaatatctgaaactgcctgaaccctctgcttcccttcctaacccaccctctaaaatggcagctcaaaggcagaagcgagggaaatag

SEQ ID NO: 53076 - DNA, 774 bp, Artificial Sequence
  derived and/or modified sequence
atggctgctggggtggactgtggagatggagtgggcgcccggcagcacgtgttcctggtgtctgagtacctgaaggatgccagcaagaagatgaagaatggcctgatgtttgtgaagctggtgaacccctgcagcggggagggcgccatctacctgttcaacatgtgcctgcagcagctgtttgaggtgaaggtgttcaaggagaagcaccacagctggttcatcaaccagagcgtgcagagcggcggcctgctgcactttgccacccctgtggaccccctcttcctgctgctgcactacctgatcaaggctgacaaggagggcaagttccagcccctggaccaggtggtggtggacaacgtgttccccaactgcatcctgctgctgaagctgcccggcctggagaagctgctgcaccacgtgacagaggagaagggcaaccctgagattgacaacaagaagtactacaagtacagcaaggagaagaccctgaagtggctggagaagaaggtgaaccagacagtggccgccctgaagaccaacaacgtgaatgtgagcagccgggtgcagagcacagccttcttcagcggggaccaggccagcacagacaaggaggaggactacatccgctatgcccacggcctcatcagtgactacatccccaaggagctgagtgatgacctgagcaagtacctgaagctgcctgagcccagcgccagcctgcccaacccccccagcaagatggccgcccagaggcagaagaggggcaagtag

SEQ ID NO: 53077 - DNA, 774 bp, Artificial Sequence
  derived and/or modified sequence
atggccgccggcgtggactgcggcgacggcgtgggcgcccggcagcacgtctttctcgtcagcgagtacctgaaagatgcgtccaagaaaatgaagaacgggctgatgttcgtgaaattggtaaatccctgcagcggcgaaggcgccatatacctgttcaacatgtgcttgcaacagcttttcgaagttaaggtgtttaaagaaaagcaccattcttggttcatcaatcagtcagttcagtctgggggtctacttcatttcgctactccggtggaccctctctttctgctccttcattacttaatcaaagcagacaaagagggcaaattccagccactggatcaggtcgttgtggacaatgtgttcccaaactgcattttgctactgaaactaccagggctagagaagctgctgcaccatgttaccgaggaaaaaggcaaccctgagattgacaataaaaagtattataagtattctaaggagaagactttaaaatggcttgagaaaaaagttaatcagacggtagcagcactcaagacgaataatgtgaatgtctcctctcgtgtgcagtctacggccttcttctccggtgaccaagctagcacagataaagaagaagactacatcagatacgcccacggtctcatctccgactacattccgaaggagctgtccgacgatctgagtaagtacctcaagctgcctgagccgtcagcaagccttcctaatccacccagcaaaatggctgctcagcgtcagaaacgggggaaatag

SEQ ID NO: 53078 - DNA, 774 bp, Artificial Sequence
  derived and/or modified sequence
atggcggctggcgtagactgcggcgatggcgtgggagcgagacagcatgtctttctcgtgtcggagtatctgaaggatgcctctaagaaaatgaaaaacgggctcatgtttgtcaagctcgtcaatccttgtagcggggagggtgcgatctaccttttcaacatgtgcctccaacagttatttgaagtcaaggtctttaaggagaagcatcactcctggttcattaaccagtcagttcagtccggcggtttgctccactttgctacaccagttgacccactgtttctcctcctacactaccttatcaaggcagataaggaaggcaagtttcagccactggatcaggtggtcgtggataacgtcttccccaactgcattctgctgctcaagctcccgggactcgaaaaacttctccaccacgtcacagaggagaaggggaaccccgagattgacaataagaagtactataaatattcaaaggaaaagacactcaagtggcttgagaagaaggtgaaccagactgtcgctgcattaaaaacaaacaatgtgaatgtcagctccagggttcagtctaccgctttcttcagcggggatcaggcaagtaccgataaggaggaggactatatccggtatgcccacggactcatttctgactatatccccaaggagttgtctgacgacttgtcaaagtacctcaaactcccagaaccctcagcctcacttcctaaccctcctagcaagatggcagcccagagacagaaaagggggaaatag

SEQ ID NO: 53079 - DNA, 1587 bp, Artificial Sequence
  derived and/or modified sequence
actcggcgccctgcggcgcgcgatgagcacctaccactagcggagccgcgagggagaggccgcggccccttcccgttgcctgcggccaccggccggcattcagagcccctcgcctggcgctaaatttaaaaacgtaacacgagcagcaggctggtctcggaaacgaaacgaaattcggtccctgggcctcctcccgggcgctgccggtccctcagcgcgccgcgccacccggaacagacccttctcccgccattttcggcggggctgggagactgaggcccgcggcgctgagcctgcggcgccccggaagaggcgggcggcatggccgctggcgtggactgcggggacggggttggcgcccggcagcacgtgttcctggtttcagaatatttaaaagatgcttcaaagaagatgaaaaatgggctaatgtttgtaaaactggttaacccctgttcaggagaaggagccatttacttgttcaatatgtgtctacagcagctgtttgaagtaaaagttttcaaggaaaaacaccattcttggtttataaatcaatcagttcaatcaggaggtcttctccattttgccacacctgtggatcctctatttctgcttctccactacctcataaaggctgataaggaggggaagtttcagccccttgatcaagttgtggtggataacgtgtttccaaattgcatcttgttgctgaaacttcctggacttgagaagttacttcatcatgtgacagaggaaaaaggtaatccagaaatagacaacaagaaatattacaagtacagcaaagagaagacattaaagtggctggaaaaaaaggttaatcaaactgtggcagcattaaaaaccaataatgtgaatgtcagttcccgggtacagtcaactgcatttttctctggtgaccaagcttccactgacaaggaagaggattatattcgttatgcccatggtctgatatctgactacatccctaaagaattaagtgatgacttatctaaatacttaaagcttccagaaccttcagcctcattgccaaatcctccatcaaagatggcagcacaaagacagaaaaggggcaagtgatggtggtggctccacgcaaggcttggcggttttccctgcaacttcagacactcccagaggactcggactttttcttctgcacttttttggaaaatcgccaggtgccaaaaggtgcattttaaagcgctgactgtaaatgctttatttctttgattagtaccactagtctatgtgggcagcggcattcctccctggagcactcagctaggcggttccgtccaggagcttgaaagcatcccagcggtgcacctgttcagtctgaggacctcaagcttgggtcaggccagcatgttttaggtatggatgtggtgacttaaagtacttgattgtcttgatttcaccctgaaagctttggcaaaccaagtttcaacccttactttaaaaatctgacactgctttactccatatcaatttggaagcttctaattcataaatatacctaaacgttggcattttatctctccaggagttattaaacatttcttccttttt

SEQ ID NO: 53080 - DNA, 774 bp, Artificial Sequence
  derived and/or modified sequence
atggccgccggcgtggactgcggcgacggcgtgggcgccagacagcacgtgttcctggtgagcgagtacctgaaggacgccagcaagaagatgaagaacggcctgatgttcgtgaagctggtgaacccctgcagcggcgagggcgccatctacctgttcaacatgtgcctgcagcagctgttcgaggtgaaggtgttcaaggagaagcaccacagctggttcatcaaccagagcgtgcagagcggcggcctgctgcacttcgccacccccgtggaccccctgttcctgctgctgcactacctgatcaaggccgacaaggagggcaagttccagcccctggaccaggtggtggtggacaacgtgttccccaactgcatcctgctgctgaagctgcccggcctggagaagctgctgcaccacgtgaccgaggagaagggcaaccccgagatcgacaacaagaagtactacaagtacagcaaggagaagaccctgaagtggctggagaagaaggtgaaccagaccgtggccgccctgaagaccaacaacgtgaacgtgagcagcagagtgcagagcaccgccttcttcagcggcgaccaggccagcaccgacaaggaggaggactacatcagatacgcccacggcctgatcagcgactacatccccaaggagctgagcgacgacctgagcaagtacctgaagctgcccgagcccagcgccagcctgcccaacccccccagcaagatggccgcccagagacagaagagaggcaagtag

SEQ ID NO: 53081 - DNA, 1272 bp, Artificial Sequence
  derived and/or modified sequence
atgattccagagtactgccgggcactggaggagaacgagatctccgagcattgctttgacctgatcttcgcgttcgatgagattgtggccctcggatatagagaaaacgtcaacctcgcccagattcgcacctttacagagatggattcccatgaggaaaaagtgtttcgcgcagtgcgcgagacacaggagcgagaagccaaggccgagatgagacgaaaggcgaaggaactgcagcaggctcgccgggatgccgaaaggcagggaaagaaagcccccggctttgggggcttcggctcatctgctgtctccggcggctctaccgcagcaatgatcaccgaaaccatcatcgaaaccgataaacccaaagtggcgccagcccctgcaagacccagcggaccttctaaagctctgaaattgggagctaaggggaaggaagtagataactttgtcgacaagctgaagtccgagggagaaaccattatgagcagtagcatgggtaaacgcacctctgaagcgaccaaaatgcatgcacctccaattaacatggagtccgtccacatgaagatagaggagaaaatcacccttacatgtgggagagatggcggattgcagaacatggagctgcacggcatgataatgcttagaatctccgatgacaagtatggacggatcaggctgcacgtggagaatgaagataagaagggcgtgcagttgcagacacatccaaacgtcgacaagaaacttttcaccgcggaaagtctcatagggctgaagaatcccgagaagagtttccctgtcaattccgatgtgggcgttttgaaatggagactgcagacaactgaagaaagcttcatacccctgacgatcaactgctggccatctgagagcggcaacggatgtgacgtaaatatcgagtacgagctgcaggaggataaccttgagctgaacgatgtggtgattaccattccactgccttctggggtgggcgcacctgtcatcggcgaaatcgatggggagtatagacacgactctaggcggaacaccctggagtggtgtttgccagttattgacgccaaaaacaaaagcggatccttagagttctctatcgccggacagcctaatgacttctttcccgtgcaggtttcattcgttagcaagaagaactactgtaatatccaggtgactaaggtgacacaggtggacggcaattctcccgtcaggttctctaccgaaaccacgtttttggtggataagtacgagattctctag

SEQ ID NO: 53082 - DNA, 1272 bp, Artificial Sequence
  derived and/or modified sequence
atgatccctgagtactgccgggccctggaggagaatgagatcagcgagcactgctttgacctgatctttgcctttgatgagatcgtggccctgggctacagagaaaatgtgaacctggcccagatccgcaccttcacagagatggacagccatgaggagaaggtgttccgggctgtgcgggagacccaggagcgggaggccaaggccgagatgaggaggaaggccaaggagctgcagcaggccaggagagatgctgagcggcagggcaagaaggcccctggctttggaggcttcggcagcagcgctgtgtctgggggcagcacagctgccatgatcacagagaccatcattgaaacagacaagcccaaggtggccccagccccagcccggcccagcggccccagcaaggccctgaagctgggcgccaagggcaaggaggtggacaactttgtggacaagctgaagtctgagggggagaccatcatgagcagctccatgggcaagaggaccagcgaggccaccaagatgcacgccccacccatcaacatggagagcgtgcacatgaagattgaggagaagatcaccctgacctgtggcagagatggcggcctgcagaacatggagctgcacggcatgatcatgctgcgcatcagtgatgacaagtatggccgcatccggctgcacgtggagaatgaagacaagaagggcgtgcagctgcagacccaccccaacgtggacaagaagctgttcaccgctgagagcctcatcggcctgaagaaccctgagaagagcttccctgtgaacagtgatgtgggcgtgctgaagtggaggctgcagaccacagaggagagcttcatccccctgaccatcaactgctggcccagcgagagcggaaatggctgtgatgtgaacattgaatatgagctgcaggaggacaacctggagctgaatgatgtggtgatcaccatccccctgcccagcggcgtgggcgcccctgtgattggagaaattgatggagagtacagacatgacagcagaagaaacaccctggagtggtgcctgcctgtgattgatgccaagaacaagagcggcagcctggagttcagcattgctggccagcccaatgacttcttccctgtgcaggtgtcctttgtgtccaagaagaactactgcaacatccaggtgaccaaggtgacccaggtggatggcaacagccctgtgcgcttcagcacagagaccaccttcctggtggacaagtatgagatcctgtag

SEQ ID NO: 53083 - DNA, 1272 bp, Artificial Sequence
  derived and/or modified sequence
atgatccccgagtactgccgggccctggaggagaacgagatcagcgagcactgttttgacttgatcttcgcgttcgatgagatcgtcgccctgggatatagagagaacgtgaacctagctcaaataagaactttcaccgagatggatagtcacgaagaaaaagtgttccgggcagtcagagagactcaggaacgtgaggcaaaggcggaaatgcgcagaaaagcgaaagagctgcagcaggctcgacgcgatgcagaacgccaaggaaagaaggcaccagggttcggcgggtttgggtccagcgcagtctcaggcggtagcactgctgcaatgattaccgaaactataatagaaacagacaaaccaaaagtggcacctgcccccgcacggcctagcggcccatctaaggccttaaagttaggcgcaaaggggaaggaagtcgacaacttcgtggacaagctgaagtctgagggagaaacaatcatgagttctagcatgggaaaacgcacctctgaggcgaccaagatgcatgccccccccattaatatggagagtgtccacatgaaaatagaggaaaaaatcacactcacctgcggcagagacggtggacttcagaacatggagctgcacggtatgattatgcttcgcatcagcgacgataagtatggccgcatccggctgcatgtcgagaacgaggacaagaaaggggtacaattgcagacccatccaaatgtagacaagaagctgttcaccgctgaaagcctcataggcttgaagaatcccgagaagtcattcccagtgaactccgacgtgggcgtcttgaaatggcgactgcagacaacagaggaaagcttcatccctctcactattaattgctggcccagcgaatccgggaatggatgtgatgtgaacatagaatacgaattgcaggaggataatctggaattaaatgacgttgtgatcacaattccactgccctcaggagtaggcgcccctgtcatcggggaaatcgatggcgagtaccgacatgactcccgaaggaatactctggagtggtgtttgcctgtgatcgacgccaaaaacaaaagcggttcactagaattttccatcgcggggcagccaaatgacttcttcccagtacaagtcagttttgtatctaagaaaaactactgcaatatccaggtaaccaaggtcacgcaggtcgatggcaattctcctgtgcgcttctcaactgagaccacctttctcgtggataaatacgaaatcctgtag

SEQ ID NO: 53084 - DNA, 1272 bp, Artificial Sequence
  derived and/or modified sequence
atgatccccgaatactgcagagctcttgaggagaatgagatttccgaacattgtttcgatctgatcttcgcctttgacgagatcgtggcactagggtacagagaaaacgtaaatttggcgcagatacgtacttttacagaaatggatagccatgaggaaaaggtatttagggccgtgagagaaactcaagagcgcgaagccaaggctgagatgcggcgaaaagccaaggagctgcagcaggccaggcgggacgccgaacgtcaagggaaaaaggcgccaggctttggtggattcggcagctcagcggtcagtggaggctcgaccgcagccatgatcacagagacaatcatcgagaccgataagcccaaagtggcccctgcccctgcaaggccgtccggtccttccaaagctctgaaacttggggcaaagggcaaggaagtagataactttgtggataagctcaagtcagagggcgagaccatcatgagctcctcaatgggaaagaggacatcggaggccaccaaaatgcacgctccccctatcaacatggaaagtgtacacatgaagattgaggagaaaattaccttgacttgtgggcgagatgggggattgcagaacatggagctccacggaatgatcatgctgcggataagtgatgacaaatatggccgtattagactccacgtagagaacgaggacaaaaaaggcgttcagctccagactcaccccaatgtcgacaagaagctgttcacagcagagagcttgattggtcttaagaatcccgaaaagtcattccctgtaaattctgacgtgggggtgctgaaatggcgccttcagaccacagaggagtcattcattcccctaaccatcaactgctggccatctgagagcggcaacggttgtgacgtgaatattgagtacgagttacaggaagataacctggaactcaatgatgtcgtgataactatccccttaccgtccggagttggagcccctgttatcggggaaattgatggagagtacagacatgatagccgtagaaatacactagaatggtgtctgccagtgattgacgcgaagaataagtctggctcactagagttttctatcgccggtcagcccaacgactttttccctgtgcaggtttcattcgtgagcaaaaagaactactgcaatatccaggtcacaaaagtgacacaggtagatggcaatagccccgtgcgcttctctacagaaacgacatttttggtggacaagtatgaaatactttag

SEQ ID NO: 53085 - DNA, 1709 bp, Artificial Sequence
  derived and/or modified sequence
gacgtggcttggggccgccatcttggcaagaggcgaagcggcagcggttcctgtcaagggggcagcaggtccagagctgctggtgctcccgttccccagaccctacccctatccccagtggagccggagtgcgggcgcgccccaccaccgccctcaccatgatccctgaatattgccgagccttagaagagaatgaaatatctgagcactgttttgatttgatttttgcttttgatgaaattgtcgcactgggataccgggagaatgttaacttggcacagatcagaaccttcacagaaatggattctcatgaggagaaggtgttcagagccgtcagagagactcaagaacgtgaagctaaggctgagatgcgtcgtaaagcaaaggaattacaacaggcccgaagagatgcagagagacagggcaaaaaagcaccaggatttggcggatttggcagctctgcagtatctggaggcagcacagctgccatgatcacagagaccatcattgaaactgataaaccaaaagtggcacctgcaccagccaggccttcaggccccagcaaggctttaaaacttggagccaaaggaaaggaagtagataactttgtggacaaattaaaatctgaaggtgaaaccatcatgtcctctagtatgggcaagcgtacttctgaagcaaccaaaatgcatgctccacccattaatatggaaagtgtacatatgaagattgaagaaaagataacattaacctgtggacgagacggaggattacagaatatggagttgcatggcatgatcatgcttaggatctcagatgacaagtatggccgaattcgtcttcatgtggaaaatgaagataagaaaggggtgcagctacagacccatccaaatgtggataaaaaacttttcactgcagagtctctaattggcctgaagaatccagagaagtcatttccagtcaacagtgacgtaggggtgctaaagtggagactacaaaccacagaggaatcttttattccactgacaattaattgctggccctcggagagtggaaatggctgtgatgtcaacatagaatatgagctacaagaagataatttagaactgaatgatgtggttatcaccatcccactcccgtctggtgtcggcgcgcctgttatcggtgagatcgatggggagtatcgacatgacagtcgacgaaataccctggagtggtgcctgcctgtgattgatgccaaaaataagagtggcagcctggagtttagcattgctgggcagcccaatgacttcttccctgttcaagtttcctttgtctccaagaaaaattactgtaacatacaggttaccaaagtgacccaggtagatggaaacagccccgtcaggttttccacagagaccactttcctagtggataagtatgaaattctgtaataccaagaagagggagctgaaaaggaaaattttcagattaataaagaagacgccaatgatggctgaagagtttttcccagatttacaagccactggagaccccttttttctgatacaatgcacgattctctgcgcgcaaggaccctcgactcacccccatgtttcagtgtcacagagacattctttgataaggaaatggcacaaacataaagggaaaggctgctaattttctttggcagattgtattggccagcaggaaagcaagctctccagagaatg

SEQ ID NO: 53086 - DNA, 1272 bp, Artificial Sequence
  derived and/or modified sequence
atgatccccgagtactgcagagccctggaggagaacgagatcagcgagcactgcttcgacctgatcttcgccttcgacgagatcgtggccctgggctacagagagaacgtgaacctggcccagatcagaaccttcaccgagatggacagccacgaggagaaggtgttcagagccgtgagagagacccaggagagagaggccaaggccgagatgagaagaaaggccaaggagctgcagcaggccagaagagacgccgagagacagggcaagaaggcccccggcttcggcggcttcggcagcagcgccgtgagcggcggcagcaccgccgccatgatcaccgagaccatcatcgagaccgacaagcccaaggtggcccccgcccccgccagacccagcggccccagcaaggccctgaagctgggcgccaagggcaaggaggtggacaacttcgtggacaagctgaagagcgagggcgagaccatcatgagcagcagcatgggcaagagaaccagcgaggccaccaagatgcacgccccccccatcaacatggagagcgtgcacatgaagatcgaggagaagatcaccctgacctgcggcagagacggcggcctgcagaacatggagctgcacggcatgatcatgctgagaatcagcgacgacaagtacggcagaatcagactgcacgtggagaacgaggacaagaagggcgtgcagctgcagacccaccccaacgtggacaagaagctgttcaccgccgagagcctgatcggcctgaagaaccccgagaagagcttccccgtgaacagcgacgtgggcgtgctgaagtggagactgcagaccaccgaggagagcttcatccccctgaccatcaactgctggcccagcgagagcggcaacggctgcgacgtgaacatcgagtacgagctgcaggaggacaacctggagctgaacgacgtggtgatcaccatccccctgcccagcggcgtgggcgcccccgtgatcggcgagatcgacggcgagtacagacacgacagcagaagaaacaccctggagtggtgcctgcccgtgatcgacgccaagaacaagagcggcagcctggagttcagcatcgccggccagcccaacgacttcttccccgtgcaggtgagcttcgtgagcaagaagaactactgcaacatccaggtgaccaaggtgacccaggtggacggcaacagccccgtgagattcagcaccgagaccaccttcctggtggacaagtacgagatcctgtag

SEQ ID NO: 53087 - DNA, 396 bp, Artificial Sequence
  derived and/or modified sequence
atgaacgatactgtgacgattaggacccgcaaatttatgacaaatcggctcttgcagaggaagcagatggtgattgacgttttgcatccgggaaaagcaaccgtgcccaaaacagagatccgagagaaactggccaaaatgtataaaacaacacccgacgtaattttcgtattcggctttagaacccactttggcggtggaaagaccaccggatttgggatgatctacgactcgctcgactatgcaaaaaagaatgagccaaagcatagactagcacgccatggactgtatgaaaagaagaagacgtccaggaagcagagaaaggaacgcaaaaaccgaatgaagaaagtgaggggaaccgccaaggccaacgtgggcgctggtaagaagcagtag

SEQ ID NO: 53088 - DNA, 396 bp, Artificial Sequence
  derived and/or modified sequence
atgaatgacacagtgaccatccgcaccaggaagttcatgaccaaccggctgctgcagaggaagcagatggtgattgatgtgctgcaccctgggaaggccaccgtgcccaagacagagatccgggagaagctggccaagatgtacaagaccaccccagatgtgatctttgtgtttggcttccgcacccactttggaggcggcaagaccaccggcttcggcatgatctatgacagcctggactatgccaagaagaatgagcccaagcaccggctggcccggcacggcctgtatgagaagaagaagaccagcaggaagcagaggaaggagaggaagaacaggatgaagaaggtgcggggcacagccaaggccaacgtgggcgccggcaagaagcagtag

SEQ ID NO: 53089 - DNA, 396 bp, Artificial Sequence
  derived and/or modified sequence
atgaacgacaccgtgaccatccggacccggaagttcatgaccaaccgcctgttgcagcgaaagcaaatggtcatagatgtgctccatcctggcaaggctacagtgccgaaaacagaaattagggagaagctggccaaaatgtataaaactacgcccgacgtgatttttgtttttggtttccgcacccactttggcggaggaaaaacaactggatttggtatgatctatgattcattggactatgccaaaaagaacgagcccaagcatcggctggctcgacacgggctgtacgagaagaagaagacttcacggaagcaaagaaaggaacggaagaacagaatgaagaaggtaaggggtaccgccaaggccaacgtcggcgccggcaaaaagcagtag

SEQ ID NO: 53090 - DNA, 396 bp, Artificial Sequence
  derived and/or modified sequence
atgaatgacaccgtgacaatccgtactaggaagtttatgacaaacaggctcctgcagcggaagcagatggtgatagacgtcctgcacccaggcaaagcgaccgtgcccaaaacagaaatacgggagaaactggccaagatgtataagacaactcctgacgtgatcttcgtcttcggatttagaacacactttggcggaggaaagaccaccgggttcggaatgatctatgactctcttgactacgcaaagaagaacgaaccaaaacacagacttgcacgccacgggctatatgaaaagaaaaagacctctcgcaagcagcgcaaggagagaaaaaatcgcatgaagaaggttaggggcactgccaaagcaaacgtgggcgcagggaagaagcagtag

SEQ ID NO: 53091 - DNA, 656 bp, Artificial Sequence
  derived and/or modified sequence
aggcatcggcgcggtcagcctcgtggcgcgcccacgcccccacgccggctcttcccggggtccttccgtgcgcgttgatatgattggccggcgaatcgtggttctcttttcctccttggctgtctgaagatagatcgccatcatgaacgacaccgtaactatccgcactagaaagttcatgaccaaccgactacttcagaggaaacaaatggtcattgatgtccttcaccccgggaaggcgacagtgcctaagacagaaattcgggaaaaactagccaaaatgtacaagaccacaccggatgtcatctttgtatttggattcagaactcattttggtggtggcaagacaactggctttggcatgatttatgattccctggattatgcaaagaaaaatgaacccaaacatagacttgcaagacatggcctgtatgagaagaaaaagacctcaagaaagcaacgaaaggaacgcaagaacagaatgaagaaagtcagggggactgcaaaggccaatgttggtgctggcaaaaagcagtgagctggagattggatcacagccgaaggagtaaaggtgctgcaatgatgttagctgtggccactgtggatttttcgcaagaacattaataaactaaaaacttcatgtgtctggttgtttg

SEQ ID NO: 53092 - DNA, 396 bp, Artificial Sequence
  derived and/or modified sequence
atgaacgacaccgtgaccatcagaaccagaaagttcatgaccaacagactgctgcagagaaagcagatggtgatcgacgtgctgcaccccggcaaggccaccgtgcccaagaccgagatcagagagaagctggccaagatgtacaagaccacccccgacgtgatcttcgtgttcggcttcagaacccacttcggcggcggcaagaccaccggcttcggcatgatctacgacagcctggactacgccaagaagaacgagcccaagcacagactggccagacacggcctgtacgagaagaagaagaccagcagaaagcagagaaaggagagaaagaacagaatgaagaaggtgagaggcaccgccaaggccaacgtgggcgccggcaagaagcagtag

SEQ ID NO: 53093 - DNA, 399 bp, Artificial Sequence
  derived and/or modified sequence
atgaatgacaccgttacgattcgcactcgcaagtttatgacaaaccgcctgctgcaaagaaagcaaatggtgatcgatgtgctgcatcccggaaaagccacagtacccaagactgagattcgagaaaaactggccaagatgtataaaaccacccctgatgttattttcgtgttcggcttccgcacacacttcggcggtggtaagacaactgggttcgggatgatttacgatagccttgactatgcaaagaaaaatgaaccaaagcaccggcttgcccgtcatggcctgtacgaaaaaaagaaaacatctagaaagcagagaaaggaacgaaagaacaggatgaagaaagtccgcggcacagctaaagctaacgtgggcgccgggaagaaacaaaaatag

SEQ ID NO: 53094 - DNA, 399 bp, Artificial Sequence
  derived and/or modified sequence
atgaatgacacagtgaccatccgcaccaggaagttcatgaccaaccggctgctgcagaggaagcagatggtgattgatgtgctgcaccctgggaaggccaccgtgcccaagacagagatccgggagaagctggccaagatgtacaagaccaccccagatgtgatctttgtgtttggcttccgcacccactttggaggcggcaagaccaccggcttcggcatgatctatgacagcctggactatgccaagaagaatgagcccaagcaccggctggcccggcacggcctgtatgagaagaagaagaccagcaggaagcagaggaaggagaggaagaacaggatgaagaaggtgcggggcacagccaaggccaacgtgggcgccggcaagaagcagaagtag

SEQ ID NO: 53095 - DNA, 399 bp, Artificial Sequence
  derived and/or modified sequence
atgaacgacaccgtgaccatccggacccggaagttcatgaccaaccggttactgcagcggaagcagatggttattgacgtgctgcaccctggcaaggcaaccgtacccaagaccgagattcgggagaagctggcaaaaatgtacaagactacccctgatgtgatcttcgtatttggcttccgcactcacttcggaggtgggaaaacgaccgggttcgggatgatctacgacagcctagactacgcaaagaaaaacgagcccaagcatcggctggcacgtcacggactgtacgaaaaaaagaagacgagtcgaaagcagcgtaaagaaaggaaaaacaggatgaagaaggttaggggcaccgcaaaagccaatgttggtgccggaaagaaacagaagtag

SEQ ID NO: 53096 - DNA, 399 bp, Artificial Sequence
  derived and/or modified sequence
atgaacgatactgtgactatcaggaccaggaagtttatgactaaccggctcttgcagagaaaacagatggtgatagacgtgttacatccaggtaaagcaacggtacctaaaaccgagattagagagaaactggccaagatgtacaaaactaccccagacgttatcttcgtgttcggattccgaacccactttggtggcggaaagactacagggtttggaatgatctacgattccctggactatgccaaaaagaatgaacccaagcacaggctagcgaggcatggactttacgaaaaaaaaaaaacctcccggaagcagcgcaaagagagaaagaatcgcatgaagaaggtgcgcggaacagcgaaggctaacgtgggggcaggaaagaagcagaagtag

SEQ ID NO: 53097 - DNA, 557 bp, Artificial Sequence
  derived and/or modified sequence
cttttcctccttggctgtctgaagatagatcgccatcatgaacgacaccgtaactatccgcactagaaagttcatgaccaaccgactacttcagaggaaacaaatggtcattgatgtccttcaccccgggaaggcgacagtgcctaagacagaaattcgggaaaaactagccaaaatgtacaagaccacaccggatgtcatctttgtatttggattcagaactcattttggtggtggcaagacaactggctttggcatgatttatgattccctggattatgcaaagaaaaatgaacccaaacatagacttgcaagacatggcctgtatgagaagaaaaagacctcaagaaagcaacgaaaggaacgcaagaacagaatgaagaaagtcagggggactgcaaaggccaatgttggtgctggcaaaaagcagaaatgaagtgtctagcagtgagctggagattggatcacagccgaaggagtaaaggtgctgcaatgatgttagctgtggccactgtggatttttcgcaagaacattaataaactaaaaacttcatgtg

SEQ ID NO: 53098 - DNA, 399 bp, Artificial Sequence
  derived and/or modified sequence
atgaacgacaccgtgaccatcagaaccagaaagttcatgaccaacagactgctgcagagaaagcagatggtgatcgacgtgctgcaccccggcaaggccaccgtgcccaagaccgagatcagagagaagctggccaagatgtacaagaccacccccgacgtgatcttcgtgttcggcttcagaacccacttcggcggcggcaagaccaccggcttcggcatgatctacgacagcctggactacgccaagaagaacgagcccaagcacagactggccagacacggcctgtacgagaagaagaagaccagcagaaagcagagaaaggagagaaagaacagaatgaagaaggtgagaggcaccgccaaggccaacgtgggcgccggcaagaagcagaagtag

SEQ ID NO: 53099 - protein, 130 aa, Artificial Sequence
  derived and/or modified sequence
MNDTVTIRTRKFMTNRLLQRKQMVIDVLHPGKATVPKTEIREKLAKMYKTTPDVIFVFGFRTHFGGGKTTGFGMIYDSLDYAKKNEPKHRLARHGLYEKKKTSRKQRKERKNRMKKVRGTAKANVGAGKK

SEQ ID NO: 53100 - protein, 132 aa, Artificial Sequence
  derived and/or modified sequence
MNDTVTIRTRKFMTNRLLQRKQMVIDVLHPGKATVPKTEIREKLAKMYKTTPDVIFVFGFRTHFGGGKTTGFGMIYDSLDYAKKNEPKHRLARHGLYEKKKTSRKQRKERKNRMKKVRGTAKANVGAGKKQK

SEQ ID NO: 53101 - protein, 131 aa, Artificial Sequence
  derived and/or modified sequence
MNDTVTIRTRKFMTNRLLQRKQMVIDVLHPGKATVPKTEIREKLAKMYKTTPDVIFVFGFRTHFGGGKTTGFGMIYDSLDYAKKNEPKHRLARHGLYEKKKTSRKQRKERKNRMKKVRGTAKANVGAGKKQ

SEQ ID NO: 53102 - protein, 289 aa, Artificial Sequence
  derived and/or modified sequence
MNDTVTIRTRKFMTNRLLQRKQMVIDVLHPGKATVPKTEIREKLAKMYKTTPDVIFVFGFRTHFGGGKTTGFGMIYDSLDYAKKNEPKHRLARHGLYEKKKTSRKQRKERKNRMKKVRGTAKANVGAGKKMRELGLGVQALGRISQEERCTDVKNSKARESRGVVWQVEVPGPWSVWTCGRLRRGCGKYLQVAVTWRKTENREQCCQACLLERALVRNGAFMSPASPAPAGSPHPVDGDLVLHLPEALSATLTLSPHIQAINKSFGPFFEIHQESSCFSPPSCLSGLGH

SEQ ID NO: 53103 - DNA, 870 bp, Artificial Sequence
  derived and/or modified sequence
atgaatgacaccgtaaccattcgtacgaggaagttcatgactaacaggctccttcagaggaagcagatggtgattgacgtgctgcaccctggcaaagcaactgtcccaaagacagagatccgcgagaagctggctaagatgtacaagacaacacctgacgtgatcttcgtttttgggttcaggacccactttggaggcggcaagacgacaggtttcggtatgatctatgattctctcgattacgcaaaaaagaatgaaccgaagcacagattggcacggcacggcctctatgagaaaaagaagacgtcccgaaaacagagaaaggaacggaagaacaggatgaaaaaagttagaggcacagcaaaggcaaatgtgggggccggaaaaaagatgcgcgaactgggcctgggagttcaagctctggggcgtatatctcaggaggagcgctgtacggatgtaaagaattcaaaagcgcgcgagtccagaggggtcgtctggcaagtcgaagtgccaggtccgtggtccgtgtggacctgtggcagactgaggagggggtgcggtaagtacctacaggtcgcagtgacctggaggaaaaccgagaaccgcgagcagtgttgtcaggcctgcctcctggaaagagctctggtgcgaaacggggccttcatgtcaccagcctcacccgcccccgcagggtctcctcatccggtcgatggcgatctggtccttcatctgccagaggcgctgagcgctacactgactctgtccccacacatacaggcgataaataagtccttcggaccattcttcgagatccatcaggaaagttcatgcttttcgcctcccagttgtttaagcgggctggggcactag

SEQ ID NO: 53104 - DNA, 870 bp, Artificial Sequence
  derived and/or modified sequence
atgaatgacacagtgaccatccgcaccaggaagttcatgaccaaccggctgctgcagaggaagcagatggtgattgatgtgctgcaccctgggaaggccaccgtgcccaagacagagatccgggagaagctggccaagatgtacaagaccaccccagatgtgatctttgtgtttggcttccgcacccactttggaggcggcaagaccaccggcttcggcatgatctatgacagcctggactatgccaagaagaatgagcccaagcaccggctggcccggcacggcctgtatgagaagaagaagaccagcaggaagcagaggaaggagaggaagaacaggatgaagaaggtgcggggcacagccaaggccaacgtgggcgccggcaagaagatgagggagctgggcctgggcgtgcaggccctgggccgcatcagccaggaggagcgctgcacagatgtgaagaacagcaaggcccgggagagcagaggagtggtgtggcaggtggaggtgcccggcccctggagcgtgtggacctgtggccgcctgcggcggggctgtgggaagtacctgcaggtggccgtgacctggaggaagacagagaaccgggagcagtgctgccaggcctgcctgctggagcgggccctggtgagaaatggagccttcatgagccctgccagccctgccccagctggcagcccccaccctgtggatggagacctggtgctgcacctgcctgaggccctgagcgccaccctgaccctgagcccccacatccaggccatcaacaagagctttggccccttctttgagatccaccaggagagcagctgcttcagcccccccagctgcctgagcggcctgggccactag

SEQ ID NO: 53105 - DNA, 870 bp, Artificial Sequence
  derived and/or modified sequence
atgaacgacaccgtgaccatccggacccggaagttcatgaccaaccggctgctccaaagaaaacagatggtgatagacgtcctgcacccaggaaaggccaccgtacccaaaactgaaatccgagagaaactggcgaaaatgtacaagacgacaccagatgtgatattcgtattcgggtttaggacacatttcgggggtgggaagactaccgggtttggaatgatctatgactctcttgactatgcgaaaaagaacgaaccaaaacatcgtttggctaggcacggattgtacgagaaaaaaaaaacgtcaaggaaacagcgtaaggagagaaaaaatcgcatgaaaaaagtgcgcggcacagcaaaagcaaatgtcggcgctgggaagaagatgcgggagctggggctcggcgttcaagcgctgggacggatttcccaagaggagaggtgtactgatgtgaaaaacagcaaggcccgagaatccaggggagttgtttggcaagtagaggttcccggcccatggtccgtttggacatgtggtcgactaagaagagggtgtggaaaatatctccaggtcgccgtaacctggagaaaaacggaaaatcgtgaacagtgttgccaggcttgtctcctcgaaagggctctggttcgcaacggagctttcatgagtcctgcctctccagcccccgcgggtagcccgcatcctgttgatggagacctagtgctacacctacccgaggctctatctgcaacattaaccctgtcaccacatatacaagcaatcaacaagtcctttggcccctttttcgagatccatcaggagagtagttgcttctctccgccaagctgcttgagcgggctgggccattag

SEQ ID NO: 53106 - DNA, 870 bp, Artificial Sequence
  derived and/or modified sequence
atgaacgataccgtaacaattcggacgcggaaatttatgacaaatcggttgctgcagcggaagcagatggtgattgacgttctccatccaggcaaggcaacagtgcccaagacagagataagagagaagttggccaagatgtataaaacaacgcctgacgttatctttgtgtttgggtttcggactcacttcggtggaggaaagaccaccggtttcggaatgatttacgactctctggattatgctaagaaaaacgaaccaaagcacaggctcgctaggcatggcctgtacgaaaagaaaaaaaccagccggaagcagcggaaggaaaggaaaaaccgaatgaagaaggtgcgtgggaccgctaaggctaatgtcggtgcaggtaagaaaatgagagaactcggtctcggtgtgcaggcgctgggaaggattagtcaggaagagaggtgcacggacgtcaaaaacagcaaagccagggaaagcaggggggttgtgtggcaggtagaagtacctggtccttggagcgtgtggacctgcggcagattacggaggggttgcggcaagtatctccaagtggctgttacttggaggaagacggagaaccgagagcagtgttgtcaggcctgtttgcttgagcgcgcactagttcgcaacggcgcatttatgagcccagccagccctgcccctgccggaagcccccacccagttgatggcgacctcgttctgcacctccctgaagccctatcagcgacattgacgttgtctcctcacattcaggccattaataaaagctttggtccattcttcgagatccaccaggagtcaagctgcttttcacctccttcgtgcctgtccggattaggccactag

SEQ ID NO: 53107 - DNA, 2814 bp, Artificial Sequence
  derived and/or modified sequence
aggcatcggcgcggtcagcctcgtggcgcgcccacgcccccacgccggctcttcccggggtccttccgtgcgcgttgatatgattggccggcgaatcgtggttctcttttcctccttggctgtctgaagatagatcgccatcatgaacgacaccgtaactatccgcactagaaagttcatgaccaaccgactacttcagaggaaacaaatggtcattgatgtccttcaccccgggaaggcgacagtgcctaagacagaaattcgggaaaaactagccaaaatgtacaagaccacaccggatgtcatctttgtatttggattcagaactcattttggtggtggcaagacaactggctttggcatgatttatgattccctggattatgcaaagaaaaatgaacccaaacatagacttgcaagacatggcctgtatgagaagaaaaagacctcaagaaagcaacgaaaggaacgcaagaacagaatgaagaaagtcagggggactgcaaaggccaatgttggtgctggcaaaaagatgagggaattggggcttggagtgcaagcattgggaagaatttcccaggaagagagatgcacagatgtgaagaactcgaaggcaagagaaagccggggggttgtgtggcaggtagaagtgccaggaccgtggagcgtgtggacatgtggcagattgcggaggggctgtggcaagtatttacaggtggccgttacctggaggaagactgaaaacagagaacagtgctgccaggcgtgccttttggagagggcactggtcagaaacggagccttcatgtcgcctgcctcacctgctcctgctggttctccccaccctgtggacggtgacttggtcctccacttgccagaagccttgtcagcaaccttgactctgtcaccccacatccaggccatcaacaagtcttttggccctttctttgaaatccaccaggaatccagctgcttctccccaccttcctgcctctctggtctgggccactaatgtcactgccatggccgccttgctgcatttctgaggatgcttcatctctccaccttcttctccactcagcagccagcagggcactgtggaaatcggagtcacatgagctggcacctctgttcagaaccctccagggctccacatctctctcacccaaatgccaaagacctccccacgcccccacaatcccccacgacctggccactggcctcccaccaccttccagctccagcggctcctaccacatttaaggctttccttcctagttttaatttttcctcgtcagcagttgattttattattttcttgtttattggtattttcccactagaaatgaagctgcgtgaagttagagatttttttttttggtctgtgttcctaattagctcattgctatacccctggcgcccagaacaatgccttggacacagtacgcagtagactaaataaatacttgttgaatgactgactgacggaatgacggctgtgtggggagtggattgggtcgtgaggcagaggctgcggtggaaactcaggcaggaggtgatggtggttcttggggctgcggaatgccaagtttagaagctcttcctctgctgtggcacatgaaccggtcactcgagaaggcttttagatttactttgcctaatcccctcttagtgcatgtggggaaactgaggtacacaaaaggaattccccaccaagttaggggcagaacctagcccccttgtctcccagatggatatcttcttttttttttgagacggagtcttgctctgttgcccaggctggagtgcagtggtaccatcttggctcactgcaacctctgcttcccaggttcaagcgattctcctgcctcagcctcctgagtgtctgcgattacaggtgcacacaaccacgcctggctaatttttgtatttttagtagagacggggtttcaccgtgttggtcagggtgacctcaaactcctgacctcatgatccacccagctcagcctcccaacgtgctgggattacaggcatgagccaccgtgcctggctggacatcttgttattaaagcttcttctctctttgtaggggagggggagatgcctctggtggagaagaccagtgtggcagtgactgtgtctgttagtgaacctggtggctggttgagggtctgtcgtggtgactgaggacacatacaaagtgcttttctcagtggtcaccttggtgttggtgaataagggtcagaagatggctcctgtcctagggcactgccagtcggtttggaagctgaaatgcctgcttagcagtttgaggaaacacagaccttggaggatcttctggttgcctcttcaagaattcattctattccccttctgctccccaaatttgcttttcttggggtgggtcttggttggcctaagccaagaaagtatggcatctactccttccatagcaatagctcaggaataggcagtgacccagacctgaaccaatcagtgcatggaattacccctggccaaagtggttgattgaggctgggtgcaagcagagttgtgagaaggctcccatttggtggttggagagatcgcacttgctccagaggtcataatgtgcagatctgaggcttggaactgctgcagacattttgctaccacaagtgaagccaccctgacgacacagttgacaatttggagcagggcagagctgagagaacagcagggaaacagccagagtcttgctcaagcctccctgaagtatctatacccctggactctagttatgggggctaataaatgttatatactgtttaaggt

SEQ ID NO: 53108 - DNA, 870 bp, Artificial Sequence
  derived and/or modified sequence
atgaacgacaccgtgaccatcagaaccagaaagttcatgaccaacagactgctgcagagaaagcagatggtgatcgacgtgctgcaccccggcaaggccaccgtgcccaagaccgagatcagagagaagctggccaagatgtacaagaccacccccgacgtgatcttcgtgttcggcttcagaacccacttcggcggcggcaagaccaccggcttcggcatgatctacgacagcctggactacgccaagaagaacgagcccaagcacagactggccagacacggcctgtacgagaagaagaagaccagcagaaagcagagaaaggagagaaagaacagaatgaagaaggtgagaggcaccgccaaggccaacgtgggcgccggcaagaagatgagagagctgggcctgggcgtgcaggccctgggcagaatcagccaggaggagagatgcaccgacgtgaagaacagcaaggccagagagagcagaggcgtggtgtggcaggtggaggtgcccggcccctggagcgtgtggacctgcggcagactgagaagaggctgcggcaagtacctgcaggtggccgtgacctggagaaagaccgagaacagagagcagtgctgccaggcctgcctgctggagagagccctggtgagaaacggcgccttcatgagccccgccagccccgcccccgccggcagcccccaccccgtggacggcgacctggtgctgcacctgcccgaggccctgagcgccaccctgaccctgagcccccacatccaggccatcaacaagagcttcggccccttcttcgagatccaccaggagagcagctgcttcagcccccccagctgcctgagcggcctgggccactag

SEQ ID NO: 53109 - protein, 1091 aa, Artificial Sequence
  derived and/or modified sequence
MAKRKEENFSSPKNAKRPRQEELEDFDKDGDEDECKGTTLTAAEVGIIESIHLKNFMCHSMLGPFKFGSNVNFVVGNNGSGKSAVLTALIVGLGGRAVATNRGSSLKGFVKDGQNSADISITLRNRGDDAFKASVYGNSILIQQHISIDGSRSYKLKSATGSVVSTRKEELIAILDHFNIQVDNPVSVLTQEMSKQFLQSKNEGDKYKFFMKATQLEQMKEDYSYIMETKERTKEQIHQGEERLTELKRQCVEKEERFQSIAGLSTMKTNLESLKHEMAWAVVNEIEKQLNAIRDNIKIGEDRAARLDRKMEEQQVRLNEAEQKYKDIQDKLEKISEETNARAPECMALKADVVAKKRAYNEAEVLYNRSLNEYKALKKDDEQLCKRIEELKKSTDQSLEPERLERQKKISWLKERVKAFQNQENSVNQEIEQFQQAIEKDKEEHGKIKREELDVKHALSYNQRQLKELKDSKTDRLKRFGPNVPALLEAIDDAYRQGHFTYKPVGPLGACIHLRDPELALAIESCLKGLLQAYCCHNHADERVLQALMKRFYLPGTSRPPIIVSEFRNEIYDVRHRAAYHPDFPTVLTALEIDNAVVANSLIDMRGIETVLLIKNNSVARAVMQSQKPPKNCREAFTADGDQVFAGRYYSSENTRPKFLSRDVDSEISDLENEVENKTAQILNLQQHLSALEKDIKHNEELLKRCQLHYKELKMKIRKNISEIRELENIEEHQSVDIATLEDEAQENKSKMKMVEEHMEQQKENMEHLKSLKIEAENKYDAIKFKINQLSELADPLKDELNLADSEVDNQKRGKRHYEEKQKEHLDTLNKKKRELDMKEKELEEKMSQARQICPERIEVEKSASILDKEINRLRQKIQAEHASHGDREEIMRQYQEARETYLDLDSKVRTLKKFIKLLGEIMEHRFKTYQQFRRCLTLRCKLYFDNLLSQRAYCGKMNFDHKNETLSISVQPGEGNKAAFNDMRALSGGERSFSTVCFILSLWSIAESPFRCLDEFDVYMDMVNRRIAMDLILKMADSQRFRQFILLTPQSMSSLPSSKLIRILRMSDPERGQTTLPFRPVTQEEDDDQR

SEQ ID NO: 53110 - protein, 1117 aa, Artificial Sequence
  derived and/or modified sequence
MAKRKEENFSSPKNAKRPRQEELEDFDKDGDEDECKGTTLTAAEVGIIESIHLKNFMCHSMLGPFKFGSNVNFVVGNNGSWSAVVRSRLNATSASQVQAILLFQPCGKSAVLTALIVGLGGRAVATNRGSSLKGFVKDGQNSADISITLRNRGDDAFKASVYGNSILIQQHISIDGSRSYKLKSATGSVVSTRKEELIAILDHFNIQVDNPVSVLTQEMSKQFLQSKNEGDKYKFFMKATQLEQMKEDYSYIMETKERTKEQIHQGEERLTELKRQCVEKEERFQSIAGLSTMKTNLESLKHEMAWAVVNEIEKQLNAIRDNIKIGEDRAARLDRKMEEQQVRLNEAEQKYKDIQDKLEKISEETNARAPECMALKADVVAKKRAYNEAEVLYNRSLNEYKALKKDDEQLCKRIEELKKSTDQSLEPERLERQKKISWLKERVKAFQNQENSVNQEIEQFQQAIEKDKEEHGKIKREELDVKHALSYNQRQLKELKDSKTDRLKRFGPNVPALLEAIDDAYRQGHFTYKPVGPLGACIHLRDPELALAIESCLKGLLQAYCCHNHADERVLQALMKRFYLPGTSRPPIIVSEFRNEIYDVRHRAAYHPDFPTVLTALEIDNAVVANSLIDMRGIETVLLIKNNSVARAVMQSQKPPKNCREAFTADGDQVFAGRYYSSENTRPKFLSRDVDSEISDLENEVENKTAQILNLQQHLSALEKDIKHNEELLKRCQLHYKELKMKIRKNISEIRELENIEEHQSVDIATLEDEAQENKSKMKMVEEHMEQQKENMEHLKSLKIEAENKYDAIKFKINQLSELADPLKDELNLADSEVDNQKRGKRHYEEKQKEHLDTLNKKKRELDMKEKELEEKMSQARQICPERIEVEKSASILDKEINRLRQKIQAEHASHGDREEIMRQYQEARETYLDLDSKVRTLKKFIKLLGEIMEHRFKTYQQFRRCLTLRCKLYFDNLLSQRAYCGKMNFDHKNETLSISVQPGEGNKAAFNDMRALSGGERSFSTVCFILSLWSIAESPFRCLDEFDVYMDMVNRRIAMDLILKMADSQRFRQFILLTPQSMSSLPSSKLIRILRMSDPERGQTTLPFRPVTQEEDDDQR

SEQ ID NO: 53111 - DNA, 3276 bp, Artificial Sequence
  derived and/or modified sequence
atggccaagagaaaggaggagaacttcagcagccccaagaacgccaagagacccagacaggaggagctggaggacttcgacaaggacggcgacgaggacgagtgcaagggcaccaccctgaccgccgccgaggtgggcatcatcgagagcatccacctgaagaacttcatgtgccacagcatgctgggccccttcaagttcggcagcaacgtgaacttcgtggtgggcaacaacggcagcggcaagagcgccgtgctgaccgccctgatcgtgggcctgggcggcagagccgtggccaccaacagaggcagcagcctgaagggcttcgtgaaggacggccagaacagcgccgacatcagcatcaccctgagaaacagaggcgacgacgccttcaaggccagcgtgtacggcaacagcatcctgatccagcagcacatcagcatcgacggcagcagaagctacaagctgaagagcgccaccggcagcgtggtgagcaccagaaaggaggagctgatcgccatcctggaccacttcaacatccaggtggacaaccccgtgagcgtgctgacccaggagatgagcaagcagttcctgcagagcaagaacgagggcgacaagtacaagttcttcatgaaggccacccagctggagcagatgaaggaggactacagctacatcatggagaccaaggagagaaccaaggagcagatccaccagggcgaggagagactgaccgagctgaagagacagtgcgtggagaaggaggagagattccagagcatcgccggcctgagcaccatgaagaccaacctggagagcctgaagcacgagatggcctgggccgtggtgaacgagatcgagaagcagctgaacgccatcagagacaacatcaagatcggcgaggacagagccgccagactggacagaaagatggaggagcagcaggtgagactgaacgaggccgagcagaagtacaaggacatccaggacaagctggagaagatcagcgaggagaccaacgccagagcccccgagtgcatggccctgaaggccgacgtggtggccaagaagagagcctacaacgaggccgaggtgctgtacaacagaagcctgaacgagtacaaggccctgaagaaggacgacgagcagctgtgcaagagaatcgaggagctgaagaagagcaccgaccagagcctggagcccgagagactggagagacagaagaagatcagctggctgaaggagagagtgaaggccttccagaaccaggagaacagcgtgaaccaggagatcgagcagttccagcaggccatcgagaaggacaaggaggagcacggcaagatcaagagagaggagctggacgtgaagcacgccctgagctacaaccagagacagctgaaggagctgaaggacagcaagaccgacagactgaagagattcggccccaacgtgcccgccctgctggaggccatcgacgacgcctacagacagggccacttcacctacaagcccgtgggccccctgggcgcctgcatccacctgagagaccccgagctggccctggccatcgagagctgcctgaagggcctgctgcaggcctactgctgccacaaccacgccgacgagagagtgctgcaggccctgatgaagagattctacctgcccggcaccagcagaccccccatcatcgtgagcgagttcagaaacgagatctacgacgtgagacacagagccgcctaccaccccgacttccccaccgtgctgaccgccctggagatcgacaacgccgtggtggccaacagcctgatcgacatgagaggcatcgagaccgtgctgctgatcaagaacaacagcgtggccagagccgtgatgcagagccagaagccccccaagaactgcagagaggccttcaccgccgacggcgaccaggtgttcgccggcagatactacagcagcgagaacaccagacccaagttcctgagcagagacgtggacagcgagatcagcgacctggagaacgaggtggagaacaagaccgcccagatcctgaacctgcagcagcacctgagcgccctggagaaggacatcaagcacaacgaggagctgctgaagagatgccagctgcactacaaggagctgaagatgaagatcagaaagaacatcagcgagatcagagagctggagaacatcgaggagcaccagagcgtggacatcgccaccctggaggacgaggcccaggagaacaagagcaagatgaagatggtggaggagcacatggagcagcagaaggagaacatggagcacctgaagagcctgaagatcgaggccgagaacaagtacgacgccatcaagttcaagatcaaccagctgagcgagctggccgaccccctgaaggacgagctgaacctggccgacagcgaggtggacaaccagaagagaggcaagagacactacgaggagaagcagaaggagcacctggacaccctgaacaagaagaagagagagctggacatgaaggagaaggagctggaggagaagatgagccaggccagacagatctgccccgagagaatcgaggtggagaagagcgccagcatcctggacaaggagatcaacagactgagacagaagatccaggccgagcacgccagccacggcgacagagaggagatcatgagacagtaccaggaggccagagagacctacctggacctggacagcaaggtgagaaccctgaagaagttcatcaagctgctgggcgagatcatggagcacagattcaagacctaccagcagttcagaagatgcctgaccctgagatgcaagctgtacttcgacaacctgctgagccagagagcctactgcggcaagatgaacttcgaccacaagaacgagaccctgagcatcagcgtgcagcccggcgagggcaacaaggccgccttcaacgacatgagagccctgagcggcggcgagagaagcttcagcaccgtgtgcttcatcctgagcctgtggagcatcgccgagagccccttcagatgcctggacgagttcgacgtgtacatggacatggtgaacagaagaatcgccatggacctgatcctgaagatggccgacagccagagattcagacagttcatcctgctgaccccccagagcatgagcagcctgcccagcagcaagctgatcagaatcctgagaatgagcgaccccgagagaggccagaccaccctgcccttcagacccgtgacccaggaggaggacgacgaccagagatag

SEQ ID NO: 53112 - DNA, 3354 bp, Artificial Sequence
  derived and/or modified sequence
atggccaagagaaaggaggagaacttcagcagccccaagaacgccaagagacccagacaggaggagctggaggacttcgacaaggacggcgacgaggacgagtgcaagggcaccaccctgaccgccgccgaggtgggcatcatcgagagcatccacctgaagaacttcatgtgccacagcatgctgggccccttcaagttcggcagcaacgtgaacttcgtggtgggcaacaacggcagctggagcgccgtggtgagaagcagactgaacgccaccagcgccagccaggtgcaggccatcctgctgttccagccctgcggcaagagcgccgtgctgaccgccctgatcgtgggcctgggcggcagagccgtggccaccaacagaggcagcagcctgaagggcttcgtgaaggacggccagaacagcgccgacatcagcatcaccctgagaaacagaggcgacgacgccttcaaggccagcgtgtacggcaacagcatcctgatccagcagcacatcagcatcgacggcagcagaagctacaagctgaagagcgccaccggcagcgtggtgagcaccagaaaggaggagctgatcgccatcctggaccacttcaacatccaggtggacaaccccgtgagcgtgctgacccaggagatgagcaagcagttcctgcagagcaagaacgagggcgacaagtacaagttcttcatgaaggccacccagctggagcagatgaaggaggactacagctacatcatggagaccaaggagagaaccaaggagcagatccaccagggcgaggagagactgaccgagctgaagagacagtgcgtggagaaggaggagagattccagagcatcgccggcctgagcaccatgaagaccaacctggagagcctgaagcacgagatggcctgggccgtggtgaacgagatcgagaagcagctgaacgccatcagagacaacatcaagatcggcgaggacagagccgccagactggacagaaagatggaggagcagcaggtgagactgaacgaggccgagcagaagtacaaggacatccaggacaagctggagaagatcagcgaggagaccaacgccagagcccccgagtgcatggccctgaaggccgacgtggtggccaagaagagagcctacaacgaggccgaggtgctgtacaacagaagcctgaacgagtacaaggccctgaagaaggacgacgagcagctgtgcaagagaatcgaggagctgaagaagagcaccgaccagagcctggagcccgagagactggagagacagaagaagatcagctggctgaaggagagagtgaaggccttccagaaccaggagaacagcgtgaaccaggagatcgagcagttccagcaggccatcgagaaggacaaggaggagcacggcaagatcaagagagaggagctggacgtgaagcacgccctgagctacaaccagagacagctgaaggagctgaaggacagcaagaccgacagactgaagagattcggccccaacgtgcccgccctgctggaggccatcgacgacgcctacagacagggccacttcacctacaagcccgtgggccccctgggcgcctgcatccacctgagagaccccgagctggccctggccatcgagagctgcctgaagggcctgctgcaggcctactgctgccacaaccacgccgacgagagagtgctgcaggccctgatgaagagattctacctgcccggcaccagcagaccccccatcatcgtgagcgagttcagaaacgagatctacgacgtgagacacagagccgcctaccaccccgacttccccaccgtgctgaccgccctggagatcgacaacgccgtggtggccaacagcctgatcgacatgagaggcatcgagaccgtgctgctgatcaagaacaacagcgtggccagagccgtgatgcagagccagaagccccccaagaactgcagagaggccttcaccgccgacggcgaccaggtgttcgccggcagatactacagcagcgagaacaccagacccaagttcctgagcagagacgtggacagcgagatcagcgacctggagaacgaggtggagaacaagaccgcccagatcctgaacctgcagcagcacctgagcgccctggagaaggacatcaagcacaacgaggagctgctgaagagatgccagctgcactacaaggagctgaagatgaagatcagaaagaacatcagcgagatcagagagctggagaacatcgaggagcaccagagcgtggacatcgccaccctggaggacgaggcccaggagaacaagagcaagatgaagatggtggaggagcacatggagcagcagaaggagaacatggagcacctgaagagcctgaagatcgaggccgagaacaagtacgacgccatcaagttcaagatcaaccagctgagcgagctggccgaccccctgaaggacgagctgaacctggccgacagcgaggtggacaaccagaagagaggcaagagacactacgaggagaagcagaaggagcacctggacaccctgaacaagaagaagagagagctggacatgaaggagaaggagctggaggagaagatgagccaggccagacagatctgccccgagagaatcgaggtggagaagagcgccagcatcctggacaaggagatcaacagactgagacagaagatccaggccgagcacgccagccacggcgacagagaggagatcatgagacagtaccaggaggccagagagacctacctggacctggacagcaaggtgagaaccctgaagaagttcatcaagctgctgggcgagatcatggagcacagattcaagacctaccagcagttcagaagatgcctgaccctgagatgcaagctgtacttcgacaacctgctgagccagagagcctactgcggcaagatgaacttcgaccacaagaacgagaccctgagcatcagcgtgcagcccggcgagggcaacaaggccgccttcaacgacatgagagccctgagcggcggcgagagaagcttcagcaccgtgtgcttcatcctgagcctgtggagcatcgccgagagccccttcagatgcctggacgagttcgacgtgtacatggacatggtgaacagaagaatcgccatggacctgatcctgaagatggccgacagccagagattcagacagttcatcctgctgaccccccagagcatgagcagcctgcccagcagcaagctgatcagaatcctgagaatgagcgaccccgagagaggccagaccaccctgcccttcagacccgtgacccaggaggaggacgacgaccagagatag

SEQ ID NO: 53113 - DNA, 3276 bp, Artificial Sequence
  derived and/or modified sequence
atggcaaaacggaaggaagagaattttagttctcctaagaacgctaagcggcctcggcaggaagagttggaagacttcgacaaggatggggatgaagacgaatgcaagggcactactctgacagctgcagaggtaggcatcatagagtccatacatttgaaaaactttatgtgtcacagcatgttgggccccttcaagtttggctctaatgtgaacttcgttgtggggaacaacgggtctggaaagagtgcggtactgacggcactgatagttgggctgggcggtcgggcagtggccactaacaggggtagttcacttaagggattcgtcaaagacggacaaaactctgctgacatttcaattaccctccgtaatagaggcgacgacgcttttaaggcatctgtttatgggaatagtatcctgatccaacagcatatcagcatcgacgggtcccgatcttacaagctcaagagcgccaccggaagcgttgtgagcactcgaaaagaagagctgattgccatcctggaccactttaacatccaggtggataacccggtctcggtcttgacacaggaaatgtcaaagcagttcctgcagtcgaagaatgaaggagacaaatacaagttctttatgaaggcaactcaattggagcaaatgaaagaggattacagctatataatggagactaaggaacgaacaaaggaacagattcaccagggcgaggaacgtctaacagagttaaaacggcagtgcgtggaaaaagaagaaagattccaatccatcgcaggcctgagtacaatgaaaactaacctggaaagtctgaagcacgagatggcctgggccgtcgtgaacgagatcgagaagcagctcaatgctatcagggacaatattaagataggcgaagatcgggcagcccgcctggatcggaagatggaggaacagcaggtgcgactgaacgaggccgaacagaaatacaaggacatacaggacaagctcgagaagatcagtgaggagacaaacgcacgggcccctgagtgtatggcgcttaaggctgacgtagttgcaaagaaaagagcctataacgaagcagaggtcttatacaatcgttcactgaacgaatacaaagcgttgaaaaaagatgacgaacagctttgtaaaagaattgaggaactgaaaaaatctacagatcagtctctggagcctgaaaggctggaacgtcagaaaaaaatcagttggttaaaggagcgcgtcaaggcgtttcagaaccaggagaattccgtcaaccaagagatagagcagtttcagcaggccatcgagaaagacaaggaggagcacggcaaaattaagcgcgaggagctggacgtgaaacacgctttaagctacaaccaacgtcagctgaaggagctgaaggactctaagacagacaggttgaagaggttcgggcccaacgtacccgccctgttggaagctatcgacgatgcctaccggcagggacacttcacgtacaagccagtgggtcctctgggtgcatgtatccacctgcgggatccagaactcgcgctggctatcgagagttgcctgaaaggcctgttgcaggcctattgttgtcacaatcacgctgatgaaagagtcttgcaagcgttaatgaaacggttctatctcccaggtaccagtcgcccccccatcattgtctctgaattcaggaatgagatatatgacgtaagacatcgggctgcctatcaccctgacttccccacggtcctgaccgcactggagatagacaatgcagtggttgccaatagccttattgatatgagagggattgaaacagtactgttaattaagaataactcagtggctcgggcggtcatgcagtcccaaaagcctcctaagaattgccgcgaagcctttaccgctgacggagatcaagtctttgcaggtaggtattattcttctgaaaacacgagacccaagttcctgtctcgtgacgtggactccgaaatctcagatcttgagaacgaggtggagaacaagacggcacagatcttaaatctccagcagcacctgtcagccttggagaaggatattaaacacaacgaggagcttctcaagagatgccaactacactacaaggagctaaagatgaagattcgcaagaatatttctgagatcagggaactggagaatattgaagagcaccaaagtgtggatattgctacgctggaggacgaggcccaggagaacaaaagcaaaatgaaaatggtagaagagcacatggagcagcagaaggagaacatggaacatctgaagagtttgaaaatcgaagccgaaaataaatatgacgcaattaagtttaaaatcaaccaactcagcgaactggcagatccgctcaaagatgagctcaacctcgcagatagcgaggtcgacaaccagaagcgcggcaagcggcactatgaggagaagcaaaaggagcacctggacacactgaacaagaaaaagcgggagctcgacatgaaagagaaggaattagaagaaaaaatgtcccaggcccgtcagatatgtcctgaacggattgaagtggaaaagagcgcttcgatcctggataaagagatcaaccggctgcgtcagaaaattcaggctgagcacgctagtcatggggaccgagaggagattatgagacaatatcaggaagctcgtgagacttacctcgatctcgatagtaaggtacgcactctaaagaagttcatcaaactgctgggggaaattatggaacaccgcttcaaaacttaccagcagtttcgcaggtgccttaccctgcgttgcaagctttatttcgacaatttactgtcccagcgagcctactgcggaaagatgaactttgatcacaaaaacgaaacacttagcatatctgtccagcctggtgaagggaataaggcagccttcaatgacatgcgcgcactttctggaggcgaacgcagctttagtactgtgtgcttcatcctctcattgtggagtattgctgaatcaccctttagatgtttagatgagttcgatgtatacatggacatggtgaatcgtaggatagctatggacctcattctgaaaatggccgacagtcagagattcaggcaatttatattgctgacccctcaaagcatgtcatctctcccttcttctaaactgatccggattcttaggatgagcgaccccgagcgaggacagacgacattgccttttcgacctgtcacgcaggaggaggatgacgatcagcggtag

SEQ ID NO: 53114 - DNA, 3354 bp, Artificial Sequence
  derived and/or modified sequence
atggcgaaacgcaaagaggagaatttttcgtcaccaaagaatgcgaagcggccacgccaggaggagctggaggattttgataaagacggcgacgaggatgagtgcaagggcaccactctgaccgcagctgaggtggggatcattgaaagcattcatcttaaaaactttatgtgtcactctatgttgggcccttttaaattcgggtccaatgtcaatttcgtcgtggggaacaatggctcctggagcgctgtggtgcgctcaaggctcaacgccacatcagcttcccaggtgcaagctatcctgctgtttcagccatgcggtaaaagcgctgttttgacggcactgatcgttggtctgggcggccgagctgtggcaaccaaccgtggctctagtctgaagggcttcgtgaaggatggtcagaatagtgcagatatttcgataacgctgagaaacagaggagatgatgcctttaaagcttcagtgtatggaaactcaatcctcatccagcagcacatctccatcgacgggtctcggtcttataagctcaaaagcgctacaggaagtgtggtctctacccgaaaggaagagcttattgcaatcttggatcacttcaacatccaggtagataaccccgtctccgttctgacacaagagatgtcaaagcagtttctccagtccaaaaacgagggagacaaatacaagttcttcatgaaagcgacccaactggaacagatgaaagaggattattcctacataatggagacgaaagaaaggaccaaagaacagatccaccaaggagaggagagactaacagagctcaaacggcagtgcgtggagaaggaagaaagatttcaatccatcgccggcctgtctacaatgaagacaaaccttgagtccctcaagcacgaaatggcttgggccgtggtgaacgaaattgagaagcaacttaacgcaatccgtgataacattaagatcggcgaggaccgcgccgccagattggaccgtaaaatggaggaacagcaggtgaggctgaacgaagccgagcagaagtataaggatatccaagacaaattggagaagatttctgaagagacaaacgcccgggcacccgaatgcatggctttgaaggccgatgtggtcgcaaagaagcgtgcatacaatgaagctgaggtgctctacaataggtccctcaacgaatacaaggccctgaagaaggatgacgaacagctgtgcaagaggattgaagaactcaagaaatctacagaccagagtttggagcccgagagactggaaaggcaaaagaagattagttggctgaaggagcgcgttaaggctttccagaaccaggagaatagcgtgaatcaagagatcgaacaatttcagcaagctattgaaaaggacaaagaggagcacggcaagattaagcgcgaagagttagacgtcaagcatgcactgtcttacaatcagcgacagctgaaggagctcaaggacagtaaaacagatcgactgaaaagattcgggcctaacgtccctgccctgctcgaggccatagatgacgcctaccggcagggccatttcacatataagccagtgggaccactcggtgcgtgcattcacctgcgagatccagaactggctctggccatcgaaagttgtctcaagggtctgctgcaagcctactgttgccataaccacgctgatgaacgagtgttgcaggcgctgatgaaacgattttatcttcccggcacgtcaagacctccaattatcgtctccgaattccgcaatgaaatttatgacgtgagacaccgagccgcctatcaccctgatttcccgactgtgctgaccgccctggagatcgacaatgccgtggtagcgaactcattaatcgatatgcgcggtattgaaaccgtgttgttgattaaaaacaactctgttgccagggccgtaatgcagagccaaaagcctccgaagaactgcagggaggcctttaccgcggatggtgaccaggtcttcgcaggacgctactatagttcagagaatactcgaccgaagttcctcagtagagacgttgattctgagatctctgatctggagaacgaagtggagaacaaaacagcacagatcttaaacctgcagcagcacttgagtgccctggagaaggatattaagcataacgaggaattgctgaagaggtgccaattacattacaaagaactcaaaatgaaaattcgtaagaacatctcagagatcagggagctggaaaacattgaagagcaccagagcgtagacatcgctaccctggaagatgaggcgcaagagaataagtcgaagatgaagatggtcgaagaacatatggaacaacagaaggaaaatatggaacacctcaagtcactcaaaatcgaagcagagaataagtatgacgccataaaattcaagatcaaccagttaagcgagctcgctgaccccctcaaggacgagttgaatcttgccgattctgaagtcgacaaccagaagagaggcaaacggcactatgaggaaaaacagaaagaacatttagacacgcttaacaagaagaagagagagctagacatgaaggaaaaagagctggaggagaaaatgagtcaggcaagacagatctgcccagaacggattgaggtcgaaaagtccgcatccattctggacaaggagattaaccgcttgagacaaaagattcaggccgagcacgcttcccatggcgaccgagaagaaatcatgcggcaatatcaggaagcccgagaaacctatctggatcttgattcaaaagtacgcacactcaaaaaatttatcaaattactcggggagataatggagcatagatttaaaacataccagcagttcagaagatgcctgacccttcgatgtaaattgtactttgataacctcctctcccagagagcctactgtggcaagatgaattttgaccacaaaaatgagactcttagtatcagcgtccagccgggggaaggtaataaagccgcatttaatgacatgagggcattgagcggcggggagcggtccttcagtaccgtgtgctttattctatccctttggtccatcgcagagtcccctttcaggtgcctcgacgaatttgacgtgtacatggatatggtgaaccgaagaatagcgatggatctgatcctgaagatggctgacagccaacgtttccgacagttcatcttactgacacctcagtccatgtcctctcttccctcatcgaaactgatccgaatcttgcgcatgagtgatccggaacggggccaaacaacactgcctttccggccagtcacgcaggaggaagatgatgaccaacgctag

SEQ ID NO: 53115 - DNA, 3276 bp, Artificial Sequence
  derived and/or modified sequence
atggctaagaggaaggaggagaatttctcctctccaaagaacgcaaaaagaccgcgccaggaagagttggaagacttcgataaagacggggacgaggatgagtgcaagggaacaaccttaacagcggcggaagtggggataattgagagcatccacctcaagaattttatgtgtcattcgatgctgggaccttttaagtttgggagcaacgtgaactttgtggtggggaataacgggtccggaaagagcgccgttctcacagctcttatcgtgggactcggtggccgggctgtagcaactaatcggggatcttcactgaaaggcttcgttaaggacggacagaacagtgctgacatctccatcaccttgcggaacagaggtgacgacgcctttaaagcttccgtgtatggaaacagcatcctcattcagcagcatatttccattgacggcagccgatcctataagctcaagtcagcaacgggtagcgtcgtgtctaccaggaaagaagaactgattgccatactggatcactttaacatccaggtggacaaccccgtttccgtattgactcaggagatgagcaaacagttcttacagtccaagaacgaaggggataagtataagttttttatgaaggccacacagctagagcagatgaaagaggactacagttatataatggagaccaaagagcgcaccaaggagcagatacatcaaggcgaagagagactcaccgaactcaaaaggcagtgtgtggaaaaggaagaaaggttccagagtatagctggattgagcaccatgaaaacaaacttggagtcactgaagcatgaaatggcctgggctgtggtgaatgagattgagaagcagctcaacgcgattcgggataacatcaaaattggagaggaccgcgcagcaagactggaccgtaagatggaagagcaacaggttcgcttaaacgaggcagaacagaagtacaaggatatccaggataagctcgagaagatctcagaggagacaaatgcccgggcaccagagtgcatggccctaaaggctgacgtggtggctaagaagagggcctacaatgaagctgaggtgctgtacaaccggagcctgaacgagtacaaagccctgaaaaaagacgacgagcagctgtgcaagagaatcgaggagctgaagaaaagcactgaccagtccctcgagcctgagaggctggagagacaaaagaagataagctggttgaaggagcgggtcaaagccttccaaaatcaggaaaactctgtgaatcaagaaatagaacagttccaacaggctatcgaaaaggacaaggaggagcacggcaagataaaaagggaggaactggatgttaaacacgccctctcatataaccagaggcagcttaaagagttgaaagattctaaaactgatagactgaagcgatttgggccaaatgtcccggccctgctggaggccattgatgacgcctaccgccagggccactttacatataaaccagtgggccctctgggagcctgcatccatctaagagacccagaactggcactcgccattgaatcatgtcttaagggactgctccaggcatattgttgccataaccatgctgacgaaagagtgctgcaggctctgatgaaacgattttacctcccaggtacatctaggcccccaatcatcgtctctgagtttaggaatgagatctacgacgtgcgtcacagagcagcataccatcctgatttccctacagtgctgacagctctggagattgacaacgccgttgtcgccaattccctcattgatatgcgtggcattgagacagttctgttgataaaaaataattctgttgcacgggctgttatgcagtctcagaagcctccaaagaattgccgtgaggcctttactgccgatggagaccaggtattcgcaggaagatattacagttcagagaataccaggcctaaatttctgtccagggacgtggactcagagatctctgatctggagaatgaagtggaaaacaagacggcacaaatactgaacctgcaacagcatctgagcgccctggaaaaggatattaagcacaacgaagaactcttgaaacggtgtcagctgcactacaaagagcttaaaatgaagattaggaaaaacatttccgagattagagaattagagaatatagaggaacatcaaagcgtggatatagcgaccctcgaggacgaagcacaggagaataaatccaaaatgaagatggtcgaggaacacatggaacagcagaaagaaaatatggagcatttaaagtcattaaagatcgaagccgaaaacaaatacgatgctattaagtttaagattaaccagctgtcagagcttgcagacccactcaaggacgaacttaatcttgcggacagcgaagtcgacaaccagaagagagggaagagacactatgaggaaaagcagaaagaacatctggataccttaaacaagaaaaagcgggagctggacatgaaggagaaggagctcgaagaaaagatgagccaggcacgtcaaatatgcccagagaggatcgaggtcgagaagtccgccagcatcctggataaggaaatcaacagattgcgccagaagatccaggctgagcatgcctcgcacggggatcgggaagaaatcatgagacagtaccaggaggctcgggagacatacctggacttggatagcaaggtcagaacacttaaaaagttcattaagctcctgggtgagataatggagcacagattcaaaacctaccagcagttccgccgttgcttgaccctgagatgtaaactgtattttgataacctgctgtcccagcgggcatattgtggcaagatgaactttgatcacaagaatgagacactcagcatcagtgtgcagccaggagaagggaacaaggcagcattcaatgacatgagagccctgagcgggggggaaagatcattctccactgtctgctttattttatccctctggagcattgctgagagtccctttaggtgcttggacgagtttgatgtatatatggacatggttaacaggaggatcgccatggatctgatcctgaagatggctgactcgcagaggttcagacagttcattctgctgactccgcaatcaatgtccagcttgccatcgtctaagctcatccgtatcctccggatgtctgatcccgagagggggcagactacccttcctttccggcctgtgacacaagaggaggacgatgatcaacgttag

SEQ ID NO: 53116 - DNA, 3276 bp, Artificial Sequence
  derived and/or modified sequence
atggccaagcgcaaggaagagaatttcagcagtcctaagaacgccaagaggccacgacaagaggaactagaagatttcgataaggatggggacgaggacgagtgcaaaggcaccactctgaccgccgctgaagtgggaattatcgagagtatccacttgaagaatttcatgtgtcacagcatgctcggcccttttaagtttggctccaacgtgaacttcgtggtgggaaacaatggctccggcaagtccgccgtgctgacagcactgatcgttggactcggaggccgggcggtagctacaaaccgcggatcatcccttaaaggctttgttaaagacgggcaaaacagcgccgacatttctatcactcttcgtaacagaggggatgatgcattcaaggctagcgtgtacggcaacagtatcttgatacagcaacacatctcaatcgacgggtctagatcgtataagctcaagtcggccaccgggagcgttgtcagcacgcggaaagaggagctgatcgcaatccttgaccattttaatatacaggtcgataacccagtgtcagtgctgactcaggaaatgagtaaacagtttcttcagtccaaaaacgagggggacaaatacaagttttttatgaaggccacacagctggagcagatgaaggaggactatagctatattatggagacaaaagagaggacgaaggaacaaatccatcagggcgaggaacggctgacggaattgaaaaggcagtgcgtggagaaggaagaaagatttcagagcatcgccggcctcagtactatgaagaccaacttagagtccttgaagcacgagatggcatgggcagtggtgaacgagatagaaaagcagttaaacgccatccgtgacaatatcaaaatcggcgaggatcgcgccgcccgccttgatcgcaagatggaggagcagcaggtcaggcttaacgaagccgaacagaagtacaaggacatccaggataaactggaaaagatctcggaagagacaaacgctagggcacccgagtgtatggcactgaaagctgatgttgtcgctaagaaacgggcctacaatgaagctgaggtcctttataaccgctctctgaacgagtataaagccctaaaaaaggacgatgaacagttgtgtaagcggattgaagaactaaaaaaatcgacagaccaaagtctggagcctgagcgtctcgagcggcagaagaaaatctcatggctaaaggagcgagtgaaagctttccagaaccaggaaaacagcgttaatcaggaaattgaacagttccaacaagccatagaaaaggataaggaggagcacggcaagatcaagagagaggaacttgacgtgaaacatgccttatcatacaatcagcgccagctcaaggagcttaaggactcaaagactgatcggctcaagaggttcggtccaaacgtccccgctctccttgaggctattgatgatgcctatagacaaggccattttacctacaaaccggtcggaccactgggtgcatgcattcatctgcgcgacccggaattggcactggctattgagagctgtctcaagggactcctccaagcttattgttgtcataaccacgccgatgagagagtgctgcaggcactgatgaagcgcttctatctgcctggcaccagtaggccgcctattatagtttcggagtttaggaatgaaatctacgatgtgcggcaccgcgccgcgtaccacccagattttccaaccgtgctgacagccttagagattgataatgccgtggtcgccaacagcctgatcgatatgcgggggatcgagaccgtactgctgatcaaaaataactcagtggctcgcgcagtaatgcagagccagaagcctccaaagaattgtcgggaggcctttaccgccgatggcgatcaggtttttgcaggccggtattactcttctgagaacactaggccgaaattcctatccagagacgtggattcagagatctctgacctcgagaacgaagtggagaataagaccgctcagatccttaatctccagcagcacctttccgctctagaaaaggatattaagcacaatgaggagctgttaaaaaggtgccagctacactacaaagagttaaaaatgaagattcgcaaaaacattagcgaaattcgggagctggagaatatcgaagaacaccagtcggtagacatagcaaccctggaagatgaggcgcaggagaataagagcaaaatgaagatggtagaggaacacatggaacaacaaaaagaaaacatggaacaccttaaatccctgaaaatagaagctgaaaacaaatatgatgcaattaaattcaagatcaatcagttgagcgagttggccgatccactcaaggacgagctgaatcttgccgacagcgaagtcgataaccagaagcgagggaagaggcactatgaggaaaagcagaaggaacacttggatacgctcaataagaagaagagagagctcgacatgaaagaaaaggagctggaagaaaagatgtctcaggcaagacagatttgccctgaaaggattgaggtcgaaaagtccgcgtccatcctggacaaggagattaatcgcctgcggcagaagatccaggccgagcacgcctcccacggagatagagaagagataatgagacagtaccaggaagcccgggaaacttacctggatctggatagtaaagtgaggaccctgaaaaaattcatcaagttacttggggaaattatggaacacaggtttaagacataccaacagttcagaaggtgtctcaccctgcgatgtaagttatacttcgacaatcttctcagtcagcgcgcctattgtgggaagatgaacttcgatcacaagaacgaaaccctctccatttctgttcagcccggagagggcaataaggctgccttcaatgacatgagggctttgagtgggggggagcgcagtttttccacagtgtgctttatcctcagtctgtggtcgatcgcggaatcaccttttcgttgtctggatgagtttgatgtgtacatggatatggttaaccgtcggattgccatggacctgatccttaagatggctgactcacagcggttcaggcaatttatcctgctaacacctcaatccatgtccagcttgccatcttccaaattgatccggatcctgaggatgagcgatccggagcgtggccagaccactcttccatttagaccagtgacccaagaagaggatgacgaccagcgatag

SEQ ID NO: 53117 - DNA, 3276 bp, Artificial Sequence
  derived and/or modified sequence
atggccaagaggaaggaggagaacttcagcagccccaagaatgccaagaggccccggcaggaggagctggaggactttgacaaggatggagatgaagatgagtgcaagggcaccaccctgacagctgctgaggtgggcatcatcgagagcatccacctgaagaacttcatgtgccacagcatgctgggccccttcaagtttggcagcaatgtgaactttgtggtgggcaacaacggcagcggcaagtctgctgtgctgacagccctgattgtgggcctgggcggccgggctgtggccaccaacagaggcagcagcctgaagggctttgtgaaggatggccagaacagcgctgacatcagcatcaccctgaggaacagaggagatgatgccttcaaggcctctgtgtatggcaacagcatcctgatccagcagcacatcagcattgatggcagccgcagctacaagctgaagagcgccaccggctctgtggtgtccaccaggaaggaggagctgattgccatcctggaccacttcaacatccaggtggacaaccctgtgtctgtgctgacccaggagatgagcaagcagttcctgcagagcaagaatgaaggagacaagtacaagttcttcatgaaggccacccagctggagcagatgaaggaggactacagctacatcatggagaccaaggagaggaccaaggagcagatccaccagggcgaggagcggctgacagagctgaagaggcagtgtgtggagaaggaggagcgcttccagagcattgctggcctgagcaccatgaagaccaacctggagagcctgaagcatgagatggcctgggccgtggtgaatgaaattgagaagcagctgaatgccatccgggacaacatcaagattggagaagatcgggccgcccggctggacaggaagatggaggagcagcaggtgcggctgaatgaagctgagcagaagtacaaggacatccaggacaagctggagaagatcagcgaggagaccaatgcccgggcccctgagtgcatggccctgaaggcagatgtggtggccaagaagagggcctacaatgaagctgaggtgctgtacaacagaagcctgaatgagtacaaggccctgaagaaggatgatgagcagctgtgcaagagaattgaggagctgaagaagagcacagaccagagcctggagcctgagcggctggagcggcagaagaagatctcctggctgaaggagcgggtgaaggccttccagaaccaggagaacagcgtgaaccaggagattgagcagttccagcaggccatcgagaaggacaaggaggagcacggcaagatcaagcgggaggagctggatgtgaagcacgccctgagctacaaccagaggcagctgaaggagctgaaggacagcaagacagaccggctgaagcgcttcggccccaacgtgcctgccctgctggaggccattgatgatgcctaccggcagggccacttcacctacaagcctgtgggccccctgggcgcctgcatccacctgcgggaccctgagctggccctggccatcgagagctgcctgaagggcctgctgcaggcctactgctgccacaaccacgcagatgagcgggtgctgcaggccctgatgaagcgcttctacctgcccggcaccagccggccccccatcatcgtgtctgagttcagaaatgagatctatgatgtgcgccaccgggccgcctaccacccagacttccccaccgtgctgacagccctggagattgacaatgctgtggtggccaacagcctgattgacatgaggggcatcgagaccgtgctgctgatcaagaacaacagcgtggcccgggctgtgatgcagagccagaagccacccaagaactgccgggaggccttcaccgcagatggagaccaggtgtttgctggccgctactacagcagcgagaacacccggcccaagttcctgagcagagatgtggacagcgagatcagtgacctggagaatgaggtggagaacaagacagcccagatcctgaacctgcagcagcacctgagcgccctggagaaggacatcaagcacaatgaggagctgctgaagcgctgccagctgcactacaaggagctgaagatgaagatcaggaagaacatcagcgagatccgggagctggagaacatcgaggagcaccagagcgtggacatcgccaccctggaggatgaggcccaggagaacaagagcaagatgaagatggtggaggagcacatggagcagcagaaggagaacatggagcacctgaagagcctgaagattgaagctgagaacaagtatgatgccatcaagttcaagatcaaccagctgtctgagctggccgaccccctgaaggatgagctgaacctggccgacagcgaggtggacaaccagaagaggggcaagaggcactatgaggagaagcagaaggagcacctggacaccctgaacaagaagaagcgggagctggacatgaaggagaaggagctggaggagaagatgagccaggcccggcagatctgcccagagcgcatcgaggtggagaagagcgccagcatcctggacaaggagatcaaccggctgcggcagaagatccaggccgagcacgccagccatggagaccgggaggagatcatgaggcagtaccaggaggcccgggagacctacctggacctggacagcaaggtgaggaccctgaagaagttcatcaagctgctgggggagatcatggagcaccgcttcaagacctaccagcagttccgccgctgcctgaccctgcgctgcaagctgtactttgacaacctgctgagccagagggcctactgcggcaagatgaactttgaccacaagaatgagaccctgagcatctctgtgcagcctggagagggcaacaaggccgccttcaatgacatgagggccctgagcggcggggagaggagcttcagcacagtgtgcttcatcctgagcctgtggagcattgctgagagccccttccgctgcctggatgaatttgatgtgtacatggacatggtgaacagacgcatcgccatggacctgatcctgaagatggctgacagccagcgcttccggcagttcatcctgctgaccccccagagcatgagcagcctgcccagcagcaagctgatccgcatcctgaggatgtctgaccctgagcggggccagaccaccctgcccttccggcctgtgacccaggaggaggatgatgaccagaggtag

SEQ ID NO: 53118 - DNA, 3354 bp, Artificial Sequence
  derived and/or modified sequence
atggccaagaggaaggaggagaacttcagcagccccaagaatgccaagaggccccggcaggaggagctggaggactttgacaaggatggagatgaagatgagtgcaagggcaccaccctgacagctgctgaggtgggcatcatcgagagcatccacctgaagaacttcatgtgccacagcatgctgggccccttcaagtttggcagcaatgtgaactttgtggtgggcaacaacggctcctggagcgctgtggtgcgcagccggctgaatgccaccagcgccagccaggtgcaggccatcctgctcttccagccctgtgggaagtctgctgtgctgacagccctgattgtgggcctgggcggccgggctgtggccaccaacagaggcagcagcctgaagggctttgtgaaggatggccagaacagcgctgacatcagcatcaccctgaggaacagaggagatgatgccttcaaggcctctgtgtatggcaacagcatcctgatccagcagcacatcagcattgatggcagccgcagctacaagctgaagagcgccaccggctctgtggtgtccaccaggaaggaggagctgattgccatcctggaccacttcaacatccaggtggacaaccctgtgtctgtgctgacccaggagatgagcaagcagttcctgcagagcaagaatgaaggagacaagtacaagttcttcatgaaggccacccagctggagcagatgaaggaggactacagctacatcatggagaccaaggagaggaccaaggagcagatccaccagggcgaggagcggctgacagagctgaagaggcagtgtgtggagaaggaggagcgcttccagagcattgctggcctgagcaccatgaagaccaacctggagagcctgaagcatgagatggcctgggccgtggtgaatgaaattgagaagcagctgaatgccatccgggacaacatcaagattggagaagatcgggccgcccggctggacaggaagatggaggagcagcaggtgcggctgaatgaagctgagcagaagtacaaggacatccaggacaagctggagaagatcagcgaggagaccaatgcccgggcccctgagtgcatggccctgaaggcagatgtggtggccaagaagagggcctacaatgaagctgaggtgctgtacaacagaagcctgaatgagtacaaggccctgaagaaggatgatgagcagctgtgcaagagaattgaggagctgaagaagagcacagaccagagcctggagcctgagcggctggagcggcagaagaagatctcctggctgaaggagcgggtgaaggccttccagaaccaggagaacagcgtgaaccaggagattgagcagttccagcaggccatcgagaaggacaaggaggagcacggcaagatcaagcgggaggagctggatgtgaagcacgccctgagctacaaccagaggcagctgaaggagctgaaggacagcaagacagaccggctgaagcgcttcggccccaacgtgcctgccctgctggaggccattgatgatgcctaccggcagggccacttcacctacaagcctgtgggccccctgggcgcctgcatccacctgcgggaccctgagctggccctggccatcgagagctgcctgaagggcctgctgcaggcctactgctgccacaaccacgcagatgagcgggtgctgcaggccctgatgaagcgcttctacctgcccggcaccagccggccccccatcatcgtgtctgagttcagaaatgagatctatgatgtgcgccaccgggccgcctaccacccagacttccccaccgtgctgacagccctggagattgacaatgctgtggtggccaacagcctgattgacatgaggggcatcgagaccgtgctgctgatcaagaacaacagcgtggcccgggctgtgatgcagagccagaagccacccaagaactgccgggaggccttcaccgcagatggagaccaggtgtttgctggccgctactacagcagcgagaacacccggcccaagttcctgagcagagatgtggacagcgagatcagtgacctggagaatgaggtggagaacaagacagcccagatcctgaacctgcagcagcacctgagcgccctggagaaggacatcaagcacaatgaggagctgctgaagcgctgccagctgcactacaaggagctgaagatgaagatcaggaagaacatcagcgagatccgggagctggagaacatcgaggagcaccagagcgtggacatcgccaccctggaggatgaggcccaggagaacaagagcaagatgaagatggtggaggagcacatggagcagcagaaggagaacatggagcacctgaagagcctgaagattgaagctgagaacaagtatgatgccatcaagttcaagatcaaccagctgtctgagctggccgaccccctgaaggatgagctgaacctggccgacagcgaggtggacaaccagaagaggggcaagaggcactatgaggagaagcagaaggagcacctggacaccctgaacaagaagaagcgggagctggacatgaaggagaaggagctggaggagaagatgagccaggcccggcagatctgcccagagcgcatcgaggtggagaagagcgccagcatcctggacaaggagatcaaccggctgcggcagaagatccaggccgagcacgccagccatggagaccgggaggagatcatgaggcagtaccaggaggcccgggagacctacctggacctggacagcaaggtgaggaccctgaagaagttcatcaagctgctgggggagatcatggagcaccgcttcaagacctaccagcagttccgccgctgcctgaccctgcgctgcaagctgtactttgacaacctgctgagccagagggcctactgcggcaagatgaactttgaccacaagaatgagaccctgagcatctctgtgcagcctggagagggcaacaaggccgccttcaatgacatgagggccctgagcggcggggagaggagcttcagcacagtgtgcttcatcctgagcctgtggagcattgctgagagccccttccgctgcctggatgaatttgatgtgtacatggacatggtgaacagacgcatcgccatggacctgatcctgaagatggctgacagccagcgcttccggcagttcatcctgctgaccccccagagcatgagcagcctgcccagcagcaagctgatccgcatcctgaggatgtctgaccctgagcggggccagaccaccctgcccttccggcctgtgacccaggaggaggatgatgaccagaggtag

SEQ ID NO: 53119 - DNA, 3276 bp, Artificial Sequence
  derived and/or modified sequence
atggccaagcggaaggaggagaacttcagcagccccaagaacgccaagcgaccgcgccaagaggagctcgaggactttgataaagacggggatgaggacgagtgtaaggggaccaccttgactgccgctgaggtggggatcattgagtctatccatctgaagaattttatgtgccacagcatgctcgggccgtttaagttcggctcgaacgtcaacttcgttgtaggcaacaacgggagtgggaagtctgcagtgttaaccgcactgatcgtcgggttgggcgggcgcgcggtcgcaacaaatcggggaagcagtctgaaagggttcgtaaaggacgggcagaactctgccgatatctcgataaccctgagaaataggggggatgacgcattcaaagcatccgtgtatggtaacagtatcttaatccagcagcacatatccatcgacggcagcaggagttacaaactgaagtctgccaccggatcggtcgtgagcacacgcaaagaagaactaatcgcaatactggatcactttaatatacaagttgacaatcctgtttccgtcctcacccaggagatgtcaaagcagttcctgcagtctaaaaacgaaggggacaaatacaaattctttatgaaggccactcagctggagcagatgaaggaggattatagctacatcatggaaacaaaggaacgtacgaaggagcagattcaccagggagaggaaaggttgactgaactgaaaaggcaatgcgtagagaaagaagagagattccagtctatcgcgggcttgtccacaatgaaaaccaatctcgagtccttgaagcacgaaatggcttgggcagtggtgaatgagattgagaaacaattgaatgccatcagagacaacattaaaatcggtgaagaccgggctgctagattggaccgcaaaatggaggagcagcaagtccgtctgaatgaagccgagcagaaatacaaggacatccaagataagttagaaaaaatcagtgaggagacaaatgctcgtgctccagagtgtatggccctgaaagcggatgtggtcgccaaaaagcgcgcctataacgaggccgaggtgttgtacaaccgctccctgaatgagtataaggctcttaagaaggacgatgaacagctgtgcaagcggattgaagagttgaagaagtcaactgatcagagcctcgagccagagaggttagagcgacagaagaaaatctcttggttgaaggagcgcgtgaaagctttccaaaaccaggagaactctgtgaaccaggagatcgaacagttccagcaggctatcgagaaagataaggaggagcacgggaagattaaacgggaggaactcgacgtgaagcatgccctgtcctacaatcagagacagttaaaggagctcaaggactcaaagactgatagactaaaacggttcggtccaaacgtacctgcactactggaagcgattgacgacgcctacagacagggacatttcacttataagccggttggcccacttggcgcatgtattcaccttagggatccggagctagcccttgcaattgagtcttgcctcaaggggctgctccaagcttactgctgccacaatcacgcagacgaaagagtcctgcaggcattgatgaaacgcttttacctgccggggacttcacgcccccccatcattgttagtgaattccgcaatgagatctacgacgttcgacacagggctgcctaccacccagattttccgacagtcttgaccgcccttgagatcgacaatgccgtggtggctaatagtctgatcgatatgagaggaatcgagaccgtacttctgattaagaataattcagtagctcgggctgttatgcagagccagaagcctcctaagaattgtcgcgaggcattcaccgctgatggagaccaggtctttgcagggcgatactattcatccgagaatacccggcctaagtttctgagccgcgatgtggacagcgaaatatcggacctggagaatgaagtggagaacaagaccgctcaaatcctgaacctccagcagcacctgagcgctctagaaaaagacattaaacataacgaagagctgctcaagcgctgccaactgcactataaagagctcaagatgaagatccgaaaaaacatcagcgaaataagggaactagagaacattgaagaacatcagtccgtggatattgccactctggaagacgaggcccaagagaataagagtaaaatgaaaatggttgaagagcacatggaacaacagaaagagaacatggagcatttaaagtccctgaagatagaggcggagaacaagtacgatgctatcaagttcaaaatcaaccaactgagcgagctggcagatcccctcaaggatgagctgaacctcgctgactccgaggtcgacaaccagaagaggggaaagcggcactatgaagagaaacagaaagagcacttagatactttaaataaaaaaaaacgagagctggacatgaaggagaaggagctggaagagaagatgtctcaagctagacagatctgccccgagcgcatcgaggtggagaaatccgccagtatcctggacaaagagatcaaccggcttcgtcaaaaaatccaggccgagcacgcaagccacggtgacagggaggaaatcatgagacagtaccaggaagcacgcgaaacatatctagaccttgactcaaaagtccgcactttaaaaaagtttataaagctgctgggcgaaatcatggagcatcggtttaaaacctatcagcagttcaggcgttgcctgacactgaggtgtaagctgtactttgacaatctcctctcccagcgagcttattgcggcaagatgaactttgaccacaagaatgaaacactatccatctcagtgcagccaggtgagggcaacaaggccgcgttcaatgatatgagagccctttccggaggagagaggagcttttctacagtgtgtttcatcctctccctctggagcattgctgagtcaccgtttcggtgcctggacgagttcgatgtgtatatggacatggtaaacagaaggatcgctatggacctgatactgaagatggccgactctcagcggtttcgacagttcattctgctgacacctcagtctatgtcatccctcccatcctctaagttaatccgcattttacggatgtcggaccccgagagagggcagaccaccctacccttcagaccagtcacccaggaagaggacgatgaccagagatag

SEQ ID NO: 53120 - DNA, 3354 bp, Artificial Sequence
  derived and/or modified sequence
atggccaagcggaaggaggagaacttcagcagccccaagaacgccaagcgccctcgtcaggaagaacttgaagattttgacaaggacggagatgaggatgagtgtaagggtacaaccctgactgcagccgaggtcggcatcatcgaaagcatccacctcaagaatttcatgtgtcattctatgctcggaccatttaaatttggatcgaatgtcaatttcgttgtgggcaataacggttcctggtctgccgttgtgagaagcagactgaacgccactagcgcttcgcaggtccaggctatccttctgttccagccatgcggaaagagcgccgtgctcacggcgctaatcgtgggccttggtggccgggccgtggccaccaaccggggttctagccttaagggctttgtcaaggacggtcagaactcggcagatatcagcatcacattgcgcaatcggggagacgacgcctttaaggcgtctgtgtacggcaacagtatattaatccagcaacatatatccatcgatgggtcaagatcatataaactcaaatctgcaacaggatccgtggtttccacgaggaaggaagagttgatcgccatcttggaccactttaacattcaggttgataaccctgttagcgtcctgacgcaagagatgtcaaagcagttcctgcagagcaaaaatgagggagacaagtacaaatttttcatgaaggccacccagctggagcagatgaaagaagactattcatatattatggaaactaaagagaggaccaaagagcagatccaccagggagaagaaaggcttaccgaattgaagcgacagtgcgtcgagaaagaggaacgatttcagagcatagcaggtttaagcacaatgaagacaaatctcgagagcctgaagcatgaaatggcgtgggccgtggtaaacgaaattgagaaacagctgaatgcaataagggacaacattaaaatcggtgaggacagggcagcgagactggaccggaaaatggaggaacagcaggtgagattgaatgaagcggagcaaaagtataaagatatccaggacaaattagagaagattagtgaggaaaccaatgccagagcccctgaatgtatggcgctgaaggcggacgtggtggccaagaaaagagcctataacgaggcggaggtgttgtacaatcgcagtttaaatgagtataaggccctcaaaaaggacgacgagcagctgtgtaagcgcatcgaagagcttaagaagtcaacagaccagagtctggaaccagagagactggagaggcagaagaagatttcttggttgaaagaaagggttaaagcctttcagaatcaggagaacagcgttaaccaggaaattgagcagtttcagcaggccatagagaaggataaggaggagcacgggaaaattaaaagagaggagctagatgtgaagcacgcgctctcatacaaccaacgccagttgaaagaacttaaggacagcaagacagacagactcaagcggttcggccccaacgtcccagccctcctagaagctatcgacgatgcttatcgccaaggacatttcacttacaaaccagtcggtccgctgggagcctgcattcatctcagagaccctgagctggctctagcaatcgagagttgtctgaaaggactattacaagcttactgttgtcacaatcacgccgatgaaagagtgctgcaggcactaatgaagcggttctacctacccggcacgagcaggcctccgatcatcgtcagtgagtttagaaacgagatctatgatgtgagacatcgggcagcctatcacccagatttccccactgtcctgactgcacttgagatcgataacgccgtggtggccaactccttgatagacatgcggggcatagaaacagtattactcattaagaacaatagcgtggcaagggcggtgatgcagtcacagaagcctccaaaaaactgccgagaggctttcactgcggacggcgatcaagtgttcgccggtcgatactattcatcagaaaatacacggcctaaattcctgtcccgtgatgtggatagcgagatctcagacttagaaaatgaagttgagaacaaaaccgcccaaattctaaatctccaacaacacctctcagctctggagaaagacataaaacacaacgaggagctgctaaaacggtgtcagctgcactacaaggagctgaaaatgaagatcaggaaaaatatttccgaaataagagagctagagaacattgaagagcaccagagcgtagatattgccacactggaagacgaagcccaagagaataaatccaaaatgaagatggttgaggagcatatggaacagcaaaaagaaaacatggagcatctgaagagtcttaaaattgaagccgagaacaagtatgatgcaattaaattcaagataaaccaattaagtgaactcgccgatccacttaaagacgaacttaacctggccgatagcgaggtggataatcagaagcgggggaaaagacattacgaggaaaagcagaaagagcatctggatactttgaataaaaaaaagagagaactggatatgaaagagaaagagttggaagagaagatgtctcaggctaggcaaatctgtcccgagcgtatcgaagttgagaagtccgcatccatactggacaaagaaattaaccgacttcgtcagaagattcaggctgaacacgcatcccacggcgaccgcgaggagattatgcggcaataccaggaggctagagaaacgtacctggacctggactcaaaggtaagaactctgaaaaagttcatcaagttgctgggagaaattatggaacatcggtttaaaacctaccagcagtttcgacggtgtttaacactgcgctgcaaactttatttcgataacttattgtcacaaagagcctattgcggaaagatgaacttcgaccataagaacgaaactttaagcatcagcgtgcaacccggtgagggcaataaagccgcctttaatgacatgcgcgcgttgtctggaggagagagaagcttcagcaccgtatgttttattctgagcctctggtccatcgctgaatcccccttcagatgccttgatgagtttgatgtgtatatggacatggtgaatagaagaattgctatggacctcatcttgaagatggcggactcacagcgattccgccagtttatattattgacaccacaatctatgtcctctttaccatctagcaaactaatccgaatcctaagaatgagcgaccccgaaagaggtcagactacactgccattccgccctgtgacccaggaagaggacgatgatcagcgatag

SEQ ID NO: 53121 - DNA, 3276 bp, Artificial Sequence
  derived and/or modified sequence
atggccaagcggaaggaggagaacttcagcagccccaagaacgccaagaggcctcggcaagaggagttagaggacttcgataaggatggggacgaagatgagtgcaagggtactaccctgacagctgccgaggtgggtattatcgaaagcattcatctgaaaaattttatgtgtcacagtatgctcggaccatttaagttcgggagcaacgtgaattttgtcgtgggcaacaatggctctggcaagtccgcagtcctgaccgcacttatcgtggggctgggagggagagccgtggctaccaatcgcggctctagtttaaaggggttcgttaaagatggacagaattctgccgatatctccatcaccctgagaaatagaggcgatgacgctttcaaggcaagtgtttatggtaatagcattctgattcagcagcacatatccattgacggctctaggagctataagctgaagtctgctacagggtccgtggtatctacaaggaaggaggagctcatagcaatactggatcacttcaacattcaggtggataatccggtgagcgtgctgacccaggagatgagtaaacaattcctacagagcaagaatgaaggcgacaagtataagttcttcatgaaagccacccagctcgagcagatgaaagaagattatagttacatcatggagaccaaagaacgcactaaggaacagatccatcagggagaagagcggctaactgaactcaagaggcagtgcgtcgagaaagaagaacgatttcagtccatagctggactatccaccatgaaaactaatcttgaatcactaaaacacgagatggcctgggccgtggtaaacgaaatcgagaagcaattaaatgcaatccgtgataatattaagattggggaagatcgagccgccagacttgacaggaagatggaagaacaacaggtaaggctgaatgaggctgagcagaagtataaggacattcaggacaagttggagaagattagtgaagaaaccaatgcaagggcaccggagtgcatggctttgaaggcggacgttgtggctaagaagagagcgtacaatgaagctgaagtactgtacaaccgtagtctaaacgaatataaagccctgaaaaaagacgacgaacagttgtgtaagcgcattgaagagttaaagaagagcactgaccagtccttagagcctgagaggctcgaacgtcaaaagaagatctcttggctaaaagagcgtgtgaaggctttccaaaaccaagagaatagtgtcaatcaggaaatcgagcagttccagcaggccattgagaaggataaggaagaacacgggaagatcaaacgagaggaactcgatgttaagcacgccctgagttacaatcagcgacagttaaaagagttaaaggatagcaagaccgacaggctaaagcggttcgggcccaacgtccccgccttgctggaagccatcgacgatgcctaccggcaaggtcactttacctacaagcctgttggacccctgggggcctgcatccatttacgggaccccgagctagctttagcgatagagagctgcctcaaaggcctgctgcaggcctattgttgtcacaaccatgctgacgagagggtgctccaggctctaatgaaaaggttctaccttcccggtacctcccggccccccatcatcgtatcagagttccgcaatgagatctatgacgtgcgccacagggctgcctaccaccccgatttcccaaccgtgctgacagcactggagattgacaatgcagtggtggctaattccctgatagatatgcggggaatcgaaacagtgcttctcatcaaaaacaatagcgtcgccagggccgtgatgcaatctcagaaacctcccaagaactgccgggaagcattcacagcagatggcgatcaagtgttcgccggcaggtactacagctcggagaatacgagaccaaagttcctgtctagggatgttgattctgaaataagtgatctagagaacgaagtcgaaaacaaaactgcacagattctcaacctacagcaacatctgtcagcgcttgagaaagatattaaacataatgaagagctactcaaacgctgccagctgcattataaggaattgaagatgaagatcaggaagaacatatcagagattcgggaactggagaatattgaagagcaccagagcgtggatattgctactctggaggacgaggcacaggaaaacaaaagcaaaatgaaaatggtggaggaacatatggagcaacagaaagaaaacatggaacacttgaagtccctcaaaattgaggccgaaaataagtatgacgctattaaattcaagatcaatcagcttagtgagctggccgacccactgaaagacgagctgaacctcgcagattcagaggtcgacaatcagaaaagaggcaaaagacactacgaagaaaagcaaaaggaacatttggataccctaaataagaaaaaaagggaactggacatgaaggagaaagaactggaggagaagatgtctcaagctcgacagatctgtccagagcgcatcgaggttgaaaagagcgcctctattctggataaggagattaatcgtctgcgacaaaagatacaggccgaacatgccagtcatggggaccgggaagagatcatgagacagtaccaggaagcccgagagacctatctggatctcgattccaaagtgcgcaccctgaagaagttcattaagctgctgggtgagattatggaacaccgatttaaaacgtaccagcaattccggcgttgtctgactttgcgttgtaagttgtactttgataacctgttaagccaacgcgcatactgcgggaagatgaattttgatcataaaaatgaaacactgtctatcagtgtacaaccaggggaaggaaacaaggctgcatttaatgacatgagagctctctccggaggtgagaggtcctttagtacagtgtgtttcatccttagcctctggtccatagcagagagtccgtttaggtgtctggacgaattcgacgtttacatggatatggtgaaccgcaggatcgcgatggatcttatcctgaaaatggcggatagtcagcgctttaggcagtttatactgcttacacctcagtccatgtcgagtctcccttccagtaaactcattagaatcctgcggatgtccgaccccgaacgcggccagaccacactgcccttccggccagtcacacaggaagaggatgacgaccaacgctag

SEQ ID NO: 53122 - DNA, 3276 bp, Artificial Sequence
  derived and/or modified sequence
atggccaagcggaaggaggagaacttcagcagccccaagaacgccaaacgaccaaggcaggaagagctcgaggacttcgacaaagacggagacgaagatgagtgtaagggcaccactttaacagcggccgaggtgggaatcatcgagtctatccatctgaaaaatttcatgtgccatagcatgttaggtcctttcaagttcggcagcaacgtgaacttcgtcgtgggaaataatggttctggcaaaagtgccgtgcttaccgccctcattgtaggtcttggcggcagggccgttgcaacaaacagagggtcctcactcaaaggcttcgtgaaggacggtcaaaattccgccgatatctcaatcactcttcgcaaccggggggatgatgcctttaaagcatctgtgtacggtaattctatcctgatccagcagcatatctcaatagatggttcacggtcttacaagctaaagtctgccacaggcagcgttgtttccaccaggaaggaggaattgatagccatcttagaccacttcaatatacaggtggacaaccctgtctcagttctcacacaggagatgagcaaacagtttctccagtcaaagaatgagggagataaatataagttcttcatgaaagccactcagctcgagcagatgaaagaggattactcctatattatggaaaccaaggaacggactaaagagcaaattcatcagggggaagagagattgactgagctcaagaggcagtgcgtggaaaaagaggagagattccagtctatcgctggtttgtcaactatgaagaccaacctggaatccttaaagcacgagatggcgtgggccgtggtcaacgagattgagaagcagttgaatgccatccgcgacaacattaagatcggcgaagaccgggcagccagactcgatcggaagatggaggagcaacaggtccgcctgaacgaggccgagcagaagtataaggatatccaggataaactcgaaaaaatatccgaggaaacaaacgcccgggcacccgagtgcatggcccttaaggctgatgtggttgcaaaaaagcgcgcatacaatgaagcggaggtgctgtacaaccggagtttaaatgagtacaaagcgctgaaaaaggatgacgaacaactatgtaaacggatcgaagagctgaagaagtccactgaccagagcctggagcctgagaggctggaacgccagaagaagataagctggttgaaagagcgggtgaaagcgtttcagaatcaggagaattctgtaaatcaggagattgagcaatttcaacaggccattgaaaaggataaagaggaacacgggaaaattaagcgagaagaactagacgtcaaacacgcactgtcttataaccagaggcaactgaaggaactgaaggattccaagaccgatcggctcaaacggttcggtcccaacgtgccagctctgctcgaagcaatcgatgatgcctatcgccaaggccactttacttataagcccgtgggtcccctgggcgcctgcatccatctccgggatccggagcttgcgttggccatagagagttgtttgaaagggctgctccaggcttattgttgccacaaccacgctgacgaacgggtgctgcaagccttgatgaagcgcttctacttacccggcacgagtcggcccccaattatcgtgtccgagttccggaatgaaatctatgatgtgcggcacagagccgcctaccaccccgactttcccacggtgttaacggcactggaaattgacaacgctgtggtagctaactctctcatcgatatgcggggtattgagactgtgctgctgattaagaacaactctgtcgcccgggctgtaatgcagagccagaagccacctaagaattgccgtgaagcattcactgcagatggcgaccaagtgtttgctgggcgctattacagttcggagaacacacgccctaagtttctttcccgcgacgtggacagcgagattagcgatctggagaacgaagtcgagaacaagaccgcccaaatcctgaatctgcagcagcacctctctgcattggaaaaggatatcaagcataatgaggagctcttgaaacgctgccagttgcactataaagaacttaaaatgaagattcgtaaaaatatcagcgaaatacgggaactcgaaaatattgaagaacaccagtcagtggatatcgcaactctggaggatgaggcccaggaaaataagtccaagatgaaaatggtggaagaacacatggagcaacaaaaagaaaatatggaacatttgaaaagcctgaaaattgaagctgagaacaagtatgacgcaatcaagttcaaaattaaccagctgtcagagttagccgatcctcttaaagatgaactcaatctggctgattccgaggtagataatcagaagagagggaagcgacattatgaggaaaaacagaaggaacacctggacactctgaacaaaaagaaacgagaattggatatgaaagagaaggaactcgaagaaaaaatgagccaggctagacagatctgcccagagaggatagaagtggaaaaatccgcctcaattctggacaaagaaattaatcggcttagacaaaagatccaggctgaacatgcgtcccatggcgaccgggaagagatcatgaggcagtaccaggaagctagggagacttatctcgacctggattcgaaggtcagaacgttaaagaagttcattaagcttctgggtgagattatggaacatcggttcaagacataccagcagttccgccggtgcctgacactgaggtgtaaactctatttcgataatctgctttcacagcgggcttactgtgggaaaatgaacttcgaccataagaatgagactctcagcatcagcgtgcagcctggtgaaggaaacaaagccgcttttaatgatatgagagcactgtccgggggagaacggtccttcagcacagtgtgcttcatcctctctctgtggtcaattgctgaatccccatttagatgtctggacgagtttgacgtctacatggatatggtgaacaggagaattgcaatggacctgatcctgaagatggcagactctcagcggtttaggcaattcatactgctgacgccccagagtatgtcttcacttccaagctctaaactcattagaatattacgcatgagcgatccggaacgcggccaaacaacccttccattccggccagtgacccaggaagaagacgatgatcagcgatag

SEQ ID NO: 53123 - DNA, 3276 bp, Artificial Sequence
  derived and/or modified sequence
atggccaagcgaaaagaagagaatttttcatctccgaaaaacgcaaaacggcctaggcaggaggagctcgaggactttgacaaggacggtgatgaagacgagtgcaagggcactaccttgaccgcggcagaggtgggcatcatcgaaagcatccacctgaagaattttatgtgtcacagcatgctcgggcctttcaagtttggatctaacgtgaactttgtggtagggaacaacggtagcgggaagtcagccgtgttaactgcactgattgtgggactcggaggaagggcagttgccacaaaccggggatcctcactaaaaggtttcgttaaagacggacagaatagtgccgacatctccatcaccttgaggaatcgtggtgatgatgcctttaaagcgtccgtatacggcaactccatactgattcagcagcacatatctatagatggttcgcgttcttataaactcaaaagtgccacaggatccgtcgtgtccactcggaaggaggagctgatcgcgatcctggatcacttcaacatccaggtggacaatccggtgtctgtccttacccaggaaatgtccaagcagtttttacaaagcaaaaacgagggtgacaagtacaaattttttatgaaagcaacacagctggagcaaatgaaggaggattatagctacattatggagactaaggaacggacaaaagagcagattcaccaaggtgaggaacgactcacagaactgaaacggcagtgtgtggagaaggaagagaggttccagagcattgctggtctctcaacgatgaaaaccaatctggaatccctaaagcacgaaatggcgtgggccgtggtgaatgaaattgagaagcaacttaatgccattagagataacatcaagattggagaggacagagcagcccgactggaccggaagatggaggagcaacaggtgcgactgaatgaagcagaacagaaatataaagatattcaggacaagctggaaaaaatttccgaggagactaatgctcgggcacctgaatgtatggccttgaaggccgacgtggtagccaaaaagcgtgcctataatgaggctgaggtgctttacaacagaagcctaaatgaatacaaggccttaaaaaaggacgatgaacagctgtgtaaacggatcgaggagcttaaaaagagcacagatcagtccttagagcccgaacggctggaaaggcagaagaagatctcgtggctcaaagagcgggtgaaggcattccaaaatcaagagaattctgtcaaccaagaaatcgagcaatttcagcaggcgatcgaaaaagacaaggaagagcacgggaagatcaaacgcgaggaactagacgtcaagcatgccctgagctataaccagaggcagctgaaggagttaaaggactcaaaaaccgacagactcaagcgctttggcccaaacgtcccggcactcctggaggcaatcgacgatgcctataggcagggccactttacatataagccggttggaccactcggggcttgtatccatttaagagatccagaactggcattggccattgaaagctgtctgaagggcctcttacaggcttattgttgtcacaatcatgctgacgaaagagttctgcaggccctgatgaagaggttctatctgcccggtaccagtcgtcccccaatcatcgttagcgaatttcgaaatgaaatttacgatgtgagacatcgggcagcctatcacccagactttcctacagtcttaactgccctggagatcgacaacgctgtcgtggccaactccctgattgacatgcgtgggatcgagaccgtgctgttgattaaaaataatagcgtggccagggccgtcatgcagtctcagaaaccccctaagaattgcagagaggcctttactgctgacggagaccaggtatttgctggcagatattactctagcgaaaacacccgccctaaattcctctcccgcgatgtcgattccgagatatctgatctggagaatgaagtggagaacaaaaccgctcagatacttaatttacagcagcacctcagtgccctcgagaaagatattaaacacaacgaagagctcctgaaacggtgtcagcttcattataaggagttgaagatgaaaattcggaagaatattagtgagatacgagagctggagaatatcgaggagcaccagagcgtggatatcgcaacacttgaagatgaggctcaggagaacaagtctaaaatgaagatggtggaggagcatatggagcagcaaaaggagaacatggaacatcttaaaagcctaaagattgaggcagaaaataagtacgatgctataaaatttaagattaatcaactgagcgaactcgccgaccctttaaaggatgagcttaacttggccgattctgaggttgacaatcaaaaacggggtaagcggcactacgaggagaagcagaaagaacatctcgacacgttgaataagaagaagagagagttggatatgaaggaaaaggaactggaagaaaaaatgtcacaagcaaggcagatctgccctgaacggattgaagtggaaaaaagtgcaagcattctggacaaggaaatcaaccgactccggcagaagattcaggcagaacatgcaagccacggtgatagggaagagattatgcgacaataccaggaagcccgtgaaacctacttggatctggacagcaaagtcaggacactcaaaaagttcattaagctcctgggtgaaattatggaacatcgcttcaagacatatcaacagttcaggaggtgtcttacattgagatgtaagctgtactttgacaatctgttgtcacagcgcgcatactgtggcaagatgaacttcgaccacaagaatgagaccttgtccatttcggtccagcctggagaaggcaacaaggcagcatttaatgacatgagggcattgagcgggggagagaggagtttcagcaccgtctgttttattctgagcttgtggtcaatcgcagaatcccctttccgatgcttggacgaattcgacgtttatatggatatggtgaaccggcgaatcgctatggatctgattctgaagatggccgattctcagcgatttaggcagtttatcctgctgactcctcagtctatgagcagtctaccctcgtctaaactcataagaatactcagaatgtcagatcccgagaggggccagacaacactgcctttcagacctgttacacaggaggaagatgacgatcagaggtag

SEQ ID NO: 53124 - DNA, 3354 bp, Artificial Sequence
  derived and/or modified sequence
atggctaagaggaaagaggaaaatttctcaagccccaaaaatgccaaacgaccaagacaggaggaactcgaagacttcgacaaggacggtgacgaggacgagtgcaagggcacaaccctgacggcagcggaggtggggatcattgaatccatccacctgaagaactttatgtgccattctatgctgggccctttcaagttcggttctaacgtgaacttcgtcgtcggtaataatggctcgtggagcgcagtggttaggtccaggctcaatgcaacttcagcaagccaggtgcaggcaatccttctctttcaaccatgcggaaagtccgcagtcttgactgcactgatcgttggcctcggcggacgcgctgtggcaaccaatcgcggaagttcactcaaaggctttgttaaggacgggcagaacagtgccgacattagtattacgctcagaaaccgcggtgacgacgctttcaaggcttccgtttatgggaatagtattctcatccagcagcacatctctatcgacggctcccggtcctacaagttgaagtctgccactggctctgtcgtctcaactcggaaggaggagctgattgctatcttagaccacttcaatatacaggttgataatcccgttagtgtcctgacccaagaaatgtctaaacagtttttgcagagtaagaacgagggagataagtacaagttctttatgaaagctacgcaactcgagcagatgaaagaagattattcgtatattatggagacaaaagagcggacaaaggaacagatccaccaaggagaggagagactgacagagctgaagcgccaatgcgtagaaaaggaggagaggtttcagtccatcgctggcttaagcacaatgaagaccaaccttgaaagcctgaaacatgagatggcgtgggccgtagtcaacgagatagaaaagcagctgaacgctattagagacaatattaaaatcggcgaggaccgggctgctcgccttgataggaagatggaagagcagcaagtgaggcttaatgaagccgaacagaagtacaaggacatacaggacaaattggaaaagatctcagaagagaccaacgctcgtgcccctgagtgcatggccctgaaggcagacgtggtcgccaagaagagagcctataatgaggccgaggttctgtataacaggtcgctgaacgagtacaaggctctaaaaaaagacgacgagcagctctgtaaaagaattgaggagctcaaaaagtctaccgatcaaagtttggagccagaacgactggaacgtcagaagaagatatcctggttgaaggaacgagtaaaggcgttccaaaatcaggagaatagcgttaaccaggaaattgaacagtttcagcaggctattgaaaaagataaggaggaacatggtaaaatcaaacgagaggagttagacgtgaagcacgccttatcatacaaccagagacagctcaaagagctcaaagatagcaagacagacaggttgaaaaggttcggaccaaacgtcccagcccttttagaggccatcgatgacgcttaccgtcagggccacttcacttacaaacccgttggtcctttgggggcttgtatccaccttcgcgaccccgagctggctctggcgatcgaatcctgcctgaaggggttgctacaggcatactgttgtcataaccatgccgacgagagagtattgcaggccctcatgaaacgtttctacctccccggtacgagtagaccccctatcattgtaagtgagttcaggaacgagatttacgatgtgcggcatcgagccgcttatcatccagatttccctaccgtgctgacagctttagaaatcgacaacgctgtagtggcaaattcgctgatcgatatgagggggatagagaccgtgcttttaataaagaataattccgtggctcgagctgtaatgcaaagccagaagccacccaagaactgtagggaagcattcacagcagatggggaccaagtgtttgccggaaggtactactccagtgagaacacaagacccaaattcttaagcagagacgtagattcggaaatctcggacctggagaatgaagttgagaataagacagctcaaatccttaacctccagcaacacctttcagcactggagaaagacatcaaacacaacgaagagcttcttaagcggtgccaattgcattataaagaactgaagatgaagatcaggaaaaatatctctgaaatcagagagttggagaacattgaagaacaccagtccgttgatatcgccacactcgaagacgaagcccaagaaaataaatctaagatgaagatggtggaggaacacatggagcagcagaaggaaaacatggaacatctgaagtccctaaagatagaggcggaaaacaagtatgacgcaatcaaattcaagattaaccagctgtcagaattagcagatcctctcaaggacgaactgaacctggcagacagtgaggtggataatcaaaagcgtggcaagcgccactatgaggagaaacaaaaagagcacttggacacacttaacaaaaagaaacgcgaactagatatgaaggagaaagagctggaggagaaaatgagccaagctcgccagatatgcccggagcggatagaagtcgaaaagtctgcctccatcctggacaaggaaatcaatagacttcggcagaaaattcaggcagagcacgccagtcatggggatcgcgaagaaatcatgcggcagtaccaggaggcccgagaaacttacctcgatctggactctaaggtcaggactctgaagaaattcataaagctcctgggagaaatcatggagcatcgcttcaaaacctaccaacagttccggaggtgcctcactctaagatgcaaattgtatttcgataacctgctctcccagcgcgcatattgcggcaaaatgaacttcgatcataagaacgagacactcagcatctctgtccagcccggtgagggcaataaagccgcttttaatgacatgcgtgcactgtctggcggtgaaagatccttcagcacagtttgtttcatactgagcctgtggagcattgccgaatccccttttcggtgtctggatgaatttgacgtttacatggatatggtcaataggaggatcgctatggacctcatcctaaagatggcagactctcagcgatttcgccaattcatactgcttaccccgcagtctatgagctctcttccaagtagcaagcttattcggatccttcggatgtcggatccagagagagggcagactactctcccctttcggcctgtgacacaggaagaggatgacgaccagaggtag

SEQ ID NO: 53125 - DNA, 3276 bp, Artificial Sequence
  derived and/or modified sequence
atggctaaacgcaaagaagagaatttttccagccctaaaaatgccaagcgtccacgccaggaggaattggaggacttcgataaggacggtgatgaagatgagtgtaaagggactacgctcaccgcagcagaagtggggatcatcgagtctattcacctcaaaaactttatgtgccactctatgctcggaccctttaaattcggatcaaacgtcaacttcgtggttggaaataatggcagtgggaaatccgccgtactgaccgcccttattgtgggattagggggacgtgcagttgctaccaacagaggttcttcattgaagggttttgtgaaggacggccaaaactctgctgatatcagcatcactctcaggaatagaggcgatgatgctttcaaggcttcagtctatggaaacagcatcctgatccagcagcatatcagtattgacggatctcgttcttacaagctaaaaagcgccacaggaagcgtcgtctcaacgaggaaagaggaacttatcgcaattttagaccatttcaacatccaggtggacaaccccgtctcagtcttgactcaagagatgtccaagcagttccttcaatcaaaaaatgagggggataagtacaaattttttatgaaggcaacccagctggagcagatgaaggaggactactcctatattatggaaacaaaggaaagaactaaagaacagatccatcagggcgaggagcgcctcaccgagctgaagcggcagtgcgtagagaaggaggagcggtttcagtcaattgcaggcctgagtactatgaaaaccaacttagaatctctgaaacacgagatggcatgggcggtggtgaatgaaatagagaagcagctgaatgctatcagagacaacatcaaaattggcgaggatcgcgcagctaggctagatcgtaaaatggaggagcagcaggtacgactcaacgaggccgagcaaaagtataaggacatacaagacaagctggagaagatttcagaggagaccaatgcccgagccccagagtgcatggccctaaaggccgacgtggtggctaagaagcgagcctacaacgaagcagaggtactgtacaataggtcgctgaacgagtacaaggcactgaaaaaggacgacgagcagctctgcaagagaatagaagagttaaaaaagtctaccgatcagagcctcgagcctgagcgcttggaacggcagaaaaagatatcttggttaaaagagcgggtgaaggccttccaaaaccaggagaattccgttaatcaggaaatcgagcagttccagcaagccatcgaaaaggacaaggaggagcacgggaagatcaagagggaggagttggatgtcaagcatgcactttcatacaaccagcggcagctcaaggagctgaaggatagtaaaactgatcgactcaaacgctttggccctaatgtgcccgcactcttggaagcaattgatgatgcatacaggcagggccattttacttataagcctgtgggacccctcggcgcatgcattcatttgcgggaccctgagttggcattggctatcgaaagctgcctgaagggccttctgcaggcttattgctgtcacaatcatgccgacgagagagtcctgcaagcattgatgaagaggttctacttacctggtacctctagacctccaataatcgtttctgagtttaggaacgaaatatacgatgtccgacatcgggctgcctaccatccggactttcccacagttctgaccgcactggaaattgacaacgcagtggtggcaaacagtctgattgacatgagagggattgagacagttttgctgatcaaaaacaactcagtggccagggctgtcatgcagtcccagaaacctcctaagaattgccgggaagcatttacagccgatggtgatcaagtttttgccggacggtattactcctccgagaatacccggccaaaattcttgtcaagagatgtggattcggagataagtgatctggagaatgaggttgaaaataagacagcccagatcctgaatctccagcagcatctgtctgcccttgaaaaagatatcaagcataatgaagaattgctgaaacggtgccagctgcattataaggaactaaagatgaaaataagaaagaatatcagtgaaattcgggaattagaaaatattgaggagcaccagtcagtcgacattgcaaccctcgaggatgaagctcaggaaaataagagcaagatgaagatggtagaagaacacatggaacaacaaaaggagaacatggagcacctgaagagcttgaaaattgaagcagaaaacaagtacgatgctattaagttcaagattaatcagctgtctgaactggcagaccctttgaaagatgagttaaatctagccgactccgaggtcgataaccaaaaaagagggaagcggcactacgaggagaaacagaaagaacacctggatacactcaataagaaaaagcgcgagctggatatgaaagagaaggaactggaagaaaagatgtcccaggctcggcagatctgtccagaaaggatagaggtcgaaaagagcgctagtattttggacaaggagatcaataggctgaggcagaagatccaagctgaacacgcatcccatggcgatcgggaggaaattatgaggcagtaccaagaggccagagagacttacctcgatctggatagcaaagtgcgaactctgaaaaaattcataaagttgctgggtgagatcatggaacataggttcaagacgtatcagcagtttcgcagatgccttactttacggtgcaaactatacttcgataatctgctgtctcagagggcttattgtggcaagatgaacttcgaccacaaaaatgaaacactgagtatttcagtgcagcccggagaagggaataaggcagctttcaatgatatgcgcgcactaagtggcggagaacggtccttctcaacagtgtgcttcattctatcactgtggtccatcgccgaatctccattccggtgcctggatgagtttgacgtctacatggacatggttaatagaaggatagctatggacctgatcctgaaaatggcggactcgcagcggtttcgacaattcattctactgactccccagagtatgtctagtctcccaagcagtaagcttatcagaatacttcgcatgagtgatcctgagcgtggtcaaacgaccctgccatttagaccggtcacacaggaggaggacgacgatcagaggtag

SEQ ID NO: 53126 - DNA, 3276 bp, Artificial Sequence
  derived and/or modified sequence
atggccaagaggaaggaggagaatttcagctcacctaagaacgctaagcgcccacggcaggaagaactcgaggattttgataaagacggagacgaggatgaatgtaagggaacaacactcaccgctgctgaggtaggcataattgagtctatccaccttaagaatttcatgtgccactcaatgttaggtccttttaaattcggctctaatgtaaactttgtcgtgggcaataacggtagtggaaagtccgcggtactgacagcacttatcgtggggcttggcggtagggctgtcgctactaaccgtggttccagcctcaaagggtttgtgaaggacgggcagaacagcgccgacatttccattaccttacgcaatcggggtgacgatgccttcaaggccagcgtctatggaaatagcatcctcatacagcaacacataagcattgacggtagccgcagttataagctgaagtccgctacaggcagcgtggtgagtacaaggaaggaggaactgatcgctatattagaccatttcaatatccaggtggacaaccctgtgtctgtcctgacacaggagatgtctaaacaatttctccagagcaagaacgagggcgataaatacaaattctttatgaaggcaacccagctggagcaaatgaaggaggattactcatatatcatggagacaaaggagcggaccaaggaacaaattcatcagggcgaggaacggctaacggaactgaagaggcaatgtgtggagaaggaggagcggtttcaatccatcgccggactgtccactatgaaaactaatcttgagtctctgaagcatgagatggcctgggcggtggtgaacgagatcgaaaagcagctgaacgccatccgtgacaatatcaaaataggcgaggaccgcgctgctagactggacagaaagatggaggaacagcaggttagactcaatgaggcggaacagaagtacaaagatatacaggacaagctagaaaaaatttctgaagaaacaaacgcgagagctccggaatgcatggccctcaaagccgatgtggtggccaaaaagcgtgcctataacgaggctgaggtcctgtacaatcgcagcttaaacgaatacaaggctctcaagaaggatgatgaacaattgtgtaaaagaatcgaggaacttaagaaatctactgaccagagcctcgagccggaacgcctggaacgccagaaaaaaatcagttggctcaaagagagggttaaggcgttccagaaccaggagaattccgtgaaccaggagatcgagcagttccagcaggcaattgaaaaggacaaggaagaacacgggaaaattaagcgagaggaactggacgtgaaacacgccctgtcttacaaccagaggcagctgaaagagctcaaggatagcaagactgataggctcaagcgattcggacctaatgtccctgctcttctggaagccatagatgatgcctaccgtcaaggtcacttcacttacaagcccgtgggaccactcggtgcctgtattcacctgcgagatcccgagctcgcactagctattgagtcatgcctaaagggcctgctgcaggcgtactgttgccataaccatgctgatgaaagagttttgcaggccctgatgaagcgtttttatctgcccggaacatcacgtccgcctatcatcgtctctgaatttcggaacgaaatctacgacgtaagacaccgagcagcatatcaccctgacttccccaccgttctgactgccttagagatcgataacgctgtggtagcgaattccctaattgatatgcggggaatcgagaccgtcttgctaatcaagaacaatagcgtcgctagggcggtgatgcagtcacagaaaccccctaagaactgccgggaggcctttacggcggatggagaccaagtattcgccggtcgctactactcttccgaaaatacccggcctaagttcctctcgcgggacgtggattcagagatttcagacttggaaaacgaagtcgagaataagactgctcagatcctgaatcttcaacaacatttaagcgccctagaaaaggacatcaagcacaatgaggaattgcttaaaaggtgtcagctccattacaaagaactcaaaatgaaaattcgcaaaaatatatccgagatccgcgagttagaaaacatagaggaacatcaatcagttgatatcgcaactttagaggacgaagctcaagaaaacaaaagtaagatgaagatggtggaggaacatatggaacaacagaaagaaaacatggagcatctgaagagtctcaagatcgaagctgaaaataagtatgacgccataaaatttaagattaaccaactgtccgaactggctgaccctttaaaagatgagctgaacctggccgactcggaagttgacaatcagaaacggggaaagcggcactacgaggaaaagcagaaagaacatctggacacactaaataaaaagaaaagggaacttgatatgaaagagaaagaattagaagaaaaaatgtcacaggcaaggcaaatttgtcctgaaagaatcgaagtcgagaagagcgcgtccattctggacaaagaaattaaccggttgagacagaaaattcaggccgaacatgccagtcacggagaccgggaggagataatgagacaataccaggaagcccgagagacatatctggatctcgacagcaaagtgagaacattaaaaaaattcataaagctgctcggagagatcatggaacaccgatttaagacatatcaacagtttaggagatgcctcacccttagatgcaaactttatttcgataacctgctcagtcagagggcatactgtggcaaaatgaactttgaccacaagaacgaaacactctctatttcggtacaacctggcgaggggaataaggccgcattcaatgatatgcgggcattgagcggcggagagcggagtttcagtacagtctgcttcattcttagtctgtggtccattgccgaaagcccctttcggtgcctagatgagttcgacgtttacatggatatggtgaataggcgcatcgctatggatcttatcttgaagatggctgattcacagagatttcggcagtttatcctcctcactcctcagtcaatgagctctctcccctccagcaagctgatccgtatcctgaggatgtcagacccggagagaggacagactaccctgcctttccgccctgtgacacaggaggaggatgacgatcagaggtag

SEQ ID NO: 53127 - DNA, 5173 bp, Artificial Sequence
  derived and/or modified sequence
ggagggcggggcgcaggcgcggttagtaccgcggtgggcgccggggctcccgggaatctaccttctcctgcggccggcacgcggttcccagggggccagcggcggtcagccgaggtcgagacgcccgcagggtggccttagcggccggtcgtaccacggcagccccgccgatcaggttcctttgggagacttcgacttgttggcgacctgatggccaaaagaaaggaagaaaatttttcctctcctaaaaatgccaaaaggccaagacaagaagaattggaggattttgataaagatggtgacgaagacgaatgtaaaggtactactttgactgcagcagaagttggaataattgagagtattcacctaaaaaacttcatgtgtcattcaatgcttggaccttttaagtttggttctaatgtcaactttgttgttggcaacaatggaagtgggaagagtgcagtactcacagctctcatagtcggtcttggtggaagagcagttgctactaatagaggatcctctttaaaaggttttgtgaaagatggacagaactctgcagatatctcaataacattgaggaacagaggagatgatgcctttaaagccagtgtgtatggtaactctatacttatacagcaacacatcagcatagatggaagtcgatcttataaacttaaaagtgcaacaggctccgtggtttccacgaggaaagaagagctgattgcaattcttgatcattttaacatccaggtggataatccagtttctgttttaacacaagaaatgagcaagcagttcttacagtctaaaaatgaaggagacaaatacaaattcttcatgaaagcaacgcaacttgaacagatgaaggaagattattcatacattatggaaacgaaagaaagaacaaaggagcagatacatcaaggagaagagcggcttactgaactaaagcgccagtgtgtagagaaagaggaacgttttcaaagtattgctggtttaagtacaatgaagactaatttagagtccttgaaacatgaaatggcttgggcagtggtcaatgaaattgaaaaacaattgaatgccatcagagataatatcaaaattggagaagatcgtgctgctagacttgacaggaaaatggaagaacagcaggtcagacttaatgaggcagaacaaaagtacaaggatattcaagacaaactagaaaagattagtgaagagacaaatgcacgagcaccagaatgtatggcattgaaagcagatgttgttgctaagaaaagggcctataatgaagctgaggttttatataaccgatccttaaacgaatataaagcattaaagaaagatgatgagcagctttgtaaacgaattgaagagctgaaaaaaagtactgaccaatctttggaacctgaacggttggaaagacaaaaaaaaatatcttggttaaaagagagagtaaaggcctttcaaaatcaagaaaattcagtcaatcaagagatcgaacagtttcagcaagccatagaaaaggacaaagaagaacatggcaaaattaagagagaagaattagatgtgaagcatgcactgagctacaatcagaggcaactgaaagaattgaaagatagtaaaactgatcgactcaaaagatttggccctaatgttccagctcttcttgaagccatagatgatgcttatagacaaggacattttacctataaacctgtaggccctttaggagcttgcattcatcttcgggacccagaacttgctttggctattgaatcttgcttaaaagggcttctgcaggcctattgttgccataatcatgctgatgaaagggtccttcaggcactcatgaaaaggttttatttaccagggacctcacggccaccgataatagtttctgagtttcggaatgagatatatgatgtaagacacagagctgcttatcatccagactttccaacagttctgacagctttagaaatagataatgcggttgtggcaaatagcctaattgacatgagaggcatagagacagtgctactaatcaaaaataattctgtagctcgtgcagtaatgcagtcccaaaagccacccaaaaattgtagagaagcttttactgctgatggtgatcaagtttttgcaggacgttattattcatctgaaaatacaagacctaagttcctaagcagagatgtggattctgaaataagtgacttggagaatgaggttgaaaataagacggcccagatattaaatcttcagcaacatttatctgcccttgaaaaagatattaaacacaatgaggaacttcttaaaaggtgccaactacattataaagaactaaagatgaaaataagaaaaaatatttctgaaattcgggaacttgagaacatagaagaacaccagtctgtagatattgcaactttggaagatgaagctcaggaaaataaaagcaaaatgaaaatggttgaggaacatatggagcaacaaaaagaaaatatggagcatcttaaaagtctgaaaatagaagcagaaaataagtatgatgcaattaaattcaaaattaatcaactatcggagctagcagacccacttaaggatgaattaaaccttgctgattctgaagtggataaccaaaaacgagggaaacgacattatgaagaaaaacaaaaagaacacttggataccttaaataaaaagaaacgagaactggatatgaaagagaaagaactagaggagaaaatgtcacaagcaagacaaatctgcccagagcgtatagaagtagaaaaatctgcatcaattctggacaaagaaattaatcgattaaggcagaagatacaggcagaacatgctagtcatggagatcgagaggaaataatgaggcagtaccaagaagcaagagagacctatcttgatctggatagtaaagtgaggactttaaaaaagtttattaaattactgggagaaatcatggagcacagattcaagacatatcaacaatttagaaggtgtttgactttacgatgcaaattatactttgacaacttactatctcagcgggcctattgtggaaaaatgaattttgaccacaagaatgaaactctaagtatatcagttcagcctggagaaggaaataaagctgctttcaatgacatgagagccttgtctggaggtgaacgttctttctccacagtgtgttttattctttccctgtggtccatcgcagaatctcctttcagatgcctggatgaatttgatgtctacatggatatggttaataggagaattgccatggacttgatactgaagatggcagattcccagcgttttagacagtttatcttgctcacacctcaaagcatgagttcacttccatccagtaaactgataagaattctccgaatgtctgatcctgaaagaggacaaactacattgcctttcagacctgtgactcaagaagaagatgatgaccaaaggtgatttgtaacttaacatgccttgtcctgatgttgaaggatttgtgaagggaaaaaaaattctggactctttgatataataaaatgagactggaggcattctgaaatgaaagaaactcctttatatatccaaccacaatcaaacatataaataagcctggaaaaccaactacaacctgcaatttaagattactattactttaagaaaatcaatttcatagtattggttttaaatctttttaagtttttttaatacgatctatttttataggttctttttcagaagtaaaattttgtacatatatacatgtacatatctgtttagtttgggttcatttctataacattttgtaagaaaataaaagtttgagcacctgattatatttagttttgcttttccagatattacattctatagttaccaaaaatggttgaagggagggatttctcattgcagagggtggggtgcaagggaataagacacttgtacggaacactgaagctttgccaacttctacacatgccttttttgcagtcctttaactgtccaccctaccaagagcttataaccagtatcagaactggataatgacgcagtttttcactctgacctccatcatgcttgcctgatttaaaagccctcagtttgcagtccagggactgttcaggcttgtcctcagctgagaggacacaggctagagggactgtgcagaaccaggctgggagaagggctgggaaaactgggagtggagggtggatcctcatggagcaggagagtagctcatggctccaggagcctgaggccatgcagttgatggtgagctgacatcaattctaagactcatcctaattgaggggtgttaaaaagtgtgctgcttagaatgaccaaatatagttattgtaaaaaatgatatttatgaactttttattttagaaaacatgaattttattgctccctgtattatttgtttgatactaggattcatgctaaactttttaagaatgtattggatatcaagaagcattccttacattagtagcaataaatattagaataaatatgaaattgaactattttcagaaaaagggcagtatattaagagcagggactgttctctagttattgaggaaaactggactttgtttgtgtttttggtggaggaagaagtttaagatactttagtcttaaattgaggtttgccaaatgagaagttcaaaaacttgggctttctaatcagaatttccaggaggaggaaagtgtgtgctgaatattttaaacatttcccactgatcatacaaagtctgatttttaaatttacacttataatgcctttgtattaaaattatttttaacatgtgcttttccaaattaaaaatgaagtagagtataccaaatgcataaactttcattagctaaggaactcatgtctgaattttgttgtagttttgaatgttgtgctctttcatacagaatgggaaacataatcctcaggtatcccagcatctcttgttgaattgaagattattcattgctttggcctcacaaagttttgatttcaactatcataagtgaaaatatcttcctttaatgttctaagtagtgataatattactagaatgaaagaataaaaagaaattgttcttttaaaatatgtgtaacttctaaaaataaaacttaaaatttatatgta

SEQ ID NO: 53128 - DNA, 3724 bp, Artificial Sequence
  derived and/or modified sequence
accgcggtgggcgccggggctcccgggaatctaccttctcctgcggccggcacgcggttcccagggggccagcggcggtcagccgaggtcgagacgcccgcagggtggccttagcggccggtcgtaccacggcagccccgccgatcaggttcctttgggagacttcgacttgttggcgaaatgaaccggagaagaatcccaattgggaattgcggaaaacaggactctagggtagagaaaggttgtagaaccaatagggtttgagacctgatggccaaaagaaaggaagaaaatttttcctctcctaaaaatgccaaaaggccaagacaagaagaattggaggattttgataaagatggtgacgaagacgaatgtaaaggtactactttgactgcagcagaagttggaataattgagagtattcacctaaaaaacttcatgtgtcattcaatgcttggaccttttaagtttggttctaatgtcaactttgttgttggcaacaatggaagttggagtgcagtggtgcgatctcggctcaatgcaacctctgcctcccaggttcaagcgattctcctgtttcagccttgtgggaagagtgcagtactcacagctctcatagtcggtcttggtggaagagcagttgctactaatagaggatcctctttaaaaggttttgtgaaagatggacagaactctgcagatatctcaataacattgaggaacagaggagatgatgcctttaaagccagtgtgtatggtaactctatacttatacagcaacacatcagcatagatggaagtcgatcttataaacttaaaagtgcaacaggctccgtggtttccacgaggaaagaagagctgattgcaattcttgatcattttaacatccaggtggataatccagtttctgttttaacacaagaaatgagcaagcagttcttacagtctaaaaatgaaggagacaaatacaaattcttcatgaaagcaacgcaacttgaacagatgaaggaagattattcatacattatggaaacgaaagaaagaacaaaggagcagatacatcaaggagaagagcggcttactgaactaaagcgccagtgtgtagagaaagaggaacgttttcaaagtattgctggtttaagtacaatgaagactaatttagagtccttgaaacatgaaatggcttgggcagtggtcaatgaaattgaaaaacaattgaatgccatcagagataatatcaaaattggagaagatcgtgctgctagacttgacaggaaaatggaagaacagcaggtcagacttaatgaggcagaacaaaagtacaaggatattcaagacaaactagaaaagattagtgaagagacaaatgcacgagcaccagaatgtatggcattgaaagcagatgttgttgctaagaaaagggcctataatgaagctgaggttttatataaccgatccttaaacgaatataaagcattaaagaaagatgatgagcagctttgtaaacgaattgaagagctgaaaaaaagtactgaccaatctttggaacctgaacggttggaaagacaaaaaaaaatatcttggttaaaagagagagtaaaggcctttcaaaatcaagaaaattcagtcaatcaagagatcgaacagtttcagcaagccatagaaaaggacaaagaagaacatggcaaaattaagagagaagaattagatgtgaagcatgcactgagctacaatcagaggcaactgaaagaattgaaagatagtaaaactgatcgactcaaaagatttggccctaatgttccagctcttcttgaagccatagatgatgcttatagacaaggacattttacctataaacctgtaggccctttaggagcttgcattcatcttcgggacccagaacttgctttggctattgaatcttgcttaaaagggcttctgcaggcctattgttgccataatcatgctgatgaaagggtccttcaggcactcatgaaaaggttttatttaccagggacctcacggccaccgataatagtttctgagtttcggaatgagatatatgatgtaagacacagagctgcttatcatccagactttccaacagttctgacagctttagaaatagataatgcggttgtggcaaatagcctaattgacatgagaggcatagagacagtgctactaatcaaaaataattctgtagctcgtgcagtaatgcagtcccaaaagccacccaaaaattgtagagaagcttttactgctgatggtgatcaagtttttgcaggacgttattattcatctgaaaatacaagacctaagttcctaagcagagatgtggattctgaaataagtgacttggagaatgaggttgaaaataagacggcccagatattaaatcttcagcaacatttatctgcccttgaaaaagatattaaacacaatgaggaacttcttaaaaggtgccaactacattataaagaactaaagatgaaaataagaaaaaatatttctgaaattcgggaacttgagaacatagaagaacaccagtctgtagatattgcaactttggaagatgaagctcaggaaaataaaagcaaaatgaaaatggttgaggaacatatggagcaacaaaaagaaaatatggagcatcttaaaagtctgaaaatagaagcagaaaataagtatgatgcaattaaattcaaaattaatcaactatcggagctagcagacccacttaaggatgaattaaaccttgctgattctgaagtggataaccaaaaacgagggaaacgacattatgaagaaaaacaaaaagaacacttggataccttaaataaaaagaaacgagaactggatatgaaagagaaagaactagaggagaaaatgtcacaagcaagacaaatctgcccagagcgtatagaagtagaaaaatctgcatcaattctggacaaagaaattaatcgattaaggcagaagatacaggcagaacatgctagtcatggagatcgagaggaaataatgaggcagtaccaagaagcaagagagacctatcttgatctggatagtaaagtgaggactttaaaaaagtttattaaattactgggagaaatcatggagcacagattcaagacatatcaacaatttagaaggtgtttgactttacgatgcaaattatactttgacaacttactatctcagcgggcctattgtggaaaaatgaattttgaccacaagaatgaaactctaagtatatcagttcagcctggagaaggaaataaagctgctttcaatgacatgagagccttgtctggaggtgaacgttctttctccacagtgtgttttattctttccctgtggtccatcgcagaatctcctttcagatgcctggatgaatttgatgtctacatggatatggttaataggagaattgccatggacttgatactgaagatggcagattcccagcgttttagacagtttatcttgctcacacctcaaagcatgagttcacttccatccagtaaactgataagaattctccgaatgtctgatcctgaaagaggacaaactacattgcctttcagacctgtgactcaagaagaagatgatgaccaaaggtgatttgtaacttaacatgccttgtcctgatgttgaaggatttgtgaagggaaaaaaaattctggactctttgatataataaaatgagactggaggcattctg

SEQ ID NO: 53129 - DNA, 3729 bp, Artificial Sequence
  derived and/or modified sequence
tagctcaaaatgttctaaagataaaatctaatgatttcttataggaaggctaggcttggtgggtacaagtaagaaagccaagcagagagaagcttcctggtccttctccacctttccctttcctccagtctggactttgccttctccacctccttggaagacaggctgctcatcccattgtggtgtctcggctggtgtatgttttctgcctaggcttaatggacagcacgaggaggtagggactgacgttacccatgttttacagtggaagaacctgaggcttaaagagatggagtttcgctcttcttgcccaggctagagtgcaatggcacggtctcagctcactgcaacctccgcctcccgggttcaagtgattctcttgtctcagcctcccaaacctgatggccaaaagaaaggaagaaaatttttcctctcctaaaaatgccaaaaggccaagacaagaagaattggaggattttgataaagatggtgacgaagacgaatgtaaaggtactactttgactgcagcagaagttggaataattgagagtattcacctaaaaaacttcatgtgtcattcaatgcttggaccttttaagtttggttctaatgtcaactttgttgttggcaacaatggaagtgggaagagtgcagtactcacagctctcatagtcggtcttggtggaagagcagttgctactaatagaggatcctctttaaaaggttttgtgaaagatggacagaactctgcagatatctcaataacattgaggaacagaggagatgatgcctttaaagccagtgtgtatggtaactctatacttatacagcaacacatcagcatagatggaagtcgatcttataaacttaaaagtgcaacaggctccgtggtttccacgaggaaagaagagctgattgcaattcttgatcattttaacatccaggtggataatccagtttctgttttaacacaagaaatgagcaagcagttcttacagtctaaaaatgaaggagacaaatacaaattcttcatgaaagcaacgcaacttgaacagatgaaggaagattattcatacattatggaaacgaaagaaagaacaaaggagcagatacatcaaggagaagagcggcttactgaactaaagcgccagtgtgtagagaaagaggaacgttttcaaagtattgctggtttaagtacaatgaagactaatttagagtccttgaaacatgaaatggcttgggcagtggtcaatgaaattgaaaaacaattgaatgccatcagagataatatcaaaattggagaagatcgtgctgctagacttgacaggaaaatggaagaacagcaggtcagacttaatgaggcagaacaaaagtacaaggatattcaagacaaactagaaaagattagtgaagagacaaatgcacgagcaccagaatgtatggcattgaaagcagatgttgttgctaagaaaagggcctataatgaagctgaggttttatataaccgatccttaaacgaatataaagcattaaagaaagatgatgagcagctttgtaaacgaattgaagagctgaaaaaaagtactgaccaatctttggaacctgaacggttggaaagacaaaaaaaaatatcttggttaaaagagagagtaaaggcctttcaaaatcaagaaaattcagtcaatcaagagatcgaacagtttcagcaagccatagaaaaggacaaagaagaacatggcaaaattaagagagaagaattagatgtgaagcatgcactgagctacaatcagaggcaactgaaagaattgaaagatagtaaaactgatcgactcaaaagatttggccctaatgttccagctcttcttgaagccatagatgatgcttatagacaaggacattttacctataaacctgtaggccctttaggagcttgcattcatcttcgggacccagaacttgctttggctattgaatcttgcttaaaagggcttctgcaggcctattgttgccataatcatgctgatgaaagggtccttcaggcactcatgaaaaggttttatttaccagggacctcacggccaccgataatagtttctgagtttcggaatgagatatatgatgtaagacacagagctgcttatcatccagactttccaacagttctgacagctttagaaatagataatgcggttgtggcaaatagcctaattgacatgagaggcatagagacagtgctactaatcaaaaataattctgtagctcgtgcagtaatgcagtcccaaaagccacccaaaaattgtagagaagcttttactgctgatggtgatcaagtttttgcaggacgttattattcatctgaaaatacaagacctaagttcctaagcagagatgtggattctgaaataagtgacttggagaatgaggttgaaaataagacggcccagatattaaatcttcagcaacatttatctgcccttgaaaaagatattaaacacaatgaggaacttcttaaaaggtgccaactacattataaagaactaaagatgaaaataagaaaaaatatttctgaaattcgggaacttgagaacatagaagaacaccagtctgtagatattgcaactttggaagatgaagctcaggaaaataaaagcaaaatgaaaatggttgaggaacatatggagcaacaaaaagaaaatatggagcatcttaaaagtctgaaaatagaagcagaaaataagtatgatgcaattaaattcaaaattaatcaactatcggagctagcagacccacttaaggatgaattaaaccttgctgattctgaagtggataaccaaaaacgagggaaacgacattatgaagaaaaacaaaaagaacacttggataccttaaataaaaagaaacgagaactggatatgaaagagaaagaactagaggagaaaatgtcacaagcaagacaaatctgcccagagcgtatagaagtagaaaaatctgcatcaattctggacaaagaaattaatcgattaaggcagaagatacaggcagaacatgctagtcatggagatcgagaggaaataatgaggcagtaccaagaagcaagagagacctatcttgatctggatagtaaagtgaggactttaaaaaagtttattaaattactgggagaaatcatggagcacagattcaagacatatcaacaatttagaaggtgtttgactttacgatgcaaattatactttgacaacttactatctcagcgggcctattgtggaaaaatgaattttgaccacaagaatgaaactctaagtatatcagttcagcctggagaaggaaataaagctgctttcaatgacatgagagccttgtctggaggtgaacgttctttctccacagtgtgttttattctttccctgtggtccatcgcagaatctcctttcagatgcctggatgaatttgatgtctacatggatatggttaataggagaattgccatggacttgatactgaagatggcagattcccagcgttttagacagtttatcttgctcacacctcaaagcatgagttcacttccatccagtaaactgataagaattctccgaatgtctgatcctgaaagaggacaaactacattgcctttcagacctgtgactcaagaagaagatgatgaccaaaggtgatttgtaacttaacatgccttgtcctgatgttgaaggatttgtgaagggaaaa

SEQ ID NO: 53130 - DNA, 5233 bp, Artificial Sequence
  derived and/or modified sequence
accgcggtgggcgccggggctcccgggaatctaccttctcctgcggccggcacgcggttcccagggggccagcggcggtcagccgaggtcgagacgcccgcagggtggccttagcggccggtcgtaccacggcagccccgccgatcaggttcctttgggagacttcgacttgttggcgaaatgaaccggagaagaatcccaattgggaattgcggaaaacaggactctagggtagagaaaggttgtagaaccaatagggtttgagacctgatggccaaaagaaaggaagaaaatttttcctctcctaaaaatgccaaaaggccaagacaagaagaattggaggattttgataaagatggtgacgaagacgaatgtaaaggtactactttgactgcagcagaagttggaataattgagagtattcacctaaaaaacttcatgtgtcattcaatgcttggaccttttaagtttggttctaatgtcaactttgttgttggcaacaatggaagtgggaagagtgcagtactcacagctctcatagtcggtcttggtggaagagcagttgctactaatagaggatcctctttaaaaggttttgtgaaagatggacagaactctgcagatatctcaataacattgaggaacagaggagatgatgcctttaaagccagtgtgtatggtaactctatacttatacagcaacacatcagcatagatggaagtcgatcttataaacttaaaagtgcaacaggctccgtggtttccacgaggaaagaagagctgattgcaattcttgatcattttaacatccaggtggataatccagtttctgttttaacacaagaaatgagcaagcagttcttacagtctaaaaatgaaggagacaaatacaaattcttcatgaaagcaacgcaacttgaacagatgaaggaagattattcatacattatggaaacgaaagaaagaacaaaggagcagatacatcaaggagaagagcggcttactgaactaaagcgccagtgtgtagagaaagaggaacgttttcaaagtattgctggtttaagtacaatgaagactaatttagagtccttgaaacatgaaatggcttgggcagtggtcaatgaaattgaaaaacaattgaatgccatcagagataatatcaaaattggagaagatcgtgctgctagacttgacaggaaaatggaagaacagcaggtcagacttaatgaggcagaacaaaagtacaaggatattcaagacaaactagaaaagattagtgaagagacaaatgcacgagcaccagaatgtatggcattgaaagcagatgttgttgctaagaaaagggcctataatgaagctgaggttttatataaccgatccttaaacgaatataaagcattaaagaaagatgatgagcagctttgtaaacgaattgaagagctgaaaaaaagtactgaccaatctttggaacctgaacggttggaaagacaaaaaaaaatatcttggttaaaagagagagtaaaggcctttcaaaatcaagaaaattcagtcaatcaagagatcgaacagtttcagcaagccatagaaaaggacaaagaagaacatggcaaaattaagagagaagaattagatgtgaagcatgcactgagctacaatcagaggcaactgaaagaattgaaagatagtaaaactgatcgactcaaaagatttggccctaatgttccagctcttcttgaagccatagatgatgcttatagacaaggacattttacctataaacctgtaggccctttaggagcttgcattcatcttcgggacccagaacttgctttggctattgaatcttgcttaaaagggcttctgcaggcctattgttgccataatcatgctgatgaaagggtccttcaggcactcatgaaaaggttttatttaccagggacctcacggccaccgataatagtttctgagtttcggaatgagatatatgatgtaagacacagagctgcttatcatccagactttccaacagttctgacagctttagaaatagataatgcggttgtggcaaatagcctaattgacatgagaggcatagagacagtgctactaatcaaaaataattctgtagctcgtgcagtaatgcagtcccaaaagccacccaaaaattgtagagaagcttttactgctgatggtgatcaagtttttgcaggacgttattattcatctgaaaatacaagacctaagttcctaagcagagatgtggattctgaaataagtgacttggagaatgaggttgaaaataagacggcccagatattaaatcttcagcaacatttatctgcccttgaaaaagatattaaacacaatgaggaacttcttaaaaggtgccaactacattataaagaactaaagatgaaaataagaaaaaatatttctgaaattcgggaacttgagaacatagaagaacaccagtctgtagatattgcaactttggaagatgaagctcaggaaaataaaagcaaaatgaaaatggttgaggaacatatggagcaacaaaaagaaaatatggagcatcttaaaagtctgaaaatagaagcagaaaataagtatgatgcaattaaattcaaaattaatcaactatcggagctagcagacccacttaaggatgaattaaaccttgctgattctgaagtggataaccaaaaacgagggaaacgacattatgaagaaaaacaaaaagaacacttggataccttaaataaaaagaaacgagaactggatatgaaagagaaagaactagaggagaaaatgtcacaagcaagacaaatctgcccagagcgtatagaagtagaaaaatctgcatcaattctggacaaagaaattaatcgattaaggcagaagatacaggcagaacatgctagtcatggagatcgagaggaaataatgaggcagtaccaagaagcaagagagacctatcttgatctggatagtaaagtgaggactttaaaaaagtttattaaattactgggagaaatcatggagcacagattcaagacatatcaacaatttagaaggtgtttgactttacgatgcaaattatactttgacaacttactatctcagcgggcctattgtggaaaaatgaattttgaccacaagaatgaaactctaagtatatcagttcagcctggagaaggaaataaagctgctttcaatgacatgagagccttgtctggaggtgaacgttctttctccacagtgtgttttattctttccctgtggtccatcgcagaatctcctttcagatgcctggatgaatttgatgtctacatggatatggttaataggagaattgccatggacttgatactgaagatggcagattcccagcgttttagacagtttatcttgctcacacctcaaagcatgagttcacttccatccagtaaactgataagaattctccgaatgtctgatcctgaaagaggacaaactacattgcctttcagacctgtgactcaagaagaagatgatgaccaaaggtgatttgtaacttaacatgccttgtcctgatgttgaaggatttgtgaagggaaaaaaaattctggactctttgatataataaaatgagactggaggcattctgaaatgaaagaaactcctttatatatccaaccacaatcaaacatataaataagcctggaaaaccaactacaacctgcaatttaagattactattactttaagaaaatcaatttcatagtattggttttaaatctttttaagtttttttaatacgatctatttttataggttctttttcagaagtaaaattttgtacatatatacatgtacatatctgtttagtttgggttcatttctataacattttgtaagaaaataaaagtttgagcacctgattatatttagttttgcttttccagatattacattctatagttaccaaaaatggttgaagggagggatttctcattgcagagggtggggtgcaagggaataagacacttgtacggaacactgaagctttgccaacttctacacatgccttttttgcagtcctttaactgtccaccctaccaagagcttataaccagtatcagaactggataatgacgcagtttttcactctgacctccatcatgcttgcctgatttaaaagccctcagtttgcagtccagggactgttcaggcttgtcctcagctgagaggacacaggctagagggactgtgcagaaccaggctgggagaagggctgggaaaactgggagtggagggtggatcctcatggagcaggagagtagctcatggctccaggagcctgaggccatgcagttgatggtgagctgacatcaattctaagactcatcctaattgaggggtgttaaaaagtgtgctgcttagaatgaccaaatatagttattgtaaaaaatgatatttatgaactttttattttagaaaacatgaattttattgctccctgtattatttgtttgatactaggattcatgctaaactttttaagaatgtattggatatcaagaagcattccttacattagtagcaataaatattagaataaatatgaaattgaactattttcagaaaaagggcagtatattaagagcagggactgttctctagttattgaggaaaactggactttgtttgtgtttttggtggaggaagaagtttaagatactttagtcttaaattgaggtttgccaaatgagaagttcaaaaacttgggctttctaatcagaatttccaggaggaggaaagtgtgtgctgaatattttaaacatttcccactgatcatacaaagtctgatttttaaatttacacttataatgcctttgtattaaaattatttttaacatgtgcttttccaaattaaaaatgaagtagagtataccaaatgcataaactttcattagctaaggaactcatgtctgaattttgttgtagttttgaatgttgtgctctttcatacagaatgggaaacataatcctcaggtatcccagcatctcttgttgaattgaagattattcattgctttggcctcacaaagttttgatttcaactatcataagtgaaaatatcttcctttaatgttctaagtagtgataatattactagaatgaaagaataaaaagaaattgttcttttaaaatatgtgtaacttctaaaaataaaacttaaaatttatatgta

SEQ ID NO: 53131 - protein, 126 aa, Artificial Sequence
  derived and/or modified sequence
MPGVKLTTQAYCKMVLHGAKYPHCAVNGLLVAEKQKPRKEHLPLGGPGAHHTLFVDCIPLFHGTLALAPMLEVALTLIDSWCKDHSYVIAGYYQANERVKDASPNQVAEKVASRIAEGFSDTALIM

SEQ ID NO: 53132 - DNA, 381 bp, Artificial Sequence
  derived and/or modified sequence
atgcccggcgtgaagctgaccacccaggcctactgcaagatggtgctgcacggcgccaagtacccccactgcgccgtgaacggcctgctggtggccgagaagcagaagcccagaaaggagcacctgcccctgggcggccccggcgcccaccacaccctgttcgtggactgcatccccctgttccacggcaccctggccctggcccccatgctggaggtggccctgaccctgatcgacagctggtgcaaggaccacagctacgtgatcgccggctactaccaggccaacgagagagtgaaggacgccagccccaaccaggtggccgagaaggtggccagcagaatcgccgagggcttcagcgacaccgccctgatcatgtag

SEQ ID NO: 53133 - DNA, 381 bp, Artificial Sequence
  derived and/or modified sequence
atgcccggtgtgaaacttacaactcaagcttattgcaaaatggtcctgcacggggccaagtacccacactgtgccgtaaacggcttgttagtggctgaaaaacaaaagccacgaaaggaacacctccccctaggcggcccgggggctcaccatacactgttcgtggattgcattcccctgtttcatggaactttggctctggccccgatgctagaagtcgctctcaccctgattgattcatggtgtaaagaccattcttacgtcatagccggctattatcaggccaatgaacgcgtgaaggacgcatctcctaaccaggtggcagaaaaagtcgcttctcgcatcgctgaagggttttctgacaccgctttgattatgtag

SEQ ID NO: 53134 - DNA, 381 bp, Artificial Sequence
  derived and/or modified sequence
atgcctggggtgaagctgaccacccaggcctactgcaagatggtgctgcatggagccaagtacccccactgtgctgtgaatggcctgctggtggccgagaagcagaagcccaggaaggagcacctgcccctgggcggccctggggcccaccacaccctgtttgtggactgcatccccctcttccacggcaccctggccctggcccccatgctggaggtggccctgaccctgattgacagctggtgcaaggaccacagctatgtgattgctggctactaccaggccaatgaaagagtgaaggatgccagccccaaccaggtggccgagaaggtggccagcagaattgctgagggcttcagtgacacagccctgatcatgtag

SEQ ID NO: 53135 - DNA, 381 bp, Artificial Sequence
  derived and/or modified sequence
atgcccggcgtgaagctgaccacccaggcctactgcaagatggtgctgcatggagccaagtatccacattgcgcagtaaatggattgctggtggccgaaaaacagaaaccacggaaggaacatctgcctctgggcggacccggagcacaccacaccctcttcgtggactgtatccccctgtttcacggcactctcgctctcgcacccatgctcgaagttgccctcaccctgatcgacagctggtgtaaggaccattcctatgtcatcgccggatactatcaagcgaacgaacgagtgaaggacgcgtcccccaaccaagtcgcagaaaaggttgcgtctcgtatcgctgagggctttagcgacacagcactgattatgtag

SEQ ID NO: 53136 - DNA, 381 bp, Artificial Sequence
  derived and/or modified sequence
atgccgggagtcaaactcacaacacaggcctattgcaagatggtcctgcatggcgctaaataccctcattgcgcagttaatggtttgctggtcgctgagaaacaaaagccccgtaaagagcacctgccccttgggggtcccggagcacatcataccttgtttgttgactgtattccattattccatgggactttggcactcgcacccatgttagaggtggctctcaccttgattgattcatggtgtaaggaccactcttatgtgatcgcaggttactaccaggctaatgaacgcgtcaaagatgctagccccaatcaggttgccgaaaaggtggcatcccgaattgccgagggcttcagcgatactgctctcatcatgtag

SEQ ID NO: 53137 - DNA, 1575 bp, Artificial Sequence
  derived and/or modified sequence
tccgcggccgtggacgagcgtccgtgcggcctggtccgggccatgtccgcgtgaggaccccgccgctgtcgccgctcccgttccggccctggcccctctgcccggcagcgccgcgcaccatgggctccattctcagccgccgcatcgcgggggtggaggacatcgacatccaggcgaactcggcctatcgctaccctccgaagtccggaaactactttgcttcgcactttttcatgggaggagagaaattcgacaccccccaccctgaaggttacctctttggagagaacatggatctgaacttcctgggcagccgcccggtccagtttccctacgtcactcctgccccccacgagcccgtgaagacgctgcggagcctggtgaacatccgcaaagactccctgcggctggtgaggtacaaagacgatgccgacagccccaccgaggacggcgacaagccccgggtgctctacagcctggagttcaccttcgacgccgatgcccgcgtggccatcaccatctactgccaggcatcggaggagttcctgaacggcagggcagtatacagccccaagagcccctcgctacagtccgagaccgtccactacaagagaggggtgagccagcagttctccctgccctccttcaagattgacttctcggaatggaaggatgacgagctgaactttgacctggaccggggcgtgtttccagtagtcatccaggctgtggtggacgaaggagatgtggtggaagtgactggccacgcccacgtgctcttggctgcctttgaaaagcacatggacggcagcttctctgtgaagcctttaaagcagaagcaaattgtggaccgggtcagctacctcctgcaggagatctatggcattgagaacaagaacaaccaggagaccaagccctcggacgacgagaacagcgacaacagcaacgagtgtgtggtgtgcctgtccgacctgcgggacacgctgatcctgccctgccgccacctgtgcctctgtacctcctgcgccgacacgctgcgctaccaggccaacaactgccccatctgccggctgcaactctgacagcgtcccacctggctacgagcccatctcgctgctcgaggcgctcaacggcctccgggctgtctccccggccatcccctcggcccctctttatgaagaaatcacctattcaggcatctcggacggcctgtcccaggccagctgtcccctcgcggctatcgaccacatcctggacagcagccgccagaagggcaggccgcagagcaaggcccccgacagcaccctacggtccccgtcttcccccatccacgaagaggatgaggagaagctctccgaggacgtggacgcccctcccccactgggtggcgcagagctggccctgcgggaaagcagctcccctgagagtttcataacagaagaggttgatgagtcgtcgtcaccacagcaagggacccgagcagcttccattgagaatgtcctgcaggacagcagccccgagcactgtggccgaggcccacctgctgacatctacctgccaggacggcccacctcc

SEQ ID NO: 53138 - protein, 552 aa, Artificial Sequence
  derived and/or modified sequence
MGSILSRRIAGVEDIDIQANSAYRYPPKSGNYFASHFFMGGEKFDTPHPEGYLFGENMDLNFLGSRPVQFPYVTPAPHEPVKTLRSLVNIRKDSLRLVRYKDDADSPTEDGDKPRVLYSLEFTFDADARVAITIYCQASEEFLNGRAVYSPKSPSLQSETVHYKRGVSQQFSLPSFKIDFSEWKDDELNFDLDRGVFPVVIQAVVDEGDVVEVTGHAHVLLAAFEKHMDGSFSVKPLKQKQIVDRVSYLLQEIYGIENKNNQETKPSDDENSDNSNECVVCLSDLRDTLILPCRHLCLCTSCADTLRYQANNCPICRLPFRALLQIRAVRKKPGALSPVSFSPVLAQSLEHDEHSCPFKKSKPHPASLASKKPKRETNSDSVPPGYEPISLLEALNGLRAVSPAIPSAPLYEEITYSGISDGLSQASCPLAAIDHILDSSRQKGRPQSKAPDSTLRSPSSPIHEEDEEKLSEDVDAPPPLGGAELALRESSSPESFITEEVDESSSPQQGTRAASIENVLQDSSPEHCGRGPPADIYLPALGPDSCSVGIDE

SEQ ID NO: 53139 - DNA, 1659 bp, Artificial Sequence
  derived and/or modified sequence
atgggctcaatcctttcaaggcgaatcgctggtgtagaggacatcgatatccaggctaatagtgcctaccgctaccctcccaagtccggaaactatttcgcatcgcacttctttatgggaggagagaaatttgatacccctcaccctgaagggtatttgttcggagagaatatggacttgaacttccttggttccaggcctgtgcaatttccatatgtgacccccgctcctcacgaaccagtgaagactctgaggtccctggtgaacattcgcaaggactccctgaggttggtcaggtacaaggacgatgctgactctcccacggaagacggtgacaaaccaagagttctttattccctagaatttactttcgacgcagacgccagagtggccatcacgatttattgccaggctagcgaggaattcctcaacggccgcgctgtctactctcccaaaagcccctccctgcagtccgagaccgtgcactacaaacggggggtctcccagcagttcagtttgccctcattcaaaatcgacttttctgaatggaaggacgatgaattaaacttcgacctggacagaggagtatttcccgtcgtcattcaggccgtcgtcgacgagggggacgttgtcgaagtgacaggccacgcccacgttctgctggccgccttcgagaagcatatggatggctctttttcagttaaacctctcaaacagaaacaaattgtcgatagagtgtcatacctcctgcaggagatttatggtattgagaataaaaacaaccaggagaccaaaccgagtgacgatgagaactctgataactccaatgaatgtgtggtgtgtctctcagacttacgtgacacgctgattctcccctgccgccatctgtgtttgtgtacgtcctgcgcggacactctgcgttatcaagcgaataattgtccaatatgcaggttaccatttcgcgcactgctccaaatcagggccgtgcggaaaaagcctggagcactctctccagtttcttttagccccgtgttggcccaatcactggagcacgatgagcacagttgtccgtttaaaaagagtaagccacacccagctagcctggcttcaaaaaagcccaaaagagagacaaactcagattcggttcctccagggtatgagcccatctccttgctggaggcactgaatggcctgagggctgtctcaccggccatcccttctgcaccattgtatgaggagatcacctattccgggatcagcgatgggctctcccaggccagctgtccacttgcagctattgaccatatccttgactcttctaggcagaaggggagaccccagagcaaggcgcccgattcgactctgcgctcaccctcttctccaatacacgaggaggacgaagaaaagttgagtgaggacgtggacgctcctcctccattggggggagccgagctggctctaagagagtccagctcgcctgagtccttcattaccgaagaagtagatgaatcttcttcaccccaacagggtacacgagctgcaagcattgagaatgtgctgcaggattctagtccagagcactgtggcaggggaccaccggccgatatttaccttccagccctgggacctgacagttgcagcgtcggcattgacgaatag

SEQ ID NO: 53140 - DNA, 1659 bp, Artificial Sequence
  derived and/or modified sequence
atgggcagcatcctgagcagaagaattgctggggtggaggacatcgacatccaggccaacagcgcctaccgctacccacccaagagcggcaactactttgccagccacttcttcatgggcggggagaagtttgacaccccccaccctgagggctacctgtttggagagaacatggacctgaacttcctgggcagcaggcctgtgcagttcccctacgtgaccccagcccctcatgagcctgtgaagaccctgcggagcctggtgaacatcaggaaggacagcctgcggctggtgcgctacaaggatgatgctgacagccccacagaagatggagacaagccccgggtgctgtacagcctggagttcacctttgatgctgatgcccgggtggccatcaccatctactgccaggccagcgaggagttcctgaatggccgggctgtgtacagccccaagagccccagcctgcagagcgagaccgtgcactacaagaggggcgtgtcccagcagttcagcctgcccagcttcaagattgacttcagcgagtggaaggatgatgagctgaactttgacctggacagaggagtcttccctgtggtgatccaggccgtggtggatgaaggagatgtggtggaggtgacaggccacgcccacgtgctgctggccgcctttgagaagcacatggatggcagcttctctgtgaagcccctgaagcagaagcagatcgtggacagagtgtcctacctgctgcaggagatctacggcatcgagaacaagaacaaccaggagaccaagcccagtgatgatgagaacagcgacaacagcaatgaatgtgtggtgtgcctgagtgacctgcgggacaccctcatcctgccctgccgccacctgtgcctgtgcaccagctgtgccgacaccctgcgctaccaggccaacaactgccccatctgccgcctgcccttccgggccctgctgcagatccgggctgtgaggaagaagccaggggccctgagccctgtgtccttcagccctgtgctggcccagagcctggagcatgatgagcacagctgccccttcaagaagagcaagccccacccagccagcctggccagcaagaagcccaagcgggagaccaacagcgacagcgtgcccccaggctatgagcccatcagcctgctggaggccctgaatggcctgcgggctgtgtccccagccatccccagcgcccccctgtatgaggagatcacctacagcggcatcagtgatggcctgagccaggccagctgccccctggccgccatcgaccacatcctggacagcagccggcagaagggccggccccagagcaaggccccagacagcaccctgcggagccccagcagccccatccatgaagaagatgaggagaagctgtctgaagatgtggatgcccccccacccctgggcggcgctgagctggccctgcgggagagcagcagccctgagagcttcatcacagaggaggtggatgagagcagcagcccccagcagggcaccagggctgccagcattgaaaatgtgctgcaggacagcagccctgagcactgcggccggggccccccagctgacatctacctgcctgccctgggccctgacagctgcagcgtgggcattgatgaatag

SEQ ID NO: 53141 - DNA, 6470 bp, Artificial Sequence
  derived and/or modified sequence
tgggggctcgaggcgcctccgcggccgtggacgagcgtccgtgcggcctggtccgggccatgtccgcgtgaggaccccgccgctgtcgccgctcccgttccggccctggcccctctgcccggcagcgccgcgcaccatgggctccattctcagccgccgcatcgcgggggtggaggacatcgacatccaggcgaactcggcctatcgctaccctccgaagtccggaaactactttgcttcgcactttttcatgggaggagagaaattcgacaccccccaccctgaaggttacctctttggagagaacatggatctgaacttcctgggcagccgcccggtccagtttccctacgtcactcctgccccccacgagcccgtgaagacgctgcggagcctggtgaacatccgcaaagactccctgcggctggtgaggtacaaagacgatgccgacagccccaccgaggacggcgacaagccccgggtgctctacagcctggagttcaccttcgacgccgatgcccgcgtggccatcaccatctactgccaggcatcggaggagttcctgaacggcagggcagtatacagccccaagagcccctcgctacagtccgagaccgtccactacaagagaggggtgagccagcagttctccctgccctccttcaagattgacttctcggaatggaaggatgacgagctgaactttgacctggaccggggcgtgtttccagtagtcatccaggctgtggtggacgaaggagatgtggtggaagtgactggccacgcccacgtgctcttggctgcctttgaaaagcacatggacggcagcttctctgtgaagcctttaaagcagaagcaaattgtggaccgggtcagctacctcctgcaggagatctatggcattgagaacaagaacaaccaggagaccaagccctcggacgacgagaacagcgacaacagcaacgagtgtgtggtgtgcctgtccgacctgcgggacacgctgatcctgccctgccgccacctgtgcctctgtacctcctgcgccgacacgctgcgctaccaggccaacaactgccccatctgccggctgcctttccgggccctcctgcagatccgggcggtgcggaagaagccaggagccctgtcccccgtgtccttcagccccgtcctggcccagagcctggagcatgatgagcactcttgtccctttaaaaaatcaaagccgcaccccgcctccctggccagcaagaaacctaaaagggaaacaaactctgacagcgtcccacctggctacgagcccatctcgctgctcgaggcgctcaacggcctccgggctgtctccccggccatcccctcggcccctctttatgaagaaatcacctattcaggcatctcggacggcctgtcccaggccagctgtcccctcgcggctatcgaccacatcctggacagcagccgccagaagggcaggccgcagagcaaggcccccgacagcaccctacggtccccgtcttcccccatccacgaagaggatgaggagaagctctccgaggacgtggacgcccctcccccactgggtggcgcagagctggccctgcgggaaagcagctcccctgagagtttcataacagaagaggttgatgagtcgtcgtcaccacagcaagggacccgagcagcttccattgagaatgtcctgcaggacagcagccccgagcactgtggccgaggcccacctgctgacatctacctgccagccctggggcccgactcctgctctgttggtatagacgagtaagccggtacgtgacctcccagacgcgcttcgggggctctgacgcgcgtccttggagagaggagccctcccctgctctctggcgggggttccttctggtttttgggtcttcgtccgcatccgcatcttcccaggggccctggattccgaatccagagctctccagtggctgctgcaccttcccccagaaagtggcctcctggggggtcctgactttcggggccagaggtctctccatctggactaggcggccggtcaggctcttcttccagccttgaggggccctggaacagtcccagcccaggcagggagacagacacagcccaggtgcgccagagccactgtccactgcgggaggcaggagcttgagggatgagggcagcaccgtggagggaaccccagggagacatggggtgagcgtcccaaggggagaggcctgggcctggccttgttccggatggtcccaccatgagttcgcatcggtcctgcagcagacacgttaggacgctcagcaggtccactcccgtgttccggtcgtggctttaacaattcatggggaaagaatgcgccccgattgggagagcccctggatcacgtcttcccaagctcagtccctgtctcttggagggagtccgtcctcgaggggccctctggtgcccaggggagagtatcttgcgtcctgtcctgagggcgtccgctcacacagccacctgctcccccgctccctccttcccttgtcagcatggccaccgtgggcctggcatcaccatgggcctggcacacagtccctcgtgggctgcctttgtgccatgagcccactgctgccgactcacctgtccctcccagtactggaaccttctggaacaccagcactaaaagataggaggccctgtgaggttggcatcccccatcccccccaagaggcgccctctaccagggtggcccaggtgagtgttttacagaaggcggctctgtccaggcagtggttcgcacctataagcccggtactttgggagaccgaggggatagatcacttgagcccaggaattcaagatcagtgtagaaaacatagaccccctctctatgaaaaataaaaaattggcttgggcgtggtagcttgtgcctgtggtcccagctactcaggggtgctgaggtgggaggattgccggagctggggaggtcaaggcccactccagcctgagacgctgtctcaataaaaaaaaatacacacacacccacccacccactccagcctgagaccctgtctcaagaaaaaaaaaatacacacacacacacacacacacacacacacgggggagagagagaaggcagctccaggagtgccaccaaaatgtaggcagacggattggggaccctctgccttcccagagggtcttggcacacaagctgcgtgcagctctggtctgccgaggcccatgcagcctgctgggaggtgcctggccgggggtgcaggctctaagaggccctttccccttgggtggacttgagccgggtcagggagaacttcgcttcttttgactgcgctctgcattcccatgaacctctgtcttcttgagcccagcgagtccctctgttgacccctgtcctgagccattatacccctagattgaaacagtcagcacctttcagacggccccggcctgcgcatcggtggaaggtgccgtgcgaatgtcacgattcaggtcaagcttccggagctggggagtgcaggtgtgatctagaacagggctcacagcctcggaaacctgctctcgccgcggcccccgaagaaaatagacgcccttcaccggagagtggggcctgggccgtgtctgctgggagccatgtgtcagggctggtggctgggtgtcaggcagccctgaggccatgctggccccgtcccaggctctgcaccagcaccattgcccaagccccagggacgccagacccatctggggacagcgcccggcggcgtcgtgcaggccacagtctgggcattggggctctgtgggaggctcctctctttgccttgcagtagccatccgggggctactctgagcacgggcttgttctcacccagggccgctccccacccctgcaccctgggttgaccgagttccaccctaacccagccgtaagaaccttggcaggacagtggctggccacatcccaggaaaccggaaccagggcaagggcaggaggcccagagggcatccaccgcggtgccgtgtcgcgctctgactcggggctgcagatctgctgtgggtgtccggggatctgggatcgtctgtcccaagagggacacagcgtatttggcacagttagggagtccccgggcccttggtgtgctcacatctgagtgaatgctgttgtggccacaggcggcgggagtgggggtgctggatggcccagcccctctggggctccagatcggtaggagcgggtggcgtggcaccaggcatccgagtgtgaccctcctccctctgctcccacctgcaggacggcccacctccatggagacggcccacggcctcgccaccaccagccccacctggcctccacttggtggccccagccccgatcccagcgccgccgagctgaccccactctgagagcctggccgagctggcagcatggagccctcggctccccagactttgccgaggggctgctccggaccccgttgtgagccggcctcctgtctgcatgccccctgtggccaccaggctccgaggggccgtggtgactcttgatcaaagagcacagtgaactgtcccttctgagtctcccttttctacagttgatatatttgtaactggtacaagatgaaggacagcagctttccatccctagttcagagcccccgttccccagggtcctgtgggctgagcggctggggctggggctgcccacgtgtggcctccgctggctctgcctgctcctgcaacagtgcggtccctgcccggagaactcaggaggcctgcagaagagaactgattggtggtcgaagcaccatcttcacagatgttcaggggcagtggggggctccaggcacggtcaatgaaggaaacagtgcctgtccacccaccctgcgtgtcactgtggcggcctggctgtcgctgctttttgtcctctgccgtgtttgcgcggcctcagtgccctccctggtgcgtctgcgctggggccctcagtgctcggggccttggggtgcatgggtgccgccctgggcagctagagtgtctcagcccggtgctgggcctggccgaggggcggaggcacagctgcttccagcagccagcattcagtggccttgtcaccaagctccacacctcctcctggtgctggctttggtgacatcacaaggcccctccaggtgcaggggcttctgtttggcaggcccctgccagggaggacctggtggcctcctcattctcttttgccattggaatgtccccttgcagttctcttctctttttttttttttttgagatggagtttcactcttgctgcccaggctggagtgcagtggctcaatctcgggtcactgcaacctccgcctcccgggttcaagtgatcgtcctgccttaggctcctgagtagctggggattacaggtgcctaccagcatgctcggctaatttttttgtatttttagtagagaagggatttcaccatgttggccgggctggtctcaaactcctaaggtcatccacctgcctcggcctcccagagtgctgagattacaggcgtgagcctccgcgcccggcccccttgcagttctctctgatttggtttgttctgtctcaggcttctgtggcaggactggcccagggaggaggaagccagcagcacacctggggaatggggtcccggccgggaggcttggcctctgggcgacctcgtcctgttttttttgtttgtttgtttgtttttttaaaggtaaacctcctgggccgcagatggcaaagggagtgcctgggcctggtgacccagggctggatccacccctgcggagccctgggccaggcaggtgtctgctgctcacctggctctggagggctgccctgcagctgggcctggggacaggtcggctgtggggcagctcagtaccctccctgaggctcacggtggctccgagcatgaggtccgcctcctgggcgagacccagcagtggacagcatggtcctcacacccagctccctgcacacccaggccagccacccctcccgctcgtgcacaggcacgcagatgcgctcacacgtacacacacacaaatgcacgcccacttgcacatgctcacgcacatgttcacacatgcacactcacgctcacacatgctgtcacgcatacacacacgcacatactcctgcacatgttcccatgcatgtgtgtgcactcggaccgagcatctcccacgcacctctaccccaccccaagcacctctctccccccatgcacctctccccaacaacacacacagccccctgcaccgcccgccccccgcccccaccaaggccccagcctctggccatcagtcctggtgccagagctttgcgtgaagttcgggccgcagagtggcccgctgggactcccatgtgctgccgtctgatgtgctcagatgggctcatcgttggttcgtttttactgtatatttatagtaataaaatcatgcagcaata

SEQ ID NO: 53142 - DNA, 1659 bp, Artificial Sequence
  derived and/or modified sequence
atgggcagcatcctgagccggcggatcgccggcgtggaggacatcgacattcaggctaactccgcctataggtaccctccaaagagtggtaactacttcgcctctcacttcttcatgggcggtgagaaattcgacacgccgcacccagaagggtacctgtttggggagaacatggaccttaatttcttgggttcacggcccgttcagtttccttacgtaactccggcacctcatgagcccgtcaaaactctgagatctctggtgaacatacgcaaggattcccttcgattggtccggtacaaagacgacgcggatagccctactgaggatggcgacaagcccagggtgctgtactcacttgagtttactttcgacgccgatgcacgtgtggcaattacaatctattgccaagcatccgaggagttcttgaatggccgcgcggtgtactcaccaaagtccccatccctgcaaagcgagaccgtccattataaacgtggagtctcacagcagttttcgttgccgagctttaagatcgatttcagcgagtggaaagacgacgaactcaacttcgatctcgaccgtggcgtctttccagtggtcattcaagccgtagtcgacgagggcgacgtcgtcgaggtaacaggtcacgcccacgtgttgcttgccgccttcgaaaaacacatggatgggtctttctccgtcaaacctctgaagcaaaaacagatagtggaccgagtcagctatctgctccaggagatctatgggattgaaaacaaaaataatcaagaaactaaaccaagcgacgacgaaaactcagataacagcaacgagtgtgtcgtttgcctgtctgatctgcgggatactctcattctgccctgcaggcatctgtgcttatgcacctcctgtgccgatacgctccggtatcaggcaaataattgcccaatctgcaggctgccgttccgcgctctcttacagatcagggcagtcaggaaaaagcctggggccttgagccctgtgtcctttagcccagtgttggctcagtccctggagcacgatgaacacagctgtcccttcaaaaagtctaagccccatccagcatctctcgcatccaaaaagccaaagagagaaacaaacagtgactccgtgcctcctggctacgagccaatctccctgttagaggctttaaatggtctgagggcagtctcgcctgcaattccttcggcccctctgtatgaggagatcacgtattctggtatctctgatggccttagccaagcatcttgcccactcgcagcaattgaccatatcttagactcctcgaggcagaaaggcaggccacaaagtaaggcccctgatagcaccttgaggagccctagctccccaattcacgaagaagacgaggaaaagttatcagaggacgtggacgcccccccccccctgggaggtgccgaactcgccctgcgcgaaagttctagtccagagtcgtttataactgaggaggtagatgagagctctagtccccagcaggggaccagggccgccagtattgagaacgtgttacaggactcctctccagaacattgcggtaggggccctcccgccgatatttacctccccgctctcgggcctgatagttgttctgtgggcatcgacgagtag

SEQ ID NO: 53143 - DNA, 1659 bp, Artificial Sequence
  derived and/or modified sequence
atgggatccatcttgagccgaagaatcgccggagtggaggacattgatatccaggcaaattccgcttaccgctaccctcccaaatccggcaactacttcgccagccacttctttatgggaggcgagaagtttgataccccacatccggaagggtacttgtttggcgagaatatggacctgaactttcttgggtcacggccagttcaattcccctacgttacaccggcaccccacgagcctgtgaagaccttaaggagccttgtcaacattcgaaaagactccctgcgcctggtgcggtataaggatgatgcggactccccaaccgaagacggagataagcctcgggtcctatactcattagagtttacttttgatgctgacgcgagggtcgcgatcacaatttattgccaggctagcgaggaatttcttaatggtcgggctgtctatagtcctaagagtcctagtctccagtctgagacagtgcactataagcggggtgtctcccagcagttttccctgccctcattcaaaatcgatttttctgagtggaaggatgatgagttaaatttcgatctggaccggggagtcttcccagtagttatccaggctgttgtcgatgagggagacgttgtggaagtcactggtcacgcccacgtcctacttgccgctttcgagaaacatatggacggcagcttttcagtcaagccattaaaacaaaagcagattgtggacagagtgtcatacttgctgcaggaaatttatgggatcgagaataaaaacaaccaggagacgaaaccttctgacgacgaaaattctgacaacagcaatgaatgtgtggtttgtctctcagacctgcgggacacactgatactgccatgtaggcatctttgtctgtgtacctcatgcgctgatactctgcgataccaagcaaataattgccccatctgccgactcccttttcgagctctgttacagattcgggctgtcaggaagaaacccggagcactctcccctgtctctttcagtcctgttcttgcgcagagtctggaacatgatgagcacagctgtccctttaagaagtccaaacctcaccccgctagcctggctagtaaaaaacctaagagagagacaaattcagattctgtgccccctggctacgagccaatcagtctgctggaggcattgaacggcctaagggccgtctccccagctataccttccgcaccactgtacgaggagattacctacagtggtattagtgacggcctctctcaggccagttgtccactcgctgcaatcgatcacatcctggacagttctagacagaagggtcgacctcaatccaaggcaccagattccaccctgcggtcaccaagcagtcccatccatgaagaggacgaggagaagctctccgaggacgtagacgccccaccccctctggggggtgcagagcttgctcttcgggaatcgtccagcccagagagctttatcactgaagaggtggatgaatcatcatccccccagcaaggtactagggcagctagtatcgagaacgtcctgcaggattcatctcctgagcactgtggaagggggcctcccgctgacatatatctgcccgctttaggcccagactcttgctctgtgggcattgatgaatag

SEQ ID NO: 53144 - DNA, 1659 bp, Artificial Sequence
  derived and/or modified sequence
atgggcagcatcctgagcagaagaatcgccggcgtggaggacatcgacatccaggccaacagcgcctacagatacccccccaagagcggcaactacttcgccagccacttcttcatgggcggcgagaagttcgacaccccccaccccgagggctacctgttcggcgagaacatggacctgaacttcctgggcagcagacccgtgcagttcccctacgtgacccccgccccccacgagcccgtgaagaccctgagaagcctggtgaacatcagaaaggacagcctgagactggtgagatacaaggacgacgccgacagccccaccgaggacggcgacaagcccagagtgctgtacagcctggagttcaccttcgacgccgacgccagagtggccatcaccatctactgccaggccagcgaggagttcctgaacggcagagccgtgtacagccccaagagccccagcctgcagagcgagaccgtgcactacaagagaggcgtgagccagcagttcagcctgcccagcttcaagatcgacttcagcgagtggaaggacgacgagctgaacttcgacctggacagaggcgtgttccccgtggtgatccaggccgtggtggacgagggcgacgtggtggaggtgaccggccacgcccacgtgctgctggccgccttcgagaagcacatggacggcagcttcagcgtgaagcccctgaagcagaagcagatcgtggacagagtgagctacctgctgcaggagatctacggcatcgagaacaagaacaaccaggagaccaagcccagcgacgacgagaacagcgacaacagcaacgagtgcgtggtgtgcctgagcgacctgagagacaccctgatcctgccctgcagacacctgtgcctgtgcaccagctgcgccgacaccctgagataccaggccaacaactgccccatctgcagactgcccttcagagccctgctgcagatcagagccgtgagaaagaagcccggcgccctgagccccgtgagcttcagccccgtgctggcccagagcctggagcacgacgagcacagctgccccttcaagaagagcaagccccaccccgccagcctggccagcaagaagcccaagagagagaccaacagcgacagcgtgccccccggctacgagcccatcagcctgctggaggccctgaacggcctgagagccgtgagccccgccatccccagcgcccccctgtacgaggagatcacctacagcggcatcagcgacggcctgagccaggccagctgccccctggccgccatcgaccacatcctggacagcagcagacagaagggcagaccccagagcaaggcccccgacagcaccctgagaagccccagcagccccatccacgaggaggacgaggagaagctgagcgaggacgtggacgcccccccccccctgggcggcgccgagctggccctgagagagagcagcagccccgagagcttcatcaccgaggaggtggacgagagcagcagcccccagcagggcaccagagccgccagcatcgagaacgtgctgcaggacagcagccccgagcactgcggcagaggcccccccgccgacatctacctgcccgccctgggccccgacagctgcagcgtgggcatcgacgagtag

SEQ ID NO: 53145 - DNA, 1596 bp, Artificial Sequence
  derived and/or modified sequence
atgggttcgattctgtccaggcgcatcgcgggagttgaggatatcgatattcaggccaactcggcctaccgctatcctcccaagtccggaaactatttcgcttcacacttctttatgggcggtgagaagtttgatacaccgcaccctgaggggtatctgttcggggaaaacatggacctgaacttcctgggctcccgcccagttcaattcccctacgtcacccccgccccacatgaacccgttaaaacccttagatccctggtcaacattagaaaggactcactgaggctagtgcgctacaaagatgatgcagacagccctaccgaggacggagacaagcctcgggtgctgtattcattagagttcaccttcgatgctgacgctcgggttgcaatcacaatctattgtcaagcctcagaggaatttctaaacggcagggccgtttacagccccaagtcgccctcactccaaagtgagactgtgcattacaagcgtggcgtgtcacagcagttcagcctacccagtttcaaaattgacttcagtgagtggaaggatgatgagcttaattttgacctggaccggggagtcttccctgtcgtcatccaggctgtggtcgacgaaggagacgctgtggtagaagtgaccgggcatgcacacgtgcttcttgcagcttttgagaagcacatggacggctccttcagtgtcaagcctcttaagcagaaacagatcgtggatagggtgtcgtatttactgcaggaaatctacggcatcgaaaacaaaaacaaccaggaaaccaagccgagcgacgacgaaaattctgataattcaaacgagtgtgtggtgtgcctatctgacctgcgggacaccctcatcctgccttgccgccacctatgcctttgtacatcctgcgctgacaccttgagatatcaagccaacaactgtcctatttgtcgactgccgttcagggccctccttcagatccgagccgtgcggaagaaacctggtgcactgtcacctgtgtcatttagcccagtgctggcacaaagcctggagcatgacgaacacagtaattccgactccgtgcccccaggctacgagcccatctctttgctggaggctctgaacggcctccgggcagtctcacctgccatcccttctgcgccgttgtacgaggaaatcacttacagcggcatttcagatgggctcagccaagcatcttgtcccctggctgcaattgaccatattctggacagttcccgacaaaagggaaggccccagagtaaggcccccgattcaacgctccggtccccaagtagtcccatacatgaggaggacgaagagaagctttcagaagatgttgacgcaccccctcctctggggggcgccgaactcgccctcagagaaagtagttctcccgagagcttcattaccgaggaagtggatgagtcttcctcccctcaacaggggacccgggccgcatcaatagagaacgtcttacaggatagctctcccgagcattgtggtcgggggccccctgcggacatctacctgcctgccctaggccctgattcctgcagtgtagggattgatgagtag

SEQ ID NO: 53146 - DNA, 963 bp, Artificial Sequence
  derived and/or modified sequence
atgggaagcatcctctcccgccgcatcgctggagtcgaggacattgacattcaagctaactcagcttacaggtaccctcctaagtccggcaattatttcgccagccatttttttatgggaggcgagaaattcgatacaccacatcctgagggatatctgttcggtgagaatatggacttaaacttccttggttcccggcccgtgcagttcccctatgtgacacctgctccacacgaacctgtcaagactctcagaagtcttgtgaacatcagaaaagatagcctaagactggtgaggtataaggatgatgccgacagcccgaccgaagacggggataaaccaagggtgctctattcgctcgagtttaccttcgacgccgatgcaagggtagccattaccatttattgccaggcttccgaagagttcttaaacgggagggcagtctatagtcctaaatcaccctctctgcaatctgaaacagttcattacaagcgaggcgtgagccaacaattctctcttcctagttttaagatcgacttctccgaatggaaggacgacgaactgaatttcgatctggatagaggcgtttttccggttgtcatccaggctgtagtcgacgaaggcgacgtagtggaagtgacaggccacgcccacgtgctattggcggcatttgaaaagcatatggatggtagcttcagcgtgaagccactaaaacagaagcagatcgtcgacagggtgtcatatcttttacaggaaatctacggaatcgagaacaaaaataaccaggagaccaagccgtcagacgacgagaacagtgataacagtaacgaatgtgtcgtgtgtttgagtgatctccgcgacaccctgattctcccctgccgacatctttgtctctgtacaagttgtgcggacacactgcgatatcaagccaacaactgtccaatttgtaggttgcagctgtag

SEQ ID NO: 53147 - DNA, 1596 bp, Artificial Sequence
  derived and/or modified sequence
atgggcagcatcctgagcagaagaattgctggggtggaggacatcgacatccaggccaacagcgcctaccgctacccacccaagagcggcaactactttgccagccacttcttcatgggcggggagaagtttgacaccccccaccctgagggctacctgtttggagagaacatggacctgaacttcctgggcagcaggcctgtgcagttcccctacgtgaccccagcccctcatgagcctgtgaagaccctgcggagcctggtgaacatcaggaaggacagcctgcggctggtgcgctacaaggatgatgctgacagccccacagaagatggagacaagccccgggtgctgtacagcctggagttcacctttgatgctgatgcccgggtggccatcaccatctactgccaggccagcgaggagttcctgaatggccgggctgtgtacagccccaagagccccagcctgcagagcgagaccgtgcactacaagaggggcgtgtcccagcagttcagcctgcccagcttcaagattgacttcagcgagtggaaggatgatgagctgaactttgacctggacagaggagtcttccctgtggtgatccaggccgtggtggatgaaggagatgctgtggtggaggtgactggacatgcccacgtgctgctggccgcctttgagaagcacatggatggcagcttctctgtgaagcccctgaagcagaagcagatcgtggacagagtgtcctacctgctgcaggagatctatggaattgagaacaagaacaaccaggagaccaagcccagtgatgatgaaaattctgacaacagcaatgaatgtgtggtgtgcctgagtgacctgcgggacaccctcatcctgccctgccgccacctgtgcctgtgcaccagctgtgccgacaccctgcgctaccaggccaacaactgccccatctgccgcctgcccttccgggccctgctgcagatccgggctgtgaggaagaagccaggggccctgagccctgtgtccttcagccctgtgctggcccagagcctggagcatgatgagcacagcaacagcgacagcgtgcccccaggctatgagcccatcagcctgctggaggccctgaatggcctgcgggctgtgtccccagccatccccagcgcccccctgtatgaggagatcacctacagcggcatcagtgatggcctgagccaggccagctgccccctggccgccatcgaccacatcctggacagcagccggcagaagggccggccccagagcaaggccccagacagcaccctgcggagccccagcagccccatccacgaggaggatgaggagaagctgtctgaagatgtggatgcccccccacccctgggcggcgctgagctggccctgcgggagagcagcagccctgagagcttcatcacagaggaggtggatgagagcagcagcccccagcagggcacccgggccgccagcattgaaaatgtgctgcaggacagcagccctgagcactgcggccggggccccccagctgacatctacctgcctgccctgggccctgacagctgcagcgtgggcattgatgaatag

SEQ ID NO: 53148 - DNA, 963 bp, Artificial Sequence
  derived and/or modified sequence
atgggcagcatcctgagcagaagaattgctggggtggaggacatcgacatccaggccaacagcgcctaccgctacccacccaagagcggcaactactttgccagccacttcttcatgggcggggagaagtttgacaccccccaccctgagggctacctgtttggagagaacatggacctgaacttcctgggcagcaggcctgtgcagttcccctacgtgaccccagcccctcatgagcctgtgaagaccctgcggagcctggtgaacatcaggaaggacagcctgcggctggtgcgctacaaggatgatgctgacagccccacagaagatggagacaagccccgggtgctgtacagcctggagttcacctttgatgctgatgcccgggtggccatcaccatctactgccaggccagcgaggagttcctgaatggccgggctgtgtacagccccaagagccccagcctgcagagcgagaccgtgcactacaagaggggcgtgtcccagcagttcagcctgcccagcttcaagattgacttcagcgagtggaaggatgatgagctgaactttgacctggacagaggagtcttccctgtggtgatccaggccgtggtggatgaaggagatgtggtggaggtgacaggccacgcccacgtgctgctggccgcctttgagaagcacatggatggcagcttctctgtgaagcccctgaagcagaagcagatcgtggacagagtgtcctacctgctgcaggagatctacggcatcgagaacaagaacaaccaggagaccaagcccagtgatgatgagaacagcgacaacagcaatgaatgtgtggtgtgcctgagtgacctgcgggacaccctcatcctgccctgccgccacctgtgcctgtgcaccagctgtgccgacaccctgcgctaccaggccaacaactgccccatctgccgcctgcagctgtag

SEQ ID NO: 53149 - DNA, 6407 bp, Artificial Sequence
  derived and/or modified sequence
tgggggctcgaggcgcctccgcggccgtggacgagcgtccgtgcggcctggtccgggccatgtccgcgtgaggaccccgccgctgtcgccgctcccgttccggccctggcccctctgcccggcagcgccgcgcaccatgggctccattctcagccgccgcatcgcgggggtggaggacatcgacatccaggcgaactcggcctatcgctaccctccgaagtccggaaactactttgcttcgcactttttcatgggaggagagaaattcgacaccccccaccctgaaggttacctctttggagagaacatggatctgaacttcctgggcagccgcccggtccagtttccctacgtcactcctgccccccacgagcccgtgaagacgctgcggagcctggtgaacatccgcaaagactccctgcggctggtgaggtacaaagacgatgccgacagccccaccgaggacggcgacaagccccgggtgctctacagcctggagttcaccttcgacgccgatgcccgcgtggccatcaccatctactgccaggcatcggaggagttcctgaacggcagggcagtatacagccccaagagcccctcgctacagtccgagaccgtccactacaagagaggggtgagccagcagttctccctgccctccttcaagattgacttctcggaatggaaggatgacgagctgaactttgacctggaccggggcgtgtttccagtagtcatccaggctgtggtggacgaaggagatgcagtggtggaagtgactggccacgcccacgtgctcttggctgcctttgaaaagcacatggacggcagcttctctgtgaagcctttaaagcagaagcaaattgtggaccgggtcagctacctcctgcaggagatctatggcattgagaacaagaacaaccaggagaccaagccctcggacgacgagaacagcgacaacagcaacgagtgtgtggtgtgcctgtccgacctgcgggacacgctgatcctgccctgccgccacctgtgcctctgtacctcctgcgccgacacgctgcgctaccaggccaacaactgccccatctgccggctgcctttccgggccctcctgcagatccgggcggtgcggaagaagccaggagccctgtcccccgtgtccttcagccccgtcctggcccagagcctggagcatgatgagcactctaactctgacagcgtcccacctggctacgagcccatctcgctgctcgaggcgctcaacggcctccgggctgtctccccggccatcccctcggcccctctttatgaagaaatcacctattcaggcatctcggacggcctgtcccaggccagctgtcccctcgcggctatcgaccacatcctggacagcagccgccagaagggcaggccgcagagcaaggcccccgacagcaccctacggtccccgtcttcccccatccacgaagaggatgaggagaagctctccgaggacgtggacgcccctcccccactgggtggcgcagagctggccctgcgggaaagcagctcccctgagagtttcataacagaagaggttgatgagtcgtcgtcaccacagcaagggacccgagcagcttccattgagaatgtcctgcaggacagcagccccgagcactgtggccgaggcccacctgctgacatctacctgccagccctggggcccgactcctgctctgttggtatagacgagtaagccggtacgtgacctcccagacgcgcttcgggggctctgacgcgcgtccttggagagaggagccctcccctgctctctggcgggggttccttctggtttttgggtcttcgtccgcatccgcatcttcccaggggccctggattccgaatccagagctctccagtggctgctgcaccttcccccagaaagtggcctcctggggggtcctgactttcggggccagaggtctctccatctggactaggcggccggtcaggctcttcttccagccttgaggggccctggaacagtcccagcccaggcagggagacagacacagcccaggtgcgccagagccactgtccactgcgggaggcaggagcttgagggatgagggcagcaccgtggagggaaccccagggagacatggggtgagcgtcccaaggggagaggcctgggcctggccttgttccggatggtcccaccatgagttcgcatcggtcctgcagcagacacgttaggacgctcagcaggtccactcccgtgttccggtcgtggctttaacaattcatggggaaagaatgcgccccgattgggagagcccctggatcacgtcttcccaagctcagtccctgtctcttggagggagtccgtcctcgaggggccctctggtgcccaggggagagtatcttgcgtcctgtcctgagggcgtccgctcacacagccacctgctcccccgctccctccttcccttgtcagcatggccaccgtgggcctggcatcaccatgggcctggcacacagtccctcgtgggctgcctttgtgccatgagcccactgctgccgactcacctgtccctcccagtactggaaccttctggaacaccagcactaaaagataggaggccctgtgaggttggcatcccccatcccccccaagaggcgccctctaccagggtggcccaggtgagtgttttacagaaggcggctctgtccaggcagtggttcgcacctataagcccggtactttgggagaccgaggggatagatcacttgagcccaggaattcaagatcagtgtagaaaacatagaccccctctctatgaaaaataaaaaattggcttgggcgtggtagcttgtgcctgtggtcccagctactcaggggtgctgaggtgggaggattgccggagctggggaggtcaaggcccactccagcctgagacgctgtctcaataaaaaaaaatacacacacacccacccacccactccagcctgagaccctgtctcaagaaaaaaaaaatacacacacacacacacacacacacacacacgggggagagagagaaggcagctccaggagtgccaccaaaatgtaggcagacggattggggaccctctgccttcccagagggtcttggcacacaagctgcgtgcagctctggtctgccgaggcccatgcagcctgctgggaggtgcctggccgggggtgcaggctctaagaggccctttccccttgggtggacttgagccgggtcagggagaacttcgcttcttttgactgcgctctgcattcccatgaacctctgtcttcttgagcccagcgagtccctctgttgacccctgtcctgagccattatacccctagattgaaacagtcagcacctttcagacggccccggcctgcgcatcggtggaaggtgccgtgcgaatgtcacgattcaggtcaagcttccggagctggggagtgcaggtgtgatctagaacagggctcacagcctcggaaacctgctctcgccgcggcccccgaagaaaatagacgcccttcaccggagagtggggcctgggccgtgtctgctgggagccatgtgtcagggctggtggctgggtgtcaggcagccctgaggccatgctggccccgtcccaggctctgcaccagcaccattgcccaagccccagggacgccagacccatctggggacagcgcccggcggcgtcgtgcaggccacagtctgggcattggggctctgtgggaggctcctctctttgccttgcagtagccatccgggggctactctgagcacgggcttgttctcacccagggccgctccccacccctgcaccctgggttgaccgagttccaccctaacccagccgtaagaaccttggcaggacagtggctggccacatcccaggaaaccggaaccagggcaagggcaggaggcccagagggcatccaccgcggtgccgtgtcgcgctctgactcggggctgcagatctgctgtgggtgtccggggatctgggatcgtctgtcccaagagggacacagcgtatttggcacagttagggagtccccgggcccttggtgtgctcacatctgagtgaatgctgttgtggccacaggcggcgggagtgggggtgctggatggcccagcccctctggggctccagatcggtaggagcgggtggcgtggcaccaggcatccgagtgtgaccctcctccctctgctcccacctgcaggacggcccacctccatggagacggcccacggcctcgccaccaccagccccacctggcctccacttggtggccccagccccgatcccagcgccgccgagctgaccccactctgagagcctggccgagctggcagcatggagccctcggctccccagactttgccgaggggctgctccggaccccgttgtgagccggcctcctgtctgcatgccccctgtggccaccaggctccgaggggccgtggtgactcttgatcaaagagcacagtgaactgtcccttctgagtctcccttttctacagttgatatatttgtaactggtacaagatgaaggacagcagctttccatccctagttcagagcccccgttccccagggtcctgtgggctgagcggctggggctggggctgcccacgtgtggcctccgctggctctgcctgctcctgcaacagtgcggtccctgcccggagaactcaggaggcctgcagaagagaactgattggtggtcgaagcaccatcttcacagatgttcaggggcagtggggggctccaggcacggtcaatgaaggaaacagtgcctgtccacccaccctgcgtgtcactgtggcggcctggctgtcgctgctttttgtcctctgccgtgtttgcgcggcctcagtgccctccctggtgcgtctgcgctggggccctcagtgctcggggccttggggtgcatgggtgccgccctgggcagctagagtgtctcagcccggtgctgggcctggccgaggggcggaggcacagctgcttccagcagccagcattcagtggccttgtcaccaagctccacacctcctcctggtgctggctttggtgacatcacaaggcccctccaggtgcaggggcttctgtttggcaggcccctgccagggaggacctggtggcctcctcattctcttttgccattggaatgtccccttgcagttctcttctctttttttttttttttgagatggagtttcactcttgctgcccaggctggagtgcagtggctcaatctcgggtcactgcaacctccgcctcccgggttcaagtgatcgtcctgccttaggctcctgagtagctggggattacaggtgcctaccagcatgctcggctaatttttttgtatttttagtagagaagggatttcaccatgttggccgggctggtctcaaactcctaaggtcatccacctgcctcggcctcccagagtgctgagattacaggcgtgagcctccgcgcccggcccccttgcagttctctctgatttggtttgttctgtctcaggcttctgtggcaggactggcccagggaggaggaagccagcagcacacctggggaatggggtcccggccgggaggcttggcctctgggcgacctcgtcctgttttttttgtttgtttgtttgtttttttaaaggtaaacctcctgggccgcagatggcaaagggagtgcctgggcctggtgacccagggctggatccacccctgcggagccctgggccaggcaggtgtctgctgctcacctggctctggagggctgccctgcagctgggcctggggacaggtcggctgtggggcagctcagtaccctccctgaggctcacggtggctccgagcatgaggtccgcctcctgggcgagacccagcagtggacagcatggtcctcacacccagctccctgcacacccaggccagccacccctcccgctcgtgcacaggcacgcagatgcgctcacacgtacacacacacaaatgcacgcccacttgcacatgctcacgcacatgttcacacatgcacactcacgctcacacatgctgtcacgcatacacacacgcacatactcctgcacatgttcccatgcatgtgtgtgcactcggaccgagcatctcccacgcacctctaccccaccccaagcacctctctccccccatgcacctctccccaacaacacacacagccccctgcaccgcccgccccccgcccccaccaaggccccagcctctggccatcagtcctggtgccagagctttgcgtgaagttcgggccgcagagtggcccgctgggactcccatgtgctgccgtctgatgtgctcagatgggctcatcgttggttcgtttttactgtatatttatagtaataaaatcatgcagcaata

SEQ ID NO: 53150 - DNA, 1596 bp, Artificial Sequence
  derived and/or modified sequence
atgggcagcatcctgagccggcggatcgccggcgtggaggacatcgatattcaggctaattcagcctataggtacccacccaaatcaggcaattacttcgcaagtcactttttcatggggggtgagaagtttgatacaccgcaccctgagggatacttgttcggggagaacatggatctgaacttcctgggctcccgacccgtgcagtttccttatgtaacccccgctccccatgagcccgttaaaacccttaggtctctggtcaacattaggaaggattcactaaggttggtgaggtacaaagacgacgcggacagcccgacagaagacggggataaacccagagtgctttactccttggaatttacctttgatgcagatgctagagtcgctataaccatttactgccaggctagcgaggagttcctgaatggcagggccgtctacagcccaaaatccccctccttgcagtcggaaaccgttcattataaacgaggagtgagccagcaattctcactaccatcctttaagatagattttagcgagtggaaggatgatgaactgaacttcgacctggatcggggcgtttttccagtggttattcaagccgtagttgacgagggagacgctgtggtcgaggtgacaggtcacgcccacgtgctgctcgctgccttcgaaaagcacatggatggatccttctctgtgaaaccactgaagcagaagcagattgtggatcgcgttagctacctgctgcaagagatctacggaattgagaataagaacaaccaagagactaagcccagcgacgacgaaaactccgacaacagtaacgagtgtgtggtctgcctgtcagacctgagggacaccctaatattgccgtgtcgccacctatgtctttgtacttcctgtgccgacacattgcgataccaggcaaataattgcccgatctgtcgcttgcctttcagagccctgctgcagattcgagcggtgcgaaagaagccaggcgctctgagtcccgtatcattcagccccgtcctagctcaaagcctggaacatgacgaacacagcaattctgactcagtcccccctggttacgaaccaatctctttattggaagccctcaatggcttacgcgcagtgagcccagccatcccctcggcccccctttatgaggagatcacgtattcgggaatttctgacggtctttcacaggcctcctgtcccttagccgctatcgaccatatcttggactccagccgccagaaggggcgtccgcagagcaaggcccctgattcgacgcttcgaagtccaagcagccctatacacgaggaggatgaggagaagctctctgaggacgtggatgcaccgcctccactcgggggcgcagagttggccctacgagaatccagcagccccgagtcttttataaccgaagaggtggacgagtcttcttcacctcagcaaggcacgcgggctgcctcgattgagaacgtgctacaggattcgagccccgagcactgtggcaggggaccgcccgcagacatctacctgcctgcactggggcccgattcctgttcggtgggcattgatgagtag

SEQ ID NO: 53151 - DNA, 963 bp, Artificial Sequence
  derived and/or modified sequence
atgggcagcatcctgagccggcggatcgccggcgtggaggacatcgacatccaggcgaactccgcctatcggtatcccccaaagtcaggcaattactttgccagccacttctttatgggaggtgaaaaattcgatacccctcaccccgaaggatatctgtttggcgagaatatggatctgaatttcctcggctccaggcccgtacagtttccctacgtcacgccagcaccacacgagcctgtaaagacactcaggagccttgtcaatataagaaaggattctttgcgccttgtgcgttataaggacgatgctgattccccaacagaggatggtgacaaaccgagagtgttgtattctttagaattcaccttcgatgctgacgcaagggtggccatcacgatctactgccaggcaagcgaagagtttctgaacggcagagccgtctactcaccaaaatcacccagcctgcagagcgagaccgttcactacaaacggggcgtctcccagcaattctcattaccctcgtttaaaatcgatttcagcgagtggaaggatgacgagctaaacttcgatctcgatcgtggagtgtttcccgtcgtcatacaggccgtcgtggacgagggtgacgtcgtagaagtgactggacatgcgcacgtcctgctggccgccttcgaaaaacacatggatggttccttctctgtcaaaccgcttaaacagaaacaaattgtggaccgcgtatcatatttgttgcaggaaatttatgggatcgaaaacaagaataaccaggagacaaaaccatctgatgatgagaattccgacaatagcaacgagtgtgtggtgtgtctctcagatttgagagatacattaatcttgccatgccgacacctgtgcttatgtactagctgtgcggacacattaaggtatcaagccaataactgtccaatctgccggctgcaactatag

SEQ ID NO: 53152 - DNA, 1596 bp, Artificial Sequence
  derived and/or modified sequence
atgggatccattttgtccaggaggatcgcaggcgtcgaggacatagacatccaagccaacagcgcctaccggtacccacccaaaagcgggaactattttgccagtcacttcttcatggggggagaaaagtttgacactccccatcccgagggttacctgtttggagagaatatggatctcaatttcctcggatcccgcccagtgcagttcccatacgtgacgccagctccccacgaaccagtgaagacgcttaggagcctggtgaacatccgcaaggatagtttgcgcttagttcgctacaaggatgatgccgactcccctaccgaagacggcgacaagccacgggtactgtactccttagagtttacgtttgacgcagacgctcgggtggccattaccatctattgccaggcctccgaggagtttctgaacggccgtgccgtttatagccccaagtcccccagcttacagtccgagacagttcactacaaacgcggagtgtcccagcagttttcactgccttcattcaagatagactttagcgagtggaaggacgatgaactgaatttcgaccttgatagaggcgtcttcccagtggtcattcaggctgtcgtagatgaaggcgatgctgttgttgaggtgacgggccacgcccacgtcctgctcgccgctttcgaaaagcacatggatggctcattctccgttaagcctctgaagcagaagcagatcgtggatcgcgtatcttatcttctgcaagagatctatggtatcgagaacaaaaataaccaagagactaagccgtcagacgatgagaattctgataacagcaacgaatgtgtggtgtgcctgtctgatctgcgcgacactctcatcctgccctgtcgacatctgtgtttatgtacatcatgcgcggacacactcagataccaggctaacaattgccctatctgccggctccccttccgcgctctgttgcaaattcgggctgtccgcaagaaacctggcgctttaagccccgtaagcttctccccagtcctggcgcaatcacttgagcacgacgaacacagcaacagtgatagcgtcccgcctggttacgaaccaatttctctacttgaggcacttaatggccttagagcagtttcccccgcaatcccctcagcacccctctatgaagaaattacctactctgggataagcgacggcctgtctcaggccagttgccccctcgccgctattgaccacattctggatagctctcgccaaaagggcaggccccagtctaaggccccagactcaaccctaaggagtccttcctctccaatccatgaagaggacgaggaaaaactgagcgaagatgtcgacgcgcctccccctctaggtggagctgaactcgctctccgggaatcttcttcccccgaaagcttcattacagaagaggtggatgaatcctcaagcccccagcaaggaacccgagctgcctcgattgagaatgtgctgcaagattcctcccctgaacactgcggccgaggcccaccagccgatatctatttgccagcgctgggtcccgattcctgtagcgtcgggatagacgaatag

SEQ ID NO: 53153 - DNA, 963 bp, Artificial Sequence
  derived and/or modified sequence
atgggctctatcctatcacgcagaatcgcaggcgtcgaggatattgatatccaagcaaacagtgcttacagatatcccccaaagtctgggaactattttgcctctcatttttttatggggggagaaaaattcgacacgccacatcccgagggctatctgtttggagagaatatggacctgaacttcttggggtcccgccctgtccagttcccctacgtaacacctgcccctcacgaacccgtgaagactcttaggtcactggtgaacatacgtaaggactctctccgcctcgtgcggtacaaggatgatgctgactccccaacagaagatggcgacaaaccccgagtgctgtactccctagagtttacattcgatgcggacgctagggtggccattaccatttactgccaggcctccgaagagttcctcaacggcagagcagtgtactcccccaagagtcccagtctccaaagcgagactgtgcactataaacgtggagtgagccagcagttttcactgccttcctttaaaatcgactttagcgagtggaaggacgacgaactgaattttgatctggatcggggagttttcccggtggtaatccaggctgtagtggacgagggtgatgtcgtggaagtgaccggccacgcgcacgtgctgttggcagccttcgaaaaacacatggatggaagcttttctgtgaagccccttaaacagaagcaaatcgtggatagagtgtcatacctgctgcaagaaatttacggcatcgagaacaagaataatcaggagactaagccttccgacgacgaaaattccgataacagtaatgagtgcgtggtctgcctctctgacctgcgcgacaccctgatccttccctgcagacatctgtgcttgtgcacgagttgcgcggacaccctcaggtatcaagccaataattgccccatctgtaggcttcagctctag

SEQ ID NO: 53154 - DNA, 1596 bp, Artificial Sequence
  derived and/or modified sequence
atgggcagcatcctgagcagaagaatcgccggcgtggaggacatcgacatccaggccaacagcgcctacagatacccccccaagagcggcaactacttcgccagccacttcttcatgggcggcgagaagttcgacaccccccaccccgagggctacctgttcggcgagaacatggacctgaacttcctgggcagcagacccgtgcagttcccctacgtgacccccgccccccacgagcccgtgaagaccctgagaagcctggtgaacatcagaaaggacagcctgagactggtgagatacaaggacgacgccgacagccccaccgaggacggcgacaagcccagagtgctgtacagcctggagttcaccttcgacgccgacgccagagtggccatcaccatctactgccaggccagcgaggagttcctgaacggcagagccgtgtacagccccaagagccccagcctgcagagcgagaccgtgcactacaagagaggcgtgagccagcagttcagcctgcccagcttcaagatcgacttcagcgagtggaaggacgacgagctgaacttcgacctggacagaggcgtgttccccgtggtgatccaggccgtggtggacgagggcgacgccgtggtggaggtgaccggccacgcccacgtgctgctggccgccttcgagaagcacatggacggcagcttcagcgtgaagcccctgaagcagaagcagatcgtggacagagtgagctacctgctgcaggagatctacggcatcgagaacaagaacaaccaggagaccaagcccagcgacgacgagaacagcgacaacagcaacgagtgcgtggtgtgcctgagcgacctgagagacaccctgatcctgccctgcagacacctgtgcctgtgcaccagctgcgccgacaccctgagataccaggccaacaactgccccatctgcagactgcccttcagagccctgctgcagatcagagccgtgagaaagaagcccggcgccctgagccccgtgagcttcagccccgtgctggcccagagcctggagcacgacgagcacagcaacagcgacagcgtgccccccggctacgagcccatcagcctgctggaggccctgaacggcctgagagccgtgagccccgccatccccagcgcccccctgtacgaggagatcacctacagcggcatcagcgacggcctgagccaggccagctgccccctggccgccatcgaccacatcctggacagcagcagacagaagggcagaccccagagcaaggcccccgacagcaccctgagaagccccagcagccccatccacgaggaggacgaggagaagctgagcgaggacgtggacgcccccccccccctgggcggcgccgagctggccctgagagagagcagcagccccgagagcttcatcaccgaggaggtggacgagagcagcagcccccagcagggcaccagagccgccagcatcgagaacgtgctgcaggacagcagccccgagcactgcggcagaggcccccccgccgacatctacctgcccgccctgggccccgacagctgcagcgtgggcatcgacgagtag

SEQ ID NO: 53155 - DNA, 963 bp, Artificial Sequence
  derived and/or modified sequence
atgggcagcatcctgagcagaagaatcgccggcgtggaggacatcgacatccaggccaacagcgcctacagatacccccccaagagcggcaactacttcgccagccacttcttcatgggcggcgagaagttcgacaccccccaccccgagggctacctgttcggcgagaacatggacctgaacttcctgggcagcagacccgtgcagttcccctacgtgacccccgccccccacgagcccgtgaagaccctgagaagcctggtgaacatcagaaaggacagcctgagactggtgagatacaaggacgacgccgacagccccaccgaggacggcgacaagcccagagtgctgtacagcctggagttcaccttcgacgccgacgccagagtggccatcaccatctactgccaggccagcgaggagttcctgaacggcagagccgtgtacagccccaagagccccagcctgcagagcgagaccgtgcactacaagagaggcgtgagccagcagttcagcctgcccagcttcaagatcgacttcagcgagtggaaggacgacgagctgaacttcgacctggacagaggcgtgttccccgtggtgatccaggccgtggtggacgagggcgacgtggtggaggtgaccggccacgcccacgtgctgctggccgccttcgagaagcacatggacggcagcttcagcgtgaagcccctgaagcagaagcagatcgtggacagagtgagctacctgctgcaggagatctacggcatcgagaacaagaacaaccaggagaccaagcccagcgacgacgagaacagcgacaacagcaacgagtgcgtggtgtgcctgagcgacctgagagacaccctgatcctgccctgcagacacctgtgcctgtgcaccagctgcgccgacaccctgagataccaggccaacaactgccccatctgcagactgcagctgtag

SEQ ID NO: 53156 - protein, 359 aa, Artificial Sequence
  derived and/or modified sequence
MAATLGPLGSWQQWRRCLSARDGSRMLLLLLLLGSGQGPQQVGAGQTFEYLKREHSLSKPYQGVGTGSSSLWNLMGNAMVMTQYIRLTPDMQSKQGALWNRVPCFLRDWELQVHFKIHGQGKKNLHGDGLAIWYTKDRMQPGPVFGNMDKFVGLGVFVDTYPNEEKQQEAQKRRYSPGVQRVFPYISAMVNNGSLSYDHERDGRPTELGGCTAIVRNLHYDTFLVIRYVKRHLTIMMDIDGKHEWRDCIEVPGVRLPRGYYFGTSSITGDLSDNHDVISLKLFELTVERTPEEEKLHRDVFLPSVDNMKLPEMTAPLPPLSGLALFLIVFFSLVFSVFAIVIGIILYNKWQEQSRKRFY

SEQ ID NO: 53157 - DNA, 1080 bp, Artificial Sequence
  derived and/or modified sequence
atggccgccaccctgggccccctgggcagctggcagcagtggagaagatgcctgagcgccagagacggcagcagaatgctgctgctgctgctgctgctgggcagcggccagggcccccagcaggtgggcgccggccagaccttcgagtacctgaagagagagcacagcctgagcaagccctaccagggcgtgggcaccggcagcagcagcctgtggaacctgatgggcaacgccatggtgatgacccagtacatcagactgacccccgacatgcagagcaagcagggcgccctgtggaacagagtgccctgcttcctgagagactgggagctgcaggtgcacttcaagatccacggccagggcaagaagaacctgcacggcgacggcctggccatctggtacaccaaggacagaatgcagcccggccccgtgttcggcaacatggacaagttcgtgggcctgggcgtgttcgtggacacctaccccaacgaggagaagcagcaggaggcccagaagagaagatacagccccggcgtgcagagagtgttcccctacatcagcgccatggtgaacaacggcagcctgagctacgaccacgagagagacggcagacccaccgagctgggcggctgcaccgccatcgtgagaaacctgcactacgacaccttcctggtgatcagatacgtgaagagacacctgaccatcatgatggacatcgacggcaagcacgagtggagagactgcatcgaggtgcccggcgtgagactgcccagaggctactacttcggcaccagcagcatcaccggcgacctgagcgacaaccacgacgtgatcagcctgaagctgttcgagctgaccgtggagagaacccccgaggaggagaagctgcacagagacgtgttcctgcccagcgtggacaacatgaagctgcccgagatgaccgcccccctgccccccctgagcggcctggccctgttcctgatcgtgttcttcagcctggtgttcagcgtgttcgccatcgtgatcggcatcatcctgtacaacaagtggcaggagcagagcagaaagagattctactag

SEQ ID NO: 53158 - DNA, 1080 bp, Artificial Sequence
  derived and/or modified sequence
atggccgcaactctgggacccctggggagctggcagcagtggaggcgatgcctttctgcccgggacggatcgagaatgttgctgcttcttctcctgctgggatctgggcaaggaccacagcaagtgggggcaggccagacattcgagtacttgaaacgcgagcactccctgtctaaaccatatcagggcgtaggaacaggcagttcctctctgtggaatcttatgggaaacgccatggtcatgactcagtacattaggctcacccctgacatgcaaagtaagcagggagccctttggaaccgcgtcccatgttttctgagggactgggaactccaggtgcactttaaaatacatgggcagggaaagaagaatttacatggcgatggcttagctatctggtatacgaaggatagaatgcagccaggccccgtcttcgggaatatggacaagtttgtggggttgggtgtgttcgtggatacctaccctaatgaggaaaaacaacaggaggcgcagaaaagaagatactccccaggcgtgcagcgcgtcttcccatacatttcagccatggtcaacaacggctccctgagctatgaccacgaaagagacggtcgccccacggagctgggggggtgcaccgccattgttcgaaacttgcattacgacaccttcttggtgattcggtatgtcaagcggcatctaaccattatgatggacatcgatggtaaacacgaatggcgagactgtattgaggtccccggggtgcgcctgccccgtggctattacttcgggacatcaagcattacgggtgaccttagcgataatcatgatgtgatcagccttaagctatttgaactcaccgtggagagaactccagaggaggaaaagttgcaccgtgatgttttcctaccgtcagtggataacatgaaacttcccgagatgaccgcaccactccccccactttctggtctcgccctttttcttatagtgtttttctccctggtgttttccgtgttcgccattgtgattgggattatcctctacaataaatggcaggaacagagccgaaaacggttttattag

SEQ ID NO: 53159 - DNA, 2020 bp, Artificial Sequence
  derived and/or modified sequence
gatgaagggtcgttggtgggaaagatggcggcgactctgggaccccttgggtcgtggcagcagtggcggcgatgtttgtcggctcgggatgggtccaggatgttactccttcttcttttgttggggtctgggcaggggccacagcaagtcggggcgggtcaaacgttcgagtacttgaaacgggagcactcgctgtcgaagccctaccagggtgtgggcacaggcagttcctcactgtggaatctgatgggcaatgccatggtgatgacccagtatatccgccttaccccagatatgcaaagtaaacagggtgccttgtggaaccgggtgccatgtttcctgagagactgggagttgcaggtgcacttcaaaatccatggacaaggaaagaagaatctgcatggggatggcttggcaatctggtacacaaaggatcggatgcagccagggcctgtgtttggaaacatggacaaatttgtggggctgggagtatttgtagacacctaccccaatgaggagaagcagcaagaggcccagaagaggcgatattctccaggagtccagcgggtattcccctacatctcagccatggtgaacaacggctccctcagctatgatcatgagcgggatgggcggcctacagagctgggaggctgcacagccattgtccgcaatcttcattacgacaccttcctggtgattcgctacgtcaagaggcatttgacgataatgatggatattgatggcaagcatgagtggagggactgcattgaagtgcccggagtccgcctgccccgcggctactacttcggcacctcctccatcactggggatctctcagataatcatgatgtcatttccttgaagttgtttgaactgacagtggagagaaccccagaagaggaaaagctccatcgagatgtgttcttgccctcagtggacaatatgaagctgcctgagatgacagctccactgccgcccctgagtggcctggccctcttcctcatcgtctttttctccctggtgttttctgtatttgccatagtcattggtatcatactctacaacaaatggcaggaacagagccgaaagcgcttctactgagccctcctgctgccaccacttttgtgactgtcacccatgaggtatggaaggagcaggcactggcctgagcatgcagcctggagagtgttcttgtctctagcagctggttggggactatattctgtcactggagttttgaatgcagggaccccgcattcccatggttgtgcatggggacatctaactctggtctgggaagccacccaccccagggcaatgctgctgtgatgtgcctttccctgcagtccttccatgtgggagcagaggtgtgaagagaatttacgtggttgtgatgccaaaatcacagaacagaatttcatagcccaggctgccgtgttgtttgactcagaaggcccttctacttcagttttgaatccacaaagaattaaaaactggtaacaccacaggctttctgaccatccattcgttgggttttgcatttgacccaaccctctgcctacctgaggagctttctttggaaaccaggatggaaacttcttccctgccttaccttcctttcactccattcattgtcctctctgtgtgcaacctgagctgggaaaggcatttggatgcctctctgttggggcctggggctgcagaacacacctgcgtttcactggccttcattaggtggccctagggagatggctttctgctttggatcactgttccctagcatgggtcttgggtctattggcatgtccatggccttcccaatcaagtctcttcaggccctcagtgaagtttggctaaaggttggtgtaaaaatcaagagaagcctggaagacatcatggatgccatggattagctgtgcaactgaccagctccaggtttgatcaaaccaaaagcaacatttgtcatgtggtctgaccatgtggagatgtttctggacttgctagagcctgcttagct

SEQ ID NO: 53160 - DNA, 1400 bp, Artificial Sequence
  derived and/or modified sequence
gatgaagggtcgttggtgggaaagatggcggcgactctgggaccccttgggtcgtggcagcagtggcggcgatgtttgtcggctcgggatgggtccaggatgttactccttcttcttttgttggggtctgggcaggggccacagcaagtcggggcgggtcaaacgttcgagtacttgaaacgggagcactcgctgtcgaagccctaccagggtgtgggcacaggcagttcctcactgtggaatctgatgggcaatgccatggtgatgacccagtatatccgccttaccccagatatgcaaagtaaacagggtgccttgtggaaccgggtgccatgtttcctgagagactgggagttgcaggtgcacttcaaaatccatggacaaggaaagaagaatctgcatggggatggcttggcaatctggtacacaaaggatcggatgcagccaggcccagaagaggcgatattctccaggagtccagcgggtattcccctacatctcagccatggtgaacaacggctccctcagctatgatcatgagcgggatgggcggcctacagagctgggaggctgcacagccattgtccgcaatcttcattacgacaccttcctggtgattcgctacgtcaagaggcatttgacgataatgatggatattgatggcaagcatgagtggagggactgcattgaagtgcccggagtccgcctgccccgcggctactacttcggcacctcctccatcactggggatctctcagataatcatgatgtcatttccttgaagttgtttgaactgacagtggagagaaccccagaagaggaaaagctccatcgagatgtgttcttgccctcagtggacaatatgaagctgcctgagatgacagctccactgccgcccctgagtggcctggccctcttcctcatcgtctttttctccctggtgttttctgtatttgccatagtcattggtatcatactctacaacaaatggcaggaacagagccgaaagcgcttctactgagccctcctgctgccaccacttttgtgactgtcacccatgaggtatggaaggagcaggcactggcctgagcatgcagcctggagagtgttcttgtctctagcagctggttggggactatattctgtcactggagttttgaatgcagggaccccgcattcccatggttgtgcatggggacatctaactctggtctgggaagccacccaccccagggcaatgctgctgtgatgtgcctttccctgcagtccttccatgtgggagcagaggtgtgaagagaatttacgtggttgtgatgccaaaatcacagaacagaatttcatagcccaggctgccgtgttgtttgactcagaaggcccttctacttcagttttgaatccac

SEQ ID NO: 53161 - DNA, 1008 bp, Artificial Sequence
  derived and/or modified sequence
gatgaagggtcgttggtgggaaagatggcggcgactctgggaccccttgggtcgtggcagcagtggcggcgatgtttgtcggctcgggatgggtccaggatgttactccttcttcttttgttggggtctgggcaggggccacagcaagtcggggcgggtcaaacgttcgagtacttgaaacgggagcactcgctgtcgaagccctaccaggccatgtttcctgagagactgggagttgcaggtgcacttcaaaatccatggacaaggaaagaagaatctgcatggggatggcttggcaatctggtacacaaaggatcggatgcagccagcgggtattcccctacatctcagccatggtgaacaacggctccctcagctatgatcatgagcgggatgggcggcctacagagctgggaggctgcacagccattgtccgcaatcttcattacgacaccttcctggtgattcgctacgtcaagaggcatttgacgataatgatggatattgatggcaagcatgagtggagggactgcattgaagtgcccggagtccgcctgccccgcggctactacttcggcacctcctccatcactggggatctctcagataatcatgatgtcatttccttgaagttgtttgaactgacagtggagagaaccccagaagaggaaaagctccatcgagatgtgttcttgccctcagtggacaatatgaagctgcctgagatgacagctccactgccgcccctgagtggcctggccctcttcctcatcgtctttttctccctggtgttttctgtatttgccatagtcattggtatcatactctacaacaaatggcaggaacagagccgaaagcgcttctactgagccctcctgctgccaccacttttgtgactgtcacccatgaggtatggaaggagcaggcactggcctgagcatgcagcctggagagtgttcttgtctctagcagctggttggggactatattctgtcactggagttttga

SEQ ID NO: 53162 - DNA, 1080 bp, Artificial Sequence
  derived and/or modified sequence
atggccgccaccctgggccccctgggctcctggcagcagtggaggcgctgcctgagcgccagagatggcagcaggatgctgctgctgctgctgctgctgggcagcggccagggcccccagcaggtgggcgccggccagacctttgagtacctgaagcgggagcacagcctgagcaagccctaccagggcgtgggcaccggcagcagcagcctgtggaacctgatgggaaatgccatggtgatgacccagtacatccggctgaccccagacatgcagagcaagcagggcgccctgtggaacagagtgccctgcttcctgcgggactgggagctgcaggtgcacttcaagatccacggccagggcaagaagaacctgcatggagatggcctggccatctggtacaccaaggacaggatgcagcccggccctgtgtttggaaacatggacaagtttgtgggcctgggcgtgtttgtggacacctacccaaatgaggagaagcagcaggaggcccagaagaggcgctacagccctggggtgcagagggtcttcccctacatcagcgccatggtgaacaacggcagcctgtcctatgaccacgagagagatggccggcccacagagctgggcggctgcacagccatcgtgaggaacctgcactatgacaccttcctggtgatccgctacgtgaagaggcacctgaccatcatgatggacattgatggcaagcatgagtggagggactgcatcgaggtgcctggggtgcggctgccccggggctactacttcggcaccagcagcatcaccggggacctgagtgacaaccatgatgtgatcagcctgaagctgtttgagctgactgtggagaggaccccagaggaggagaagctgcacagagatgtgttcctgcccagcgtggacaacatgaagctgcctgagatgacagcccccctgccccccctgagcggcctggccctcttcctgattgtgttcttcagcctggtgttttctgtgtttgccatcgtcatcggcatcatcctgtacaacaagtggcaggagcagagcaggaagcgcttctactag

SEQ ID NO: 53163 - DNA, 1080 bp, Artificial Sequence
  derived and/or modified sequence
atggccgccaccctgggccccctgggcagctggcagcagtggcggcgttgcctttctgcccgagacggcagccgcatgcttctcctgctgctgttgcttggatccggccaaggaccacagcaggtgggagccgggcagacctttgagtatctgaaaagggaacattccctgtccaaaccctaccagggtgtgggtacgggctcctcttccctgtggaatctcatgggtaacgctatggtcatgacccagtacatcaggctgacacctgacatgcagtccaaacagggggcactgtggaaccgggtgccctgttttctcagggattgggaactccaggtgcacttcaaaatccacggacaagggaagaaaaatctgcacggggatggactcgcgatctggtacacaaaggaccgcatgcagcctggacccgtgtttggcaacatggacaagtttgtcggactcggagtgttcgtagatacgtacccaaatgaagagaagcagcaggaagcacagaaacgtaggtattctcccggtgtccagcgcgttttcccttacatcagcgctatggtgaataatgggtcactgtcgtatgatcacgagcgcgatggcaggccaaccgaactggggggatgcaccgctatagtgagaaacctgcattacgacactttcctcgttattagatacgttaaacgccaccttacaattatgatggacattgatggcaaacatgaatggagagactgcatcgaggtgcctggagtaaggttaccacggggttactattttgggacatcctcaatcacgggggatttatccgacaaccatgatgtgatcagtctaaagctgttcgagctgacggttgagcgcactccggaagaagagaagcttcaccgcgatgtattccttccctctgtcgataacatgaagctccccgaaatgacggcccccctcccaccactgagcggtctcgcgctcttcctcatcgtgtttttcagtttagtgttctccgtgtttgctatcgtaatcggaataatactttataacaagtggcaagaacagtctcgcaagagattttactag

SEQ ID NO: 53164 - DNA, 1080 bp, Artificial Sequence
  derived and/or modified sequence
atggctgctactcttgggcctctggggtcttggcagcaatggagaagatgtctttcagccagagatggctcccgcatgctgctcctgctgctgctgcttggtagtgggcaggggccacagcaggtgggcgctggccagaccttcgagtatctgaaacgggagcacagcttgtctaagccctatcaaggcgtggggactggtagcagcagcttgtggaatctgatgggcaatgccatggtaatgacacagtacatcaggttaacccctgacatgcagtcgaaacagggcgcactatggaacagggtgccttgctttttgcgggattgggagctgcaggtccactttaagatccatggccagggaaagaagaacctgcacggtgacgggttagctatctggtatacaaaagataggatgcaacccggtccggttttcggcaatatggataagttcgtaggcctgggcgtctttgtggatacttatccaaacgaagaaaaacaacaggaggcccagaagcggagatatagcccgggtgttcagagagtctttccatatattagtgcaatggtcaacaacggatcactttcctatgatcatgagcgggacggacgccctacggaactcggcggatgcacagcgattgtgagaaatctgcattacgacaccttcctcgtcatcaggtatgttaagcgtcatctcaccattatgatggacatcgacgggaagcatgagtggcgggattgcatcgaggtgcccggtgtgagactccctcgcggttactacttcgggacttctagcatcacgggcgatctgtctgataatcacgacgttatctcactaaagctcttcgaactcaccgtcgagcggaccccggaggaagagaaactacaccgagatgtttttcttccaagcgtagacaacatgaagctccccgagatgacggcccctttgccaccactcagtggactggcactcttcctgattgtcttcttctctctcgtcttttcagtgttcgctattgtaatcggtatcatcctgtacaacaagtggcaagagcagtctcggaaacgcttttactag

SEQ ID NO: 53165 - protein, 444 aa, Artificial Sequence
  derived and/or modified sequence
MGDPSKQDILTIFKRLRSVPTNKVCFDCGAKNPSWASITYGVFLCIDCSGSHRSLGVHLSFIRSTELDSNWSWFQLRCMQVGGNASAVSDTAWASAIAEPSSLTSRPVETTLENNEGGQEQGPSVEGLNVPTKATLEVSSIIKKKPNQAKKGLGAKKGSLGAQKLANTCFNEIEKQAQAADKMKEQEDLAKVVSKEESIVSSLRLAYKDLEIQMKKDEKMNISGKKNVDSDRLGMGFGNCRSVISHSVTSDMQTIEQESPIMAKPRKKYNDDSDDSYFTSSSSYFDEPVELRSSSFSSWDDSSDSYWKKETSKDTETVLKTTGYSDRPTARRKPDYEPVENTDEAQKKFGNVKAISSDMYFGRQSQADYETRARLERLSASSSISSADLFEEPRKQPAGNYSLSSVLPNAPDMAQFKQGVRSVAGKLSVFANGVVTSIQDRYGS

SEQ ID NO: 53166 - protein, 472 aa, Artificial Sequence
  derived and/or modified sequence
MGDPSKQDILTIFKRLRSVPTNKVCFDCGAKNPSWASITYGVFLCIDCSGSHRSLGVHLSFIRSTELDSNWSWFQLRCMQVGGNASALWLDSCVVPPLSPPPKEEDFFASHVSPEVSDTAWASAIAEPSSLTSRPVETTLENNEGGQEQGPSVEGLNVPTKATLEVSSIIKKKPNQAKKGLGAKKGSLGAQKLANTCFNEIEKQAQAADKMKEQEDLAKVVSKEESIVSSLRLAYKDLEIQMKKDEKMNISGKKNVDSDRLGMGFGNCRSVISHSVTSDMQTIEQESPIMAKPRKKYNDDSDDSYFTSSSSYFDEPVELRSSSFSSWDDSSDSYWKKETSKDTETVLKTTGYSDRPTARRKPDYEPVENTDEAQKKFGNVKAISSDMYFGRQSQADYETRARLERLSASSSISSADLFEEPRKQPAGNYSLSSVLPNAPDMAQFKQGVRSVAGKLSVFANGVVTSIQDRYGS

SEQ ID NO: 53167 - protein, 152 aa, Artificial Sequence
  derived and/or modified sequence
MGDPSKQDILTIFKRLRSVPTNKVCFDCGAKNPSWASITYGVFLCIDCSGSHRSLGVHLSFIRSTELDSNWSWFQLRCMQVGGNASAVSDTAWASAIAEPSSLTSRPVETTLENNEGGQEQGPSVEGLNVPTKATLEVSSIIKKKPNQAKKG

SEQ ID NO: 53168 - DNA, 1335 bp, Artificial Sequence
  derived and/or modified sequence
atgggtgacccgtccaagcaggacattttgacgattttcaagagactccgcagtgtgcctacaaacaaggtctgcttcgattgcggagccaagaacccgagctgggcctctattacatatggagttttcttgtgcatcgattgctccgggtctcaccgctctctcggggttcacctttctttcattaggagtaccgagctcgacagtaattggtcctggttccagcttcgctgcatgcaggttggagggaacgcatccgccgttagcgacaccgcgtgggcctctgcaattgccgagccctcctctctgacctccaggcccgttgagactactcttgagaacaatgagggtgggcaagaacagggaccttccgtagaaggcttgaacgtacctaccaaggccaccctagaggtgtcgagtattattaagaagaaaccaaaccaggcaaagaagggcctcggggcgaagaagggctctcttggagcccagaagttggcgaatacctgttttaacgagatcgaaaaacaagcacaagccgcagacaagatgaaggaacaagaagatctcgcaaaggtggtttcaaaggaagaatcaatcgttagttcacttcgcttagcttacaaagacctagagatccaaatgaagaaggacgaaaagatgaacatatccggaaaaaaaaacgttgacagcgatcggctggggatggggtttggcaattgccgaagtgtgataagtcactccgtcacctccgacatgcaaactatcgagcaggaatcccccatcatggcaaaacctaggaaaaagtataacgatgactctgacgattcttacttcacgtcaagttctagctactttgatgaacctgtggaacttagatcctcctctttttcttcctgggacgatagttcggacagctattggaaaaaggaaacttccaaggatactgagacggtgctgaaaacaacaggctactccgatcggccaacggccagaagaaagcccgattatgagcctgtggagaataccgatgaggcccagaagaagttcgggaacgtgaaagctatctcaagcgacatgtacttcggtcgacagtcacaggccgactatgagacaagggcccgacttgagaggttgagcgctagttcctccattagctcagcagatctcttcgaggagccaagaaagcagccagccggtaattattccctgtccagcgtgctgcccaacgctcccgatatggcccagttcaaacagggtgtgcgatcagtggcgggcaaactgagcgtctttgccaatggggtcgttacgagtattcaggatcggtatgggtcctag

SEQ ID NO: 53169 - DNA, 1419 bp, Artificial Sequence
  derived and/or modified sequence
atgggggacccaagcaaacaggatatactcaccatattcaagcgcctgcgaagcgttcctaccaataaagtgtgttttgattgtggagctaagaatccaagctgggcgtctataacatacggggtgttcctgtgcatcgattgtagtggaagtcatcgatctctgggagtgcacctgtcatttatccgaagcaccgaactagatagcaattggtcctggttccaattgcgttgtatgcaagtcggaggcaatgctagtgccctgtggttagattcttgcgtagtacctcctctgagcccccccccaaaagaggaagactttttcgcaagccacgttagccctgaagtgtctgatactgcgtgggcctccgccatcgcagaaccttcctctcttacctccagacctgtcgagaccactctggagaataatgaaggagggcaagaacagggacctagcgtcgagggactgaacgtccccactaaggccacccttgaagtttccagcatcatcaaaaagaagcctaaccaagcaaaaaaaggtttaggagcaaaaaagggcagtcttggggctcagaaactggccaacacttgcttcaatgagattgagaagcaggcgcaggctgccgataagatgaaagaacaggaagacctggcgaaggttgtgagcaaggaggaaagtattgtgtcttctcttaggctcgcttacaaagatctcgaaatccagatgaaaaaggatgaaaaaatgaatatctccggcaagaagaacgtagatagcgacaggttgggaatgggcttcggcaactgccgctccgtgatttctcacagtgtcaccagcgacatgcaaaccattgaacaggagtctcctattatggccaaacctagaaagaagtacaatgacgactcagacgacagttactttaccagctccagctcttactttgacgaaccagtcgaactccgcagtagctcatttagcagctgggatgatagctcagattcatattggaagaaggaaactagcaaggacacagagactgtgctgaagaccacaggttatagtgatcggccaacagctagaaggaagccagactatgagccagtcgagaacacagacgaggcccagaagaagtttgggaatgtgaaagccattagttccgacatgtactttggccggcagagtcaggctgactatgagacccgggcacgactggagcggctgagtgcttcatccagcataagctccgctgacctgttcgaggagcccaggaaacaaccggctgggaattactcccttagctccgtactgccaaacgcccctgacatggcacagttcaagcagggcgtcagatcagtggcaggcaaattatccgtcttcgcgaatggagtagtgacatccatacaggaccggtacggttcttag

SEQ ID NO: 53170 - DNA, 459 bp, Artificial Sequence
  derived and/or modified sequence
atgggcgacccatctaagcaggatattctgaccatatttaagcgactgcgctcagtccccacaaacaaggtatgcttcgactgcggagccaaaaatccttcatgggcgagcatcacgtatggcgttttcttgtgcattgactgttccggcagccatagaagcctgggcgtgcacttgagttttatccgcagcacagaacttgacagcaattggtcatggtttcagctccggtgtatgcaggtcggaggcaacgcttctgctgtgtcagatacagcatgggcctcagctattgccgagccgagcagtctgacgtccagacctgtcgagaccacactggaaaacaatgagggcggccaagagcagggcccttcagtcgagggtctcaatgttccaaccaaggccaccctcgaagtgtcatctattattaagaaaaaacccaatcaagctaagaagggctag

SEQ ID NO: 53171 - DNA, 1640 bp, Artificial Sequence
  derived and/or modified sequence
ctcgtcgctcctgctgaggcggtagccgcttttcgtcgactcttaccggttggctgggccagctgcgccgcggctcacagctgacgatgggggaccccagcaagcaggacatcttgaccatcttcaagcgcctccgctcggtgcccactaacaaggtgtgttttgattgtggtgccaaaaatcccagctgggcaagcataacctatggagtgttcctttgcattgattgctcagggtcccaccggtcacttggtgttcacttgagttttattcgatctacagagttggattccaactggtcatggtttcagttgcgatgcatgcaagtcggaggaaacgctagtgcagtgagtgacacagcgtgggcatcagcaatagcagaaccatcttctttaacatcaaggcctgtggaaaccactttggaaaataatgaaggtggacaagagcaaggaccaagtgtggaaggtcttaatgtaccaacaaaggctactttagaggtatcctctatcataaaaaagaaaccaaatcaagctaaaaaaggccttggggccaaaaaaggaagtttgggagctcagaaactggcaaacacatgctttaatgaaattgaaaaacaagctcaagctgcggataaaatgaaggagcaggaagacctggccaaggtggtatctaaagaagaatcaattgtttcatcattacgattagcctataaggatcttgaaattcaaatgaagaaagacgaaaagatgaacattagtggcaaaaaaaatgttgactcagacagactcggcatgggatttggaaattgcagaagtgttatttcacattcagtgacttcagatatgcagaccatagagcaggaatcacccattatggcaaaaccaagaaaaaagtataatgatgacagtgacgattcatattttacttccagctcaagttactttgacgagccagtggagttaaggagcagttctttctctagctgggatgacagttcagattcctattggaaaaaagagaccagcaaagatactgaaacagttctgaaaaccacaggctattcagacagacctactgctcgccgcaagccagattatgagccagttgaaaatacagatgaggcccagaagaagtttggcaatgtcaaggccatttcatcagatatgtattttggaagacaatcccaggctgattatgagaccagggcccgcctagagaggctgtcggcaagttcctccataagctcggctgatctgttcgaggagccgaggaagcagccagcagggaactacagcctgtccagtgtgctgcccaacgcccccgacatggcgcagttcaagcagggagtgagatcggttgctggaaaactctccgtctttgctaatggagtcgtgacttcaattcaggatcgctacggttcttaatactgaagtcatgatgtgtatttcctggagaaattcctctttaaatgaacaagtaaccacatctcaggcggcagtgaagtccagatagttttgcagattgttttgctactttttcatatggtatatgtttctgatttttaatatttcttttgagaaattctgagttctgatgtaggagctttcctgtgatttctgtttcacgttccttcctgtcacacc

SEQ ID NO: 53172 - DNA, 1650 bp, Artificial Sequence
  derived and/or modified sequence
ttttcgtcgactcttaccggttggctgggccagctgcgccgcggctcacagctgacgatgggggaccccagcaagcaggacatcttgaccatcttcaagcgcctccgctcggtgcccactaacaaggtgtgttttgattgtggtgccaaaaatcccagctgggcaagcataacctatggagtgttcctttgcattgattgctcagggtcccaccggtcacttggtgttcacttgagttttattcgatctacagagttggattccaactggtcatggtttcagttgcgatgcatgcaagtcggaggaaacgctagtgcactgtggcttgatagttgtgtggttccacctttgtcccctccaccaaaggaggaagatttttttgcctctcacgtttctcctgaggtgagtgacacagcgtgggcatcagcaatagcagaaccatcttctttaacatcaaggcctgtggaaaccactttggaaaataatgaaggtggacaagagcaaggaccaagtgtggaaggtcttaatgtaccaacaaaggctactttagaggtatcctctatcataaaaaagaaaccaaatcaagctaaaaaaggccttggggccaaaaaaggaagtttgggagctcagaaactggcaaacacatgctttaatgaaattgaaaaacaagctcaagctgcggataaaatgaaggagcaggaagacctggccaaggtggtatctaaagaagaatcaattgtttcatcattacgattagcctataaggatcttgaaattcaaatgaagaaagacgaaaagatgaacattagtggcaaaaaaaatgttgactcagacagactcggcatgggatttggaaattgcagaagtgttatttcacattcagtgacttcagatatgcagaccatagagcaggaatcacccattatggcaaaaccaagaaaaaagtataatgatgacagtgacgattcatattttacttccagctcaagttactttgacgagccagtggagttaaggagcagttctttctctagctgggatgacagttcagattcctattggaaaaaagagaccagcaaagatactgaaacagttctgaaaaccacaggctattcagacagacctactgctcgccgcaagccagattatgagccagttgaaaatacagatgaggcccagaagaagtttggcaatgtcaaggccatttcatcagatatgtattttggaagacaatcccaggctgattatgagaccagggcccgcctagagaggctgtcggcaagttcctccataagctcggctgatctgttcgaggagccgaggaagcagccagcagggaactacagcctgtccagtgtgctgcccaacgcccccgacatggcgcagttcaagcagggagtgagatcggttgctggaaaactctccgtctttgctaatggagtcgtgacttcaattcaggatcgctacggttcttaatactgaagtcatgatgtgtatttcctggagaaattcctctttaaatgaacaagtaaccacatctcaggcggcagtgaagtccagatagttttgcagattgttttgctactttttcatatggtatatgtttctgatttttaatatttcttttgagaaattctgagttctgatgta

SEQ ID NO: 53173 - DNA, 542 bp, Artificial Sequence
  derived and/or modified sequence
ctcgtcgctcctgctgaggcggtagccgcttttcgtcgactcttaccggttggctgggccagctgcgccgcggctcacagctgacgatgggggaccccagcaagcaggacatcttgaccatcttcaagcgcctccgctcggtgcccactaacaaggtgtgttttgattgtggtgccaaaaatcccagctgggcaagcataacctatggagtgttcctttgcattgattgctcagggtcccaccggtcacttggtgttcacttgagttttattcgatctacagagttggattccaactggtcatggtttcagttgcgatgcatgcaagtcggaggaaacgctagtgcagtgagtgacacagcgtgggcatcagcaatagcagaaccatcttctttaacatcaaggcctgtggaaaccactttggaaaataatgaaggtggacaagagcaaggaccaagtgtggaaggtcttaatgtaccaacaaaggctactttagaggtatcctctatcataaaaaagaaaccaaatcaagctaaaaaaggc

SEQ ID NO: 53174 - DNA, 1335 bp, Artificial Sequence
  derived and/or modified sequence
atgggagaccccagcaagcaggacatcctgaccatcttcaagaggctgcggtctgtgcccaccaacaaggtgtgctttgactgtggggccaagaaccccagctgggccagcatcacctacggcgtcttcctgtgcatcgactgcagcggcagccacaggagcctgggcgtgcacctgtccttcatccgcagcacagagctggacagcaactggagctggttccagctgcgctgcatgcaggtgggcggcaatgccagcgctgtgtctgacacagcctgggccagcgccatcgccgagcccagcagcctgaccagcaggcctgtggagaccaccctggagaacaatgaaggaggccaggagcagggccccagcgtggagggcctgaatgtgcccaccaaggccaccctggaggtgagcagcatcatcaagaagaagcccaaccaggccaagaagggcctgggcgccaagaagggcagcctgggcgcccagaagctggccaacacctgcttcaatgaaattgagaagcaggcccaggccgctgacaagatgaaggagcaggaggacctggccaaggtggtgtccaaggaggagagcatcgtgagcagcctgcggctggcctacaaggacctggagatccagatgaagaaggatgagaagatgaacatcagcggcaagaagaatgtggacagcgaccggctgggcatgggctttggaaactgccgcagcgtcatcagccacagcgtgaccagtgacatgcagaccatcgagcaggagagccccatcatggccaagcccaggaagaagtacaatgatgacagtgatgacagctacttcaccagcagcagcagctactttgatgagcctgtggagctgcggagcagcagcttcagctcctgggatgacagcagtgacagctactggaagaaggagaccagcaaggacacagaaacagtgctgaagaccaccggctacagcgaccggcccacagcccggaggaagccagactatgagcctgtggagaacacagatgaggcccagaagaagtttggaaatgtgaaggccatcagcagtgacatgtacttcggccggcagagccaggccgactatgagacccgggcccggctggagcggctgagcgccagcagcagcatcagcagcgctgacctgtttgaggagcccaggaagcagcctgctggcaactacagcctgagctctgtgctgcccaatgccccagacatggcccagttcaagcagggcgtgcgctctgtggccggcaagctgtctgtgtttgccaacggggtggtgaccagcatccaggacagatatggcagctag

SEQ ID NO: 53175 - DNA, 1419 bp, Artificial Sequence
  derived and/or modified sequence
atgggagaccccagcaagcaggacatcctgaccatcttcaagaggctgcggtctgtgcccaccaacaaggtgtgctttgactgtggggccaagaaccccagctgggccagcatcacctacggcgtcttcctgtgcatcgactgcagcggcagccacaggagcctgggcgtgcacctgtccttcatccgcagcacagagctggacagcaactggagctggttccagctgcgctgcatgcaggtgggcggcaatgccagcgccctgtggctggacagctgtgtggtgccccccctgagccccccacccaaggaggaggacttctttgccagccacgtgtccccagaggtgtctgacacagcctgggccagcgccatcgccgagcccagcagcctgaccagcaggcctgtggagaccaccctggagaacaatgaaggaggccaggagcagggccccagcgtggagggcctgaatgtgcccaccaaggccaccctggaggtgagcagcatcatcaagaagaagcccaaccaggccaagaagggcctgggcgccaagaagggcagcctgggcgcccagaagctggccaacacctgcttcaatgaaattgagaagcaggcccaggccgctgacaagatgaaggagcaggaggacctggccaaggtggtgtccaaggaggagagcatcgtgagcagcctgcggctggcctacaaggacctggagatccagatgaagaaggatgagaagatgaacatcagcggcaagaagaatgtggacagcgaccggctgggcatgggctttggaaactgccgcagcgtcatcagccacagcgtgaccagtgacatgcagaccatcgagcaggagagccccatcatggccaagcccaggaagaagtacaatgatgacagtgatgacagctacttcaccagcagcagcagctactttgatgagcctgtggagctgcggagcagcagcttcagctcctgggatgacagcagtgacagctactggaagaaggagaccagcaaggacacagaaacagtgctgaagaccaccggctacagcgaccggcccacagcccggaggaagccagactatgagcctgtggagaacacagatgaggcccagaagaagtttggaaatgtgaaggccatcagcagtgacatgtacttcggccggcagagccaggccgactatgagacccgggcccggctggagcggctgagcgccagcagcagcatcagcagcgctgacctgtttgaggagcccaggaagcagcctgctggcaactacagcctgagctctgtgctgcccaatgccccagacatggcccagttcaagcagggcgtgcgctctgtggccggcaagctgtctgtgtttgccaacggggtggtgaccagcatccaggacagatatggcagctag

SEQ ID NO: 53176 - DNA, 459 bp, Artificial Sequence
  derived and/or modified sequence
atgggagaccccagcaagcaggacatcctgaccatcttcaagaggctgcggtctgtgcccaccaacaaggtgtgctttgactgtggggccaagaaccccagctgggccagcatcacctacggcgtcttcctgtgcatcgactgcagcggcagccacaggagcctgggcgtgcacctgtccttcatccgcagcacagagctggacagcaactggagctggttccagctgcgctgcatgcaggtgggcggcaatgccagcgctgtgtctgacacagcctgggccagcgccatcgccgagcccagcagcctgaccagcaggcctgtggagaccaccctggagaacaatgaaggaggccaggagcagggccccagcgtggagggcctgaatgtgcccaccaaggccaccctggaggtgagcagcatcatcaagaagaagcccaaccaggccaagaagggctag

SEQ ID NO: 53177 - DNA, 1335 bp, Artificial Sequence
  derived and/or modified sequence
atgggcgaccccagcaagcaggacatcctgaccatcttcaagcggctgaggtctgtccccaccaacaaggtttgtttcgattgtggggctaagaatccaagttgggcctcaatcacatacggcgtgttcctatgcatcgactgcagtggctcacatcgttccctcggtgttcatctttcatttatcaggtcgactgaactcgatagcaactggtcctggttccagctgaggtgtatgcaagtgggggggaacgcctcagccgtcagcgacactgcctgggccagcgccattgcagaaccttctagcctgactagtcgccccgtagaaactacactggaaaacaatgagggagggcaggagcagggtcccagtgtagaagggctgaacgtacctactaaagcgaccttggaggtttcaagcattatcaagaagaaacctaatcaggccaagaagggactgggcgccaagaagggcagcctgggcgcccaaaagctggccaacacctgcttcaacgagatcgagaagcaggcccaggccgcagacaagatgaaagagcaagaggacctggctaaggtcgtatcgaaggaggagtctatcgtttcatccctgagactagcttataaggatctagagattcagatgaaaaaagatgaaaaaatgaacatttccggtaaaaaaaacgtagacagtgacagactggggatggggttcgggaattgtagatcagtaatttcgcattctgtcacctctgacatgcagaccattgagcaggagtcaccaattatggcaaagcctagaaagaagtataacgatgactctgacgacagctattttacatcttctagctcatatttcgacgagcccgtggagctgcggtcttcttcattcagttcatgggatgatagttccgactcttactggaagaaggagacatctaaggacactgagactgttctaaaaactaccgggtatagcgacagacccaccgcccggaggaagcctgactacgaacctgtggagaatactgacgaggcacagaagaagttcgggaatgtgaaggccatcagctctgatatgtattttggaaggcagtctcaggccgattacgaaaccagggctcggctggagaggctctctgcctcttcttctatttccagtgccgatttattcgaggaaccacgtaaacagcctgcaggcaactactctctgtcctctgtgctgcctaatgcgcctgatatggcacaattcaagcagggggtgcgatccgtggctggaaaactatctgtgttcgcaaacggcgtagtgactagcatacaagatcgctacggttcctag

SEQ ID NO: 53178 - DNA, 1419 bp, Artificial Sequence
  derived and/or modified sequence
atgggcgaccccagcaagcaggacatcctgaccatcttcaagcggctacgatctgtgccaacaaacaaggtgtgttttgactgcggggccaagaacccatcgtgggcttccatcacctatggagtgtttctgtgcatcgattgttctggctcccaccgttcccttggagtccacctctctttcatccgctccaccgagctagacagtaactggagctggttccagttacggtgtatgcaggtcggagggaatgccagtgcactgtggctggactcctgcgtggtgccaccattgtcaccgccaccaaaggaggaagactttttcgcttcccacgtcagtccagaagtgtccgataccgcttgggcaagcgctatcgctgagccaagctccttgacatcccgtcccgtggaaacgactctcgagaataatgaaggaggacaggaacagggcccctctgttgaagggctgaacgtgccgactaaagccactctggaggtgtcgagcatcattaagaaaaaaccaaaccaagctaaaaagggattgggtgccaaaaaaggctccctgggtgctcaaaagctcgccaatacttgcttcaacgaaattgaaaaacaggctcaggctgctgataagatgaaggagcaggaggatctcgcaaaagtagttagcaaagaggagagcatagtcagctctctgagactagcttacaaggatttagagatccagatgaagaaggacgaaaagatgaatatcagcggcaagaaaaatgttgattctgacagactggggatgggttttggaaattgccggagcgttatctctcacagtgttactagcgacatgcaaacaattgagcaggagagccctatcatggccaaaccaagaaagaaatataatgatgattcagacgatagctacttcacatcttcttcaagctacttcgatgaaccggtggagttgcgatcgtctagtttctcgtcctgggatgatagttcagactcttactggaagaaggagacctcaaaggacactgaaacggttctgaaaaccacgggctattcagataggcctacagcccgacggaagcctgactatgagccggtggagaataccgatgaggcccagaagaaatttgggaatgtgaaagctatttcttcagatatgtactttgggcggcagagccaggcagattacgaaacgcgggcgcgcctggagaggctgtctgcaagttcctccatttcctccgccgatctattcgaggaaccccggaagcagccagcaggcaactattctctgtccagcgtgttaccaaatgccccagacatggcacagttcaagcagggagtgcgatcagtcgcgggaaaactttccgtgtttgccaatggggttgtgactagcatccaggatagatacggatcctag

SEQ ID NO: 53179 - DNA, 459 bp, Artificial Sequence
  derived and/or modified sequence
atgggcgaccccagcaagcaggacatcctgaccatcttcaagcggcttaggagcgtccctactaataaggtctgcttcgattgtggtgcaaagaaccctagctgggcctcaattacctacggcgtgtttctttgcatcgattgctctggttcacatcgaagccttggagttcacctgtcatttattcggtcaacagagctggactctaactggtcctggtttcagctccgatgcatgcaggtagggggaaacgcaagtgccgtgagtgacacagcctgggcgagcgccatagccgaacccagttcccttacatctagacccgtcgaaacgacacttgagaacaatgaaggcgggcaggagcagggtccttcagttgaagggctgaacgtgcccactaaagcaacactggaagttagtagcataatcaagaaaaaacctaatcaggccaaaaaaggctag

SEQ ID NO: 53180 - DNA, 1335 bp, Artificial Sequence
  derived and/or modified sequence
atgggcgatccctctaagcaagatattctcaccatctttaagaggctcaggtcagtgccaacgaacaaggtctgttttgattgcggagccaagaatccaagctgggcgtccataacatacggggtatttctatgcatcgactgctcaggctcccaccgcagtcttggggtacacctgagctttattcgctcgacagagctggatagcaactggagttggttccagctcaggtgcatgcaagtgggcggaaacgcaagtgcagtttcggatactgcgtgggctagcgccattgcggagccgtcaagtttgactagcagaccggtcgaaaccactctggaaaataacgagggcggacaggaacaggggcctagcgtcgagggcctgaatgttccaactaaggctaccctggaggtttcatctataattaaaaagaaacccaatcaggctaaaaaagggctgggagccaaaaaaggttcacttggggctcagaagctggccaatacctgctttaatgaaatagaaaagcaagcccaagctgctgacaagatgaaagagcaggaagatctggccaaggtggtctcaaaggaggagtccattgtgtctagcctgcggcttgcgtacaaggacctcgaaattcagatgaaaaaggacgagaagatgaacatttctggaaagaaaaatgttgactctgacaggctgggcatgggctttggcaactgccggtcagttatctcacatagtgtgacctcagacatgcagacgattgaacaggagagcccaatcatggccaaacctaggaaaaaatataacgatgacagcgacgacagctactttacatcatcgtcttcgtattttgatgaacctgtcgaactgcgtagcagcagtttcagcagttgggatgattcgtccgacagttactggaagaaagaaactagcaaggatacagagaccgtgctaaaaacaactgggtattctgacagaccaactgcacgtcgcaagccagactacgaacccgtggaaaacactgatgaagctcagaagaagttcggaaacgtgaaggcaatctcttcagacatgtactttggacgccagtctcaggcagattatgagacccgggctcggctggaacgtttaagtgcatcttcttccatttctagcgctgatctatttgaagaacccaggaaacaaccggcagggaattactcattgtctagtgtgctgcccaacgccccagatatggctcagttcaaacagggcgttcggtcggtggcgggtaaactcagcgtctttgccaatggcgtggtgactagtattcaggatcgctatggatcatag

SEQ ID NO: 53181 - DNA, 1419 bp, Artificial Sequence
  derived and/or modified sequence
atgggagatccctcgaagcaggatatcttgactatctttaagagactccgaagcgtgcctacgaataaggtgtgctttgactgtggcgctaaaaatccaagttgggccagtattacctatggcgtgttcttgtgtatcgactgcagcggatcgcatagatccttgggtgtgcacctctcattcatccgtagtacagaactggattccaattggagctggtttcaattacgctgtatgcaggtggggggtaacgctagcgcgctatggctcgactcttgtgttgtgccgcctctgtcccccccaccaaaggaagaggattttttcgctagtcacgtgtcccctgaggtgtccgacaccgcgtgggccagtgccatcgctgagcctagctcattgacctctcgacctgtcgagactaccctggaaaataatgagggtgggcaagagcagggccctagcgtagagggtttgaacgttccgacaaaggccacactggaagtgtcttcaattattaaaaagaagcccaatcaggccaaaaagggactgggagcaaagaaggggagcctgggcgcacagaaactggccaatacttgcttcaacgaaattgagaagcaggcccaagccgcagacaaaatgaaggagcaggaggatcttgcgaaggtggtgtctaaggaggagagtatcgtttcctcgctgaggctggcgtacaaagatctcgagatccagatgaagaaggatgagaagatgaacatatctgggaaaaagaacgtcgactcggacaggctgggtatgggattcgggaactgccggtccgtgatcagccatagtgtaacaagcgatatgcagaccatagaacaggaatctcccataatggcaaaaccccgtaagaaatataacgacgacagcgacgacagctacttcacatcctcctcaagctattttgatgaaccagtagaactgagatctagcagctttagctcttgggatgactcaagcgattcttattggaaaaaagagacttcaaaggatactgaaacagttctgaaaacgaccggttattcagatcgccctaccgctcgaaggaaacccgattatgaacccgtggagaatactgatgaagcacagaagaagttcggaaatgtgaaggccattagctcggacatgtattttgggagacagtcgcaggctgactacgagacccgcgctcgcctggagagactgagtgccagctcaagtatctcttccgctgacctgtttgaagaaccaaggaagcaacccgcagggaactactctctttcgtccgtcttgcccaatgctcccgacatggcccaattcaaacaaggggtaagaagtgtcgccggaaaactttctgtgttcgctaacggggttgttacctcaattcaggatagatacggaagttag

SEQ ID NO: 53182 - DNA, 459 bp, Artificial Sequence
  derived and/or modified sequence
atgggggacccgagtaaacaggacattttgacaatctttaagaggctgaggtcagtgcctacaaacaaggtttgcttcgactgcggtgctaaaaatcccagttgggcctctattacctacggagttttcctatgcatagattgctcgggctcgcacagaagcctgggcgtgcacctgtcctttattcggtcgaccgagctcgactccaactggagctggtttcagctgcggtgtatgcaggtaggtggaaatgcgtccgccgtcagcgacacagcttgggctagtgccatcgctgagccatccagccttacatcccggcctgtcgagacgaccctggaaaacaatgagggcggacaggaacagggccctagcgtggagggtttgaatgtgcccacgaaagccaccctggaagtgtcttcaataattaaaaagaagcctaaccaagccaagaagggctag

SEQ ID NO: 53183 - DNA, 1335 bp, Artificial Sequence
  derived and/or modified sequence
atgggcgaccccagcaagcaggacatcctgaccatcttcaagagactgagaagcgtgcccaccaacaaggtgtgcttcgactgcggcgccaagaaccccagctgggccagcatcacctacggcgtgttcctgtgcatcgactgcagcggcagccacagaagcctgggcgtgcacctgagcttcatcagaagcaccgagctggacagcaactggagctggttccagctgagatgcatgcaggtgggcggcaacgccagcgccgtgagcgacaccgcctgggccagcgccatcgccgagcccagcagcctgaccagcagacccgtggagaccaccctggagaacaacgagggcggccaggagcagggccccagcgtggagggcctgaacgtgcccaccaaggccaccctggaggtgagcagcatcatcaagaagaagcccaaccaggccaagaagggcctgggcgccaagaagggcagcctgggcgcccagaagctggccaacacctgcttcaacgagatcgagaagcaggcccaggccgccgacaagatgaaggagcaggaggacctggccaaggtggtgagcaaggaggagagcatcgtgagcagcctgagactggcctacaaggacctggagatccagatgaagaaggacgagaagatgaacatcagcggcaagaagaacgtggacagcgacagactgggcatgggcttcggcaactgcagaagcgtgatcagccacagcgtgaccagcgacatgcagaccatcgagcaggagagccccatcatggccaagcccagaaagaagtacaacgacgacagcgacgacagctacttcaccagcagcagcagctacttcgacgagcccgtggagctgagaagcagcagcttcagcagctgggacgacagcagcgacagctactggaagaaggagaccagcaaggacaccgagaccgtgctgaagaccaccggctacagcgacagacccaccgccagaagaaagcccgactacgagcccgtggagaacaccgacgaggcccagaagaagttcggcaacgtgaaggccatcagcagcgacatgtacttcggcagacagagccaggccgactacgagaccagagccagactggagagactgagcgccagcagcagcatcagcagcgccgacctgttcgaggagcccagaaagcagcccgccggcaactacagcctgagcagcgtgctgcccaacgcccccgacatggcccagttcaagcagggcgtgagaagcgtggccggcaagctgagcgtgttcgccaacggcgtggtgaccagcatccaggacagatacggcagctag

SEQ ID NO: 53184 - DNA, 1419 bp, Artificial Sequence
  derived and/or modified sequence
atgggcgaccccagcaagcaggacatcctgaccatcttcaagagactgagaagcgtgcccaccaacaaggtgtgcttcgactgcggcgccaagaaccccagctgggccagcatcacctacggcgtgttcctgtgcatcgactgcagcggcagccacagaagcctgggcgtgcacctgagcttcatcagaagcaccgagctggacagcaactggagctggttccagctgagatgcatgcaggtgggcggcaacgccagcgccctgtggctggacagctgcgtggtgccccccctgagccccccccccaaggaggaggacttcttcgccagccacgtgagccccgaggtgagcgacaccgcctgggccagcgccatcgccgagcccagcagcctgaccagcagacccgtggagaccaccctggagaacaacgagggcggccaggagcagggccccagcgtggagggcctgaacgtgcccaccaaggccaccctggaggtgagcagcatcatcaagaagaagcccaaccaggccaagaagggcctgggcgccaagaagggcagcctgggcgcccagaagctggccaacacctgcttcaacgagatcgagaagcaggcccaggccgccgacaagatgaaggagcaggaggacctggccaaggtggtgagcaaggaggagagcatcgtgagcagcctgagactggcctacaaggacctggagatccagatgaagaaggacgagaagatgaacatcagcggcaagaagaacgtggacagcgacagactgggcatgggcttcggcaactgcagaagcgtgatcagccacagcgtgaccagcgacatgcagaccatcgagcaggagagccccatcatggccaagcccagaaagaagtacaacgacgacagcgacgacagctacttcaccagcagcagcagctacttcgacgagcccgtggagctgagaagcagcagcttcagcagctgggacgacagcagcgacagctactggaagaaggagaccagcaaggacaccgagaccgtgctgaagaccaccggctacagcgacagacccaccgccagaagaaagcccgactacgagcccgtggagaacaccgacgaggcccagaagaagttcggcaacgtgaaggccatcagcagcgacatgtacttcggcagacagagccaggccgactacgagaccagagccagactggagagactgagcgccagcagcagcatcagcagcgccgacctgttcgaggagcccagaaagcagcccgccggcaactacagcctgagcagcgtgctgcccaacgcccccgacatggcccagttcaagcagggcgtgagaagcgtggccggcaagctgagcgtgttcgccaacggcgtggtgaccagcatccaggacagatacggcagctag

SEQ ID NO: 53185 - DNA, 459 bp, Artificial Sequence
  derived and/or modified sequence
atgggcgaccccagcaagcaggacatcctgaccatcttcaagagactgagaagcgtgcccaccaacaaggtgtgcttcgactgcggcgccaagaaccccagctgggccagcatcacctacggcgtgttcctgtgcatcgactgcagcggcagccacagaagcctgggcgtgcacctgagcttcatcagaagcaccgagctggacagcaactggagctggttccagctgagatgcatgcaggtgggcggcaacgccagcgccgtgagcgacaccgcctgggccagcgccatcgccgagcccagcagcctgaccagcagacccgtggagaccaccctggagaacaacgagggcggccaggagcagggccccagcgtggagggcctgaacgtgcccaccaaggccaccctggaggtgagcagcatcatcaagaagaagcccaaccaggccaagaagggctag

SEQ ID NO: 53186 - DNA, 1071 bp, Artificial Sequence
  derived and/or modified sequence
atggccatgtcctatgtgaaggatgacatcttcagaatatatattaaggaaaagaaagaatgcaggcgagaccacagaccgccttgcgcccaggaggcccctaggaatatggtccatcccaacgtgatttgcgatggatgtaatggccctgttgtggggacaaggtacaagtgctcggtttgccctgactatgacctgtgcagcgtgtgtgagggcaaaggactccataggggtcacacaaaactggcctttccctctccattcgggcatctaagcgagggttttagtcattctaggtggctccgcaaagtcaaacacgggcatttcggatggccggggtgggagatgggaccgcccgggaactggtcgccaagaccgccccgcgccggagaggccaggcctggccccactgcggagagcgcatctggtccttctgaagacccatcggtcaatttcttgaaaaatgttggtgaaagcgtggctgccgcactgtcgccactcggaatcgaggttgatatagacgtagagcacggcggaaaaaggtcgagattaactcccgtgtctccagagtcatcaagcacggaggagaaatctagctcccaaccgtctagctgctgctccgacccaagcaagcctggtgggaatgttgagggggccacacagtctctggcagaacagatgcggaagattgcgctggaatcagagggccggccagaggagcagatggagtccgataattgttccgggggcgacgacgactggacacatctgtcgagcaaggaagtggaccctagcactggtgaactccagagcctccaaatgccagaatccgaaggtccaagcagcctggacccctcccaggaggggcctactgggctcaaggaagccgcgctttatccgcatttaccgccagaagccgatcccagacttatcgaaagcctttctcaaatgctgtctatgggcttcagtgacgagggcgggtggcttacaaggctactccaaactaaaaattatgatattggcgcagccctcgatacaatccagtactccaagcaccccccacccctgtag

SEQ ID NO: 53187 - DNA, 1071 bp, Artificial Sequence
  derived and/or modified sequence
atggccatgtcatacgtcaaagacgacatcttccgtatttacataaaggaaaagaaagaatgccgccgtgaccatcgccctccgtgcgcccaggaggcgcccagaaacatggtgcatcctaacgtaatctgcgatgggtgcaacggcccggtggtgggaacccgttataaatgttccgtgtgccccgactacgatctctgttctgtctgcgaggggaaaggactgcatcgcggacacactaagttggctttcccgagccctttcggtcatctgtctgaaggtttttcacatagccgctggcttagaaaggtaaagcacggccacttcggctggcccgggtgggaaatgggtccgcccggcaactggtcccctcgccccccacgggctggggaggcacggcccggacccaccgctgaaagcgcgtcagggcccagcgaagatccgagcgtgaactttttgaaaaatgtgggagagagcgtggcagccgccctcagtccgctcgggatcgaggtcgacatcgatgtcgagcacggcggaaagcgcagcagattgacccctgtctcacccgagtctagcagtactgaagagaagtcctcttcccagcccagctcttgctgctccgatccctctaaaccgggcgggaacgttgaaggtgcaactcagtcgctggccgaacagatgcggaaaatagctcttgaatcagaaggacgacccgaggagcagatggaatcggataattgcagcggaggagatgatgattggacgcacctgtccagcaaagaggtggatcctagtaccggcgaactccagtcactccagatgccagaatccgagggaccttcttcgttagaccccagtcaggagggccctacaggtctcaaggaagccgccctatacccccatctgcctcctgaagccgaccccaggttgatcgagagcttatcccagatgctaagcatgggtttctcagatgaggggggctggctcacgagattgctgcagacaaagaattatgacatcggcgccgccctcgatactatccaatacagtaaacacccccccccgttatag

SEQ ID NO: 53188 - DNA, 1071 bp, Artificial Sequence
  derived and/or modified sequence
atggcaatgtcgtatgtcaaggacgacatcttcagaatatacattaaagagaaaaaagagtgcaggcgagatcaccgacccccttgcgctcaggaggcaccacggaatatggttcaccctaatgttatttgcgatgggtgtaacggacccgtggtcgggacacgatacaagtgttccgtctgccccgattatgatctgtgctctgtctgcgagggcaagggtctgcatagaggacacaccaagcttgcttttccaagcccattcggtcatctgtctgaaggattttctcatagtcgctggctgcggaaggtgaaacacggccacttcggctggccaggatgggaaatggggcccccaggtaactggtctcctcgtccacccagagccggggaagcccgccctggccccaccgccgagagcgcctctggtccctcggaggatccctccgttaattttctgaagaacgtgggagagagtgtcgccgctgctctctcgcctttgggcatcgaagtggatatcgacgtggagcacggagggaagaggtcccgcctcacccctgtgagccccgaatcctcatcaacagaggaaaaatctagtagccagccatcttcctgctgctctgatccttcaaagccgggcggcaatgtggaaggagctacacaaagtcttgctgagcaaatgcggaagattgctctagaatcagaaggccggcccgaggaacaaatggagtcagacaattgcagcggcggcgacgatgattggacccacctcagtagcaaggaggtggatccgagcacaggtgagctccaatcgctgcagatgcctgaatcagaggggccatcttctctggaccctagccaggaaggcccaacggggctcaaggaagcagcgctgtatccgcatttgccaccagaggcggacccccgtcttattgagtccttgagccaaatgctgagcatgggttttagcgacgagggaggctggctgactagactgcttcagactaagaattatgatattggggcggccctggacaccattcagtactccaaacacccgcctccactctag

SEQ ID NO: 53189 - DNA, 423 bp, Artificial Sequence
  derived and/or modified sequence
atggcaatgagttacgtcaaagacgatatttttagaatttacattaaggagaagaaagagtgccggcgcgatcacaggccgccctgtgcgcaagaggctcccaggaatatggtccacccaaatgtaatatgcgatggttgtaatgggccagtagtcggtactaggtacaagtgctcagtctgccctgattatgacctgtgctccgtgtgcgagggcaagggtttacatagaggtcacactaagctcgctttcccaagtccattcgggcatctgtcagaagggttcagtcactcacggtggctgcgtaaggttaaacacggccatttcggatggcctgggtgggagatgggcccacctgggaattggagcccaaggccaccacgggcaggggaagctagaccaggtcccaccgctgaatcttag

SEQ ID NO: 53190 - DNA, 891 bp, Artificial Sequence
  derived and/or modified sequence
atgactagctccgagagcaccttgaagaggaaaaagtctgccggtgggactactgcccaccgggtcctcagacgtcgtccatttggccatctgagtgagggattctctcatagccggtggcttcgaaaagtcaaacacggccattttggctggccgggttgggagatgggtcccccggggaattggagccctaggccaccacgtgctggggaggcacgacccgggccaacagccgaaagcgcttccggcccctccgaagatcctagcgtgaatttcctcaagaatgtgggggaaagcgtggccgcagccctatctccacttggcatagaggtcgatatagatgtagaacatggaggaaaaaggagccgtctcactccagtgtctccagaatcctcctccactgaagagaaaagctcctctcagcccagctcttgctgtagcgatccatctaaacccgggggaaatgtggaaggcgccacacaaagtttggctgaacagatgcgtaaaattgccctggaatcagagggccgcccagaggagcagatggaatccgacaactgtagcggcggcgacgacgactggactcatctgagttctaaggaagtagacccttcaaccggagaattgcagtcactgcagatgcctgaatcagaaggaccatcctctttggatccatcacaggagggtcctacaggacttaaggaggcagcactgtaccctcatttacctccggaggccgaccctcggttaatagaatccctgtctcaaatgctatccatgggctttagcgatgaagggggttggctcactcggctcctgcagaccaagaactatgacatcggagcggcgctagatactattcagtactctaagcacccacctcccctttag

SEQ ID NO: 53191 - DNA, 504 bp, Artificial Sequence
  derived and/or modified sequence
atggcaatgtcctacgtcaaagacgatatcttccgcatatacattaaggaaaagaaagagtgtcggagggatcacagaccaccctgcgctcaggaagccccgcgtaatatggtgcaccctaatgtgatctgcgatgggtgcaacgggcctgttgtcggcaccagatacaagtgctccgtctgtccggactatgacttgtgctcagtgtgcgagggaaagggcttgcatagaggccatactaagctcgcctttcctagcccttttgggcacttgagcgagggcttttctcattctcgatggttgaggaaggtgaagcatgggcacttcgggtggcctggttgggagatgggccctcctgggaattggtcacctcggccaccgcgagcaggcgaagcccgtcctggccctacagcagagtcggcctctggcccatctgaagacccgtcagtgaactttctaaaaaacgtgggagaatcagtcgctgcagctcttagccccctttag

SEQ ID NO: 53192 - DNA, 1071 bp, Artificial Sequence
  derived and/or modified sequence
atggccatgtcctatgtgaaggatgacatcttccgcatctacatcaaggagaagaaggagtgccggcgggaccacaggcctccctgtgcccaggaggcccccaggaacatggtgcaccccaacgtcatctgtgatggctgcaatggacctgtggtgggcacccgctacaagtgcagcgtgtgcccagactatgacctgtgcagcgtgtgtgagggcaagggcctgcaccggggccacaccaagctggccttccccagccccttcggccacctgtctgagggcttcagccacagccgctggctgaggaaggtgaagcacggccacttcggctggccaggctgggagatgggccccccaggcaactggagcccccggccccccagggctggggaggcccggcccggccccacagctgagagcgccagcggccccagcgaggaccccagcgtgaacttcctgaagaatgtgggggagagcgtggccgccgccctgagccccctgggcatcgaggtggacattgatgtggagcacggcggcaagaggagccggctgacccctgtgtccccagagagcagcagcacagaggagaagagcagcagccagcccagcagctgctgcagcgaccccagcaagccaggcggcaatgtggagggcgccacccagagcctggccgagcagatgaggaagatcgccctggagagcgagggccggcctgaggagcagatggagagtgacaactgcagcggaggagatgatgactggacccacctgagcagcaaggaggtggaccccagcactggagagctgcagagcctgcagatgcctgagagcgagggccccagcagcctggaccccagccaggagggccccaccggcctgaaggaggccgccctgtacccccacctgcccccagaggccgacccccggctgattgagagcctgagccagatgctgtccatgggcttcagtgatgagggcggctggctgacccggctgctgcagaccaagaactatgacatcggggccgccctggacaccatccagtacagcaagcaccccccacccctgtag

SEQ ID NO: 53193 - DNA, 423 bp, Artificial Sequence
  derived and/or modified sequence
atggccatgtcctatgtgaaggatgacatcttccgcatctacatcaaggagaagaaggagtgccggcgggaccacaggcctccctgtgcccaggaggcccccaggaacatggtgcaccccaacgtcatctgtgatggctgcaatggacctgtggtgggcacccgctacaagtgcagcgtgtgcccagactatgacctgtgcagcgtgtgtgagggcaagggcctgcaccggggccacaccaagctggccttccccagccccttcggccacctgtctgagggcttcagccacagccgctggctgaggaaggtgaagcacggccacttcggctggccaggctgggagatgggccccccaggcaactggagcccccggccccccagggctggggaggcccggcccggccccacagctgagagctag

SEQ ID NO: 53194 - DNA, 891 bp, Artificial Sequence
  derived and/or modified sequence
atgaccagcagcgagagcaccctgaagaggaagaagtctgctgggggcaccacagcccaccgggtgctgcggcggcggcccttcggccacctgtctgagggcttcagccacagccgctggctgaggaaggtgaagcacggccacttcggctggccaggctgggagatgggccccccaggcaactggagcccccggccccccagggctggggaggcccggcccggccccacagctgagagcgccagcggccccagcgaggaccccagcgtgaacttcctgaagaatgtgggggagagcgtggccgccgccctgagccccctgggcatcgaggtggacattgatgtggagcacggcggcaagaggagccggctgacccctgtgtccccagagagcagcagcacagaggagaagagcagcagccagcccagcagctgctgcagcgaccccagcaagccaggcggcaatgtggagggcgccacccagagcctggccgagcagatgaggaagatcgccctggagagcgagggccggcctgaggagcagatggagagtgacaactgcagcggaggagatgatgactggacccacctgagcagcaaggaggtggaccccagcactggagagctgcagagcctgcagatgcctgagagcgagggccccagcagcctggaccccagccaggagggccccaccggcctgaaggaggccgccctgtacccccacctgcccccagaggccgacccccggctgattgagagcctgagccagatgctgtccatgggcttcagtgatgagggcggctggctgacccggctgctgcagaccaagaactatgacatcggggccgccctggacaccatccagtacagcaagcaccccccacccctgtag

SEQ ID NO: 53195 - DNA, 504 bp, Artificial Sequence
  derived and/or modified sequence
atggccatgtcctatgtgaaggatgacatcttccgcatctacatcaaggagaagaaggagtgccggcgggaccacaggcctccctgtgcccaggaggcccccaggaacatggtgcaccccaacgtcatctgtgatggctgcaatggacctgtggtgggcacccgctacaagtgcagcgtgtgcccagactatgacctgtgcagcgtgtgtgagggcaagggcctgcaccggggccacaccaagctggccttccccagccccttcggccacctgtctgagggcttcagccacagccgctggctgaggaaggtgaagcacggccacttcggctggccaggctgggagatgggccccccaggcaactggagcccccggccccccagggctggggaggcccggcccggccccacagctgagagcgccagcggccccagcgaggaccccagcgtgaacttcctgaagaatgtgggggagagcgtggccgccgccctgagccccctgtag

SEQ ID NO: 53196 - DNA, 1071 bp, Artificial Sequence
  derived and/or modified sequence
atggccatgagctacgtgaaggacgacatcttccggatctacatcaaggagaaaaaggaatgcagaagggatcatcgcccaccctgtgcccaggaggcacccagaaatatggtccaccctaacgtcatctgtgatggctgtaacggtcccgtggtagggaccagatataaatgtagcgtgtgtcctgactatgacctttgctctgtgtgcgaaggcaaaggactacatagagggcacacgaagctggcttttccaagtccatttggccacctgagtgagggattctcacacagcagatggctcaggaaagtgaagcacggccacttcggatggccagggtgggaaatggggccacccgggaactggtcacccagaccacctagagccggcgaggctaggcccggcccgaccgctgagagcgcttccggcccgagcgaagatcccagcgttaatttcctcaagaatgtgggagaatccgtggcggccgcactttctccgctgggcatcgaagttgacattgatgtggagcatggcgggaaacgctccagactgacaccagtgtcacccgagagttcgagcaccgaagaaaagtcctcttcccagccctcctcctgctgctctgacccctccaagccaggggggaatgttgaaggagccacacaatctctggctgagcagatgcgtaaaatcgcccttgaaagtgaggggcggcctgaagagcagatggagagtgacaattgctcggggggcgacgacgactggacccacctttcaagtaaggaagtggaccccagtaccggtgagctgcagtccttgcaaatgcccgagagcgaggggcccagcagccttgaccctagtcaggaaggccctactgggctgaaggaagccgcattgtacccccacctcccccccgaagctgaccctcgcctcattgaaagcttgtctcagatgttgtccatgggtttctctgatgagggtggctggttgacccgcctgctgcaaacaaaaaactatgatatcggagcggccctggatactattcagtactctaagcacccgccaccgctgtag

SEQ ID NO: 53197 - DNA, 1071 bp, Artificial Sequence
  derived and/or modified sequence
atggccatgagctacgtgaaggacgacatcttccggatctacatcaaagaaaagaaagaatgtagacgtgaccaccgccccccgtgcgcacaagaagccccacggaacatggtgcatcccaacgtgatctgtgacggatgcaacggtcctgttgttggcacgcgctataagtgtagtgtgtgcccagattacgatctctgttccgtgtgtgaagggaagggtttgcaccgtgggcacacgaaactggcgttcccttctccatttggacatctctccgaggggttttcccacagccgatggctgcggaaagtgaaacatggtcatttcggttggcctggttgggagatgggaccacctgggaactggagtcctagacccccgagagccggcgaggctcgcccagggccaaccgccgagagcgcctctgggccaagtgaggacccttctgtgaacttccttaagaatgtaggggagagcgtcgcagctgccctgtcacctctcgggatcgaggtggacattgacgttgaacatggggggaaacgatctcggctgacaccagtgagcccagaatcgtcctctaccgaggaaaaaagctccagccagccatcttcttgttgttcagacccaagcaagcccggtgggaacgtggagggggccacccaaagtctcgccgagcagatgagaaagatcgccctggaaagcgaaggaagaccagaagagcagatggagtccgataactgttcgggcggcgacgatgattggacacacctgtcaagtaaggaagtggacccctccacaggcgaactccaatccctgcagatgccggaaagtgagggcccaagctcattggacccaagtcaggagggaccaactgggctgaaagaggcggccctatatccacatctcccccctgaagcagaccctaggctgatcgagtccctctctcagatgctgagcatgggtttcagtgacgagggtggctggctgacgcggctccttcaaaccaagaattacgatataggtgccgctctggacactattcagtactccaagcaccccccccccctatag

SEQ ID NO: 53198 - DNA, 1071 bp, Artificial Sequence
  derived and/or modified sequence
atggccatgagctacgtgaaggacgacatcttccggatctacatcaaagaaaaaaaagaatgcaggcgagaccatcgcccaccctgcgcgcaggaagctccgcgcaacatggtacatcccaatgtcatctgtgatggatgtaacggcccagtggtaggcactcgctataagtgtagcgtgtgtcccgattacgatctgtgcagcgtgtgcgaaggtaagggtctgcaccgggggcataccaaactggctttcccatctccatttgggcatctcagcgaggggttttcacattctcgctggctgcggaaggtgaagcacggccacttcggctggcccggttgggaaatgggcccccccggaaactggagtcctcgccctcctagggcaggggaagctagaccgggcccgactgctgaatccgcaagcgggccaagcgaagacccatccgtcaatttccttaagaatgttggcgagagcgtggccgccgcactgagcccattgggaattgaagtggacatcgatgtggagcacggaggtaagagatcacggttgacccccgtgtcccccgagtcctcttcaacggaagaaaaaagcagttctcagccatcctcctgctgctcagacccttccaagcccggcggaaacgtcgaaggcgcaacacagagtctggctgagcagatgcgaaagatcgctttggagtcagaaggcagacccgaagagcagatggagtccgataattgcagtggcggagacgacgactggacccacctgtcaagcaaagaagttgatccgtccacaggcgagctgcagtctctccaaatgcccgagtccgagggcccaagctcattagacccctcccaggaaggtcctactggtctgaaggaggccgccttgtacccacatttgccacccgaagcagaccctagactaatcgagagcctaagtcaaatgttgagtatgggattttctgatgaagggggttggctcactaggctactgcaaacaaaaaactacgatattggtgcagctctcgacacaatccagtactctaaacacccaccccccctgtag

SEQ ID NO: 53199 - DNA, 423 bp, Artificial Sequence
  derived and/or modified sequence
atggccatgagctacgtgaaggacgacatcttccggatctacatcaaagaaaagaaagaatgtcggcgggaccaccgccccccctgtgcacaggaagctccccgtaacatggtgcatcccaatgtgatctgcgatggatgcaacgggcctgtggtggggacaagatacaaatgtagcgtatgtcccgactacgacctgtgcagcgtatgtgaaggtaagggcctgcatcgcggccacacaaagctcgcatttccatcgccattcggccacttgtccgaagggttttctcacagcaggtggctcagaaaggtcaaacatggccacttcgggtggcccggttgggagatgggcccccccggcaattggagccctaggccacctagggctggagaggcacggcctggacctacagctgagagttag

SEQ ID NO: 53200 - DNA, 891 bp, Artificial Sequence
  derived and/or modified sequence
atgaccagcagcgagagcaccctgaagcggaagaagagcgccggcggaaccactgctcaccgagtgctgcgacgaagaccgttcggacaccttagcgagggtttttctcactctcgctggctgaggaaggtgaaacacggccatttcggatggccagggtgggagatgggtccacccggaaactggtcccccaggccaccacgcgctggagaggcccggcccggtcccacagcagagtcggcctctggaccgtcggaggacccttccgtaaatttcctcaaaaatgttggcgaaagcgtcgctgccgcactctcccctctggggatcgaagtggatatcgatgttgaacacgggggaaagcggtcccggcttacacccgtgtccccggaatcttcaagtactgaggaaaagagcagcagccagcctagtagctgctgcagcgatccgtccaaacccggaggcaatgttgagggcgccacacaatccctagccgaacaaatgcggaaaatagccctcgaaagcgaaggccgccctgaagaacagatggagtccgataactgctctggaggagacgacgactggacacacctttctagcaaggaggttgatccctcaacaggagagctgcagtctcttcagatgccggagtccgaaggacctagctctctggatccaagccaggagggacctaccgggctcaaggaagccgcactatatccccacctgcctccagaggcagatcctcgcttgatagaaagtctgagccagatgctgtccatgggcttcagcgacgaaggcgggtggctcacacgcctgctgcaaacaaagaattatgacatcggagctgccctggacaccattcaatactctaagcatcctccccccctttag

SEQ ID NO: 53201 - DNA, 504 bp, Artificial Sequence
  derived and/or modified sequence
atggccatgagctacgtgaaggacgacatcttccggatctacatcaaagagaagaaggagtgtcgacgagaccaccgccctccctgcgctcaggaggcaccacggaatatggtgcatcctaatgtcatatgtgacggttgtaacggacccgtcgtagggactaggtacaagtgctctgtgtgccctgattacgatttgtgctccgtgtgcgaagggaaggggcttcatcgaggacataccaaactggcttttccaagtcctttcgggcatctatctgaggggttttcgcacagtagatggctcaggaaggtgaagcatggtcatttcggctggccagggtgggagatggggccacctggcaattggtcccccagaccccctagagccggcgaggccaggcccggccccaccgctgaatccgcgtcaggtccttcagaggatccttccgttaacttcttgaagaacgtgggagagtccgtcgctgccgccctatcaccactgtag

SEQ ID NO: 53202 - DNA, 1071 bp, Artificial Sequence
  derived and/or modified sequence
atggctatgtcttacgtcaaggatgatatctttcggatctacattaaggaaaaaaaagagtgtagacgggaccaccgcccaccttgcgcacaagaagcgccacgtaacatggtgcaccctaacgtgatctgcgatggttgtaatgggccagtagttggaaccaggtataagtgtagcgtctgccctgattacgacctttgttcagtgtgcgaaggaaaaggactccaccggggtcacaccaagctggccttcccatctcctttcggccatttgtctgagggattttcccactcacggtggctgcgaaaagtgaagcatgggcatttcggttggcctggctgggaaatgggccctcctgggaattggagtcccagacccccaagagccggagaggccaggcctggaccaacagctgagtccgcgtccggacctagcgaggacccaagtgtcaatttcctcaaaaacgtgggggaaagcgtggctgccgcactgagcccgctcgggatcgaagtggacatagatgtcgagcacggtggcaaacggagcaggttgacccccgtaagtccggagtcaagttcaacagaggagaagtcttctagtcagccttcgagttgttgctctgacccctccaagcctgggggaaacgttgaaggggcaacacagtcactggctgagcagatgagaaagattgccttggaaagtgagggacgccctgaggaacagatggaaagcgataattgcagcggcggtgatgacgattggacgcatttaagctccaaagaggtggaccctagcactggagaactgcagtctctgcagatgcctgaatcggaaggcccttcaagcctggatcccagccaagaaggtcccaccggtctgaaagaagccgctttgtaccctcaccttccgcctgaagctgacccccgactcatcgagtccctttctcagatgctcagtatgggatttagcgatgaaggtggttggctgacccggctgctccagacgaagaactatgacatcggagcagcactggataccatccagtatagtaaacaccccccaccactgtag

SEQ ID NO: 53203 - DNA, 1071 bp, Artificial Sequence
  derived and/or modified sequence
atggccatgtcctatgtgaaggacgatattttcagaatatatattaaggagaaaaaggaatgcagaagggatcatcgccctccttgcgctcaagaggctccaagaaacatggtccacccgaatgtgatttgtgacggctgtaatgggcctgtggtcggtacacgctacaaatgtagtgtttgcccagactatgatctctgtagcgtctgcgagggaaaggggctgcatcggggacatacaaaattagcattcccctccccatttggtcacctgtctgaaggatttagccacagtagatggctgagaaaggtgaaacatggtcatttcggatggccaggctgggaaatgggccctccaggcaactggagcccgagaccacctcgcgctggtgaggccaggcccggtcccaccgccgaatccgcatctggacctagtgaggatcccagcgtgaactttctgaagaacgtcggggagtcggtggcagctgccctgtctcccctgggaatagaggtggacattgatgtcgagcacgggggtaagcgctctagactgaccccagtgtctcctgaaagcagctccaccgaagagaagagctcctcgcagccgagtagttgttgttcggacccgagtaaaccagggggtaatgttgaaggtgcgacgcagtctttagcagaacagatgagaaagatcgcactggaatccgaaggccgaccagaagaacagatggaaagtgataattgcagcggcggagatgatgattggacccatctgagttctaaagaggtggatccaagcacgggagagctacagtctctccagatgcctgagagcgagggcccaagttctcttgatccaagtcaagaaggccctacaggactgaaagaagcggcattgtatccacacctgcccccagaggcagatccaagactcatcgagtcactctctcaaatgctgtcaatgggattctctgacgaaggtggatggctgacccgtcttcttcagaccaagaattacgacatcggggctgctctcgatactatccaatacagcaaacatcccccacccctttag

SEQ ID NO: 53204 - DNA, 1071 bp, Artificial Sequence
  derived and/or modified sequence
atggccatgtcatacgttaaggacgacattttccgaatctatattaaagagaagaaggagtgtcggcgagaccacaggcctccctgcgcccaggaagcccctcgaaatatggtgcaccccaatgtgatctgcgacgggtgtaatggcccagtagtgggcacaaggtataaatgctcggtatgtcctgactacgacttatgttctgtctgtgagggtaaaggcctccatagagggcacactaagctggcgttcccctcccctttcggccatctttccgaaggattttctcactctagatggctgcggaaagtcaaacatggacactttggctggccagggtgggagatgggccctcctggaaattggtcccctcgccctcctcgcgctggcgaggccaggcccggacctactgcagagtcagctagcggaccttctgaagacccttccgtgaattttctgaaaaatgtgggagagtctgtggcagccgcattgagcccactgggtattgaggttgacatcgatgtggaacatggcggaaagcgcagccggctgacaccagtcagcccagagagcagttctactgaggagaaaagcagctcccagcctagttcttgttgttccgacccttctaaaccaggcggtaatgttgagggtgccacccagtctctcgctgaacagatgcgcaagattgcactggagtctgagggcaggcccgaagaacagatggagtctgacaattgtagtggcggtgatgacgactggactcacctctctagtaaggaggtggatccttcaaccggagagttacagtccctacaaatgcccgaaagcgagggtccttcaagtttagatccctcccaggaaggacctaccgggttgaaagaggccgcactgtacccacacttaccccctgaggcagaccccagactgattgagtctttgagccagatgctgtctatggggtttagtgacgaaggaggctggctgacaaggctgttgcagaccaaaaactacgacattggtgccgctctcgatacaatccagtattctaaacatcctccacctctgtag

SEQ ID NO: 53205 - DNA, 423 bp, Artificial Sequence
  derived and/or modified sequence
atggccatgtcctatgtgaaagacgatattttccgcatctatatcaaggaaaaaaaggaatgtcgtagagatcacaggcctccgtgtgcccaggaagcccctaggaacatggtgcacccgaacgtgatctgcgatgggtgcaatgggcctgtggtgggcacaagatacaaatgcagcgtgtgtcctgactacgatttgtgttccgtgtgtgaggggaaggggctgcacaggggtcacaccaaactcgccttcccctcaccttttgggcacctgagtgagggctttagtcactcccggtggttgagaaaggtcaagcacggtcatttcgggtggcccggatgggagatgggcccacctggcaattggtcacctagacccccacgggctggggaagccaggcccggacccaccgctgagagctag

SEQ ID NO: 53206 - DNA, 891 bp, Artificial Sequence
  derived and/or modified sequence
atgacttcgagcgaaagcacacttaaaagaaaaaaaagtgccggaggaactacggcgcacagagtcctcaggaggcgacctttcgggcatctgagcgagggattctcacacagcagatggttacgaaaggttaagcacgggcattttggctggcccggttgggagatgggccctcctggcaattggtctccaaggcctccaagagcgggtgaggccagaccaggaccgactgcggagagtgcgtcaggtccctctgaggacccaagtgtcaacttccttaaaaacgttggcgaatcagtggcagctgcactatctccattgggtatcgaggtggatattgatgtggagcatgggggtaagaggagccgcctgacccccgtgagccccgagtcatcctctactgaggaaaagagtagcagccagcctagcagctgttgctctgacccatccaaacctgggggaaacgtagaaggggcaacccagagcctggctgaacagatgcgaaaaattgccttggagtcggagggtcgacctgaagaacagatggaaagtgacaactgttccgggggagacgacgattggacccatctgagcagcaaggaagtggacccaagcaccggtgagctccaatcactgcagatgcctgagtccgagggacctagtagcttggatccgtcacaggagggccctacaggactcaaagaagctgctctgtacccacatctccctccagaggcagaccctcgtttgattgaatcactttctcagatgttaagtatggggttttctgacgagggaggttggctaaccagactcctacaaaccaaaaactacgacattggcgcagcactggacacaatacagtactcaaaacatcccccacccctgtag

SEQ ID NO: 53207 - DNA, 504 bp, Artificial Sequence
  derived and/or modified sequence
atggcaatgtcatatgtgaaagatgacattttccgaatctacatcaaagaaaaaaaggagtgtagacgcgatcatagaccaccatgtgcccaggaggctcccaggaacatggtgcaccccaacgtcatatgcgatggatgtaacggacccgttgtggggaccaggtataagtgttccgtatgccctgactacgatctgtgcagtgtttgcgaagggaagggattacatcggggacacaccaaattggcttttccaagtcctttcgggcacctcagtgaaggattctcccacagccgctggcttcgcaaggtaaaacacgggcattttggatggcctggctgggagatgggtcctcccggaaactggtccccacggccaccgagagcgggagaggcacgcccaggtccaactgcagagtctgcatcaggaccgtcagaggacccatccgttaacttcctaaaaaatgtgggagagtctgttgctgcagcccttagtccattatag

SEQ ID NO: 53208 - DNA, 1506 bp, Artificial Sequence
  derived and/or modified sequence
acggcccgttttccgccagctcgccgctcgctatggcgtcgctcaccgtgaaggcctaccttctgggcaaggaggacgcggcgcgcgagattcgccgcttcagcttctgctgcagccccgagcctgaggcggaagccgaggctgcggcgggtccgggaccctgcgagcggctgctgagccgggtggccgccctgttccccgcgctgcggcctggcggcttccaggcgcactaccgcgatgaggacggggacttggttgccttttccagtgacgaggaattgacaatggccatgtcctacgtgaaggatgacatcttccgaatctacattaaagagaaaaaagagtgccggcgggaccaccgcccaccgtgtgctcaggaggcgccccttcgggcacctgtctgagggcttctcgcacagccgctggctccggaaggtgaaacacggacacttcgggtggccaggatgggaaatgggtccaccaggaaactggagcccacgtcctcctcgtgcaggggaggcccgccctggccccacggcagaatcagcttctggtccatcggaggatccgagtgtgaatttcctgaagaacgttggggagagtgtggcagctgcccttagccctctgggcattgaagttgatatcgatgtggagcacggagggaaaagaagccgcctgacccccgtctctccagagagttccagcacagaggagaagagcagctcacagccaagcagctgctgctctgaccccagcaagccgggtgggaatgttgagggcgccacgcagtctctggcggagcagatgaggaagatcgccttggagtccgaggggcgccctgaggaacagatggagtcggataactgttcaggaggagatgatgactggacccatctgtcttcaaaagaagtggacccgtctacaggtgaactccagtccctacagatgccagaatccgaagggccaagctctctggacccctcccaggagggacccacagggctgaaggaagctgccttgtacccacatctcccgccagaggctgacccgcggctgattgagtccctctcccagatgctgtccatgggcttctctgatgaaggcggctggctcaccaggctcctgcagaccaagaactatgacatcggagcggctctggacaccatccagtattcaaagcatcccccgccgttgtgaccacttttgcccacctcttctgcgtgcccctcttctgtctcatagttgtgttaagcttgcgtagaattgcaggtctctgtacgggccagtttctctgccttcttccaggatcaggggttagggtgcaagaagccatttagggcagcaaaacaagtgacatgaagggagggtccctgtgtgtgtgtgtgctgatgtttcctgggtgccctggctccttgcagcagggctgggcctgcgagacccaaggctcactgcagcgcgctcctgacccctccctgcaggggctacgttagcagcccagcacatagc

SEQ ID NO: 53209 - DNA, 1071 bp, Artificial Sequence
  derived and/or modified sequence
atggccatgagctacgtgaaggacgacatcttcagaatctacatcaaggagaagaaggagtgcagaagagaccacagacccccctgcgcccaggaggcccccagaaacatggtgcaccccaacgtgatctgcgacggctgcaacggccccgtggtgggcaccagatacaagtgcagcgtgtgccccgactacgacctgtgcagcgtgtgcgagggcaagggcctgcacagaggccacaccaagctggccttccccagccccttcggccacctgagcgagggcttcagccacagcagatggctgagaaaggtgaagcacggccacttcggctggcccggctgggagatgggcccccccggcaactggagccccagaccccccagagccggcgaggccagacccggccccaccgccgagagcgccagcggccccagcgaggaccccagcgtgaacttcctgaagaacgtgggcgagagcgtggccgccgccctgagccccctgggcatcgaggtggacatcgacgtggagcacggcggcaagagaagcagactgacccccgtgagccccgagagcagcagcaccgaggagaagagcagcagccagcccagcagctgctgcagcgaccccagcaagcccggcggcaacgtggagggcgccacccagagcctggccgagcagatgagaaagatcgccctggagagcgagggcagacccgaggagcagatggagagcgacaactgcagcggcggcgacgacgactggacccacctgagcagcaaggaggtggaccccagcaccggcgagctgcagagcctgcagatgcccgagagcgagggccccagcagcctggaccccagccaggagggccccaccggcctgaaggaggccgccctgtacccccacctgccccccgaggccgaccccagactgatcgagagcctgagccagatgctgagcatgggcttcagcgacgagggcggctggctgaccagactgctgcagaccaagaactacgacatcggcgccgccctggacaccatccagtacagcaagcaccccccccccctgtag

SEQ ID NO: 53210 - DNA, 423 bp, Artificial Sequence
  derived and/or modified sequence
atggccatgagctacgtgaaggacgacatcttcagaatctacatcaaggagaagaaggagtgcagaagagaccacagacccccctgcgcccaggaggcccccagaaacatggtgcaccccaacgtgatctgcgacggctgcaacggccccgtggtgggcaccagatacaagtgcagcgtgtgccccgactacgacctgtgcagcgtgtgcgagggcaagggcctgcacagaggccacaccaagctggccttccccagccccttcggccacctgagcgagggcttcagccacagcagatggctgagaaaggtgaagcacggccacttcggctggcccggctgggagatgggcccccccggcaactggagccccagaccccccagagccggcgaggccagacccggccccaccgccgagagctag

SEQ ID NO: 53211 - DNA, 891 bp, Artificial Sequence
  derived and/or modified sequence
atgaccagcagcgagagcaccctgaagagaaagaagagcgccggcggcaccaccgcccacagagtgctgagaagaagacccttcggccacctgagcgagggcttcagccacagcagatggctgagaaaggtgaagcacggccacttcggctggcccggctgggagatgggcccccccggcaactggagccccagaccccccagagccggcgaggccagacccggccccaccgccgagagcgccagcggccccagcgaggaccccagcgtgaacttcctgaagaacgtgggcgagagcgtggccgccgccctgagccccctgggcatcgaggtggacatcgacgtggagcacggcggcaagagaagcagactgacccccgtgagccccgagagcagcagcaccgaggagaagagcagcagccagcccagcagctgctgcagcgaccccagcaagcccggcggcaacgtggagggcgccacccagagcctggccgagcagatgagaaagatcgccctggagagcgagggcagacccgaggagcagatggagagcgacaactgcagcggcggcgacgacgactggacccacctgagcagcaaggaggtggaccccagcaccggcgagctgcagagcctgcagatgcccgagagcgagggccccagcagcctggaccccagccaggagggccccaccggcctgaaggaggccgccctgtacccccacctgccccccgaggccgaccccagactgatcgagagcctgagccagatgctgagcatgggcttcagcgacgagggcggctggctgaccagactgctgcagaccaagaactacgacatcggcgccgccctggacaccatccagtacagcaagcaccccccccccctgtag

SEQ ID NO: 53212 - DNA, 504 bp, Artificial Sequence
  derived and/or modified sequence
atggccatgagctacgtgaaggacgacatcttcagaatctacatcaaggagaagaaggagtgcagaagagaccacagacccccctgcgcccaggaggcccccagaaacatggtgcaccccaacgtgatctgcgacggctgcaacggccccgtggtgggcaccagatacaagtgcagcgtgtgccccgactacgacctgtgcagcgtgtgcgagggcaagggcctgcacagaggccacaccaagctggccttccccagccccttcggccacctgagcgagggcttcagccacagcagatggctgagaaaggtgaagcacggccacttcggctggcccggctgggagatgggcccccccggcaactggagccccagaccccccagagccggcgaggccagacccggccccaccgccgagagcgccagcggccccagcgaggaccccagcgtgaacttcctgaagaacgtgggcgagagcgtggccgccgccctgagccccctgtag

SEQ ID NO: 53213 - protein, 914 aa, Artificial Sequence
  derived and/or modified sequence
MSLSHWPYFRLVLNFRPQVICLPQPPKVLGYRLEPPHLTLACTLEGMYNIIEEILERDINGTLLSQATCELCDGNENSFMVVNALGDRCVRCEPTFVNTSRSCACSEPNILTGGLCFSSTGNFPLRRISAARYGEVGMSLTSEWFAKYLQSSAAACWVYANLTSCQALGNMCVMNMNSYDFATFDACGLFQFIFENTAGLSTVHSISFWRQNLPWLFYGDQLGLAPQVLSSTSLPTNFSFKGENQNTKLKFVAASYDIRGNFLKWQTLEGGVLQLCPDTETRLNAAYSFGTTYQQNCEIPISKILIDFPTPIFYDVYLEYTDENQHQYILAVPVLNLNLQHNKIFVNQDSNSGKWLLTRRIFLVDAVSGRENDLGTQPRVIRVATQISLSVHLVPNTINGNIYPPLITIAYSDIDIKDANSQSVKVSFSVTYEMDHGEAHVQTDIALGVLGGLAVLASLLKTAGWKRRIGSPMIDLQTVVKFLVYYAGDLANVFFIITVGTGLYWLIFFKAQKSVSVLLPMPIQEERFVTYVGCAFALKALQFLHKLISQITIDVFFIDWERPKGKVLKAVEGEGGVRSATVPVSIWRTYFVANEWNEIQTVRKINSLFQVLTVLFFLEVVGFKNLALMDSSSSLSRNPPSYIAPYSCILRYAVSAALWLAIGIIQVVFFAVFYERFIEDKIRQFVDLCSMSNISVFLLSHKCFGYYIHGRSVHGHADTNMEEMNMNLKREAENLCSQRGLVPNTDGQTFEIAISNQMRQHYDRIHETLIRKNGPARLLSSSASTFEQSIKAYHMMNKFLGSFIDHVHKEMDYFIKDKLLLERILGMEFMEPMEKSIFYNDEGYSFSSVLYYGNEATLLIFDLLFFCVVDLACQNFILASFLTYLQQEIFRYIRNTVGQKNLASKTLVDQRFLI

SEQ ID NO: 53214 - DNA, 2745 bp, Artificial Sequence
  derived and/or modified sequence
atgagcctgagccactggccctacttcagactggtgctgaacttcagaccccaggtgatctgcctgccccagccccccaaggtgctgggctacagactggagcccccccacctgaccctggcctgcaccctggagggcatgtacaacatcatcgaggagatcctggagagagacatcaacggcaccctgctgagccaggccacctgcgagctgtgcgacggcaacgagaacagcttcatggtggtgaacgccctgggcgacagatgcgtgagatgcgagcccaccttcgtgaacaccagcagaagctgcgcctgcagcgagcccaacatcctgaccggcggcctgtgcttcagcagcaccggcaacttccccctgagaagaatcagcgccgccagatacggcgaggtgggcatgagcctgaccagcgagtggttcgccaagtacctgcagagcagcgccgccgcctgctgggtgtacgccaacctgaccagctgccaggccctgggcaacatgtgcgtgatgaacatgaacagctacgacttcgccaccttcgacgcctgcggcctgttccagttcatcttcgagaacaccgccggcctgagcaccgtgcacagcatcagcttctggagacagaacctgccctggctgttctacggcgaccagctgggcctggccccccaggtgctgagcagcaccagcctgcccaccaacttcagcttcaagggcgagaaccagaacaccaagctgaagttcgtggccgccagctacgacatcagaggcaacttcctgaagtggcagaccctggagggcggcgtgctgcagctgtgccccgacaccgagaccagactgaacgccgcctacagcttcggcaccacctaccagcagaactgcgagatccccatcagcaagatcctgatcgacttccccacccccatcttctacgacgtgtacctggagtacaccgacgagaaccagcaccagtacatcctggccgtgcccgtgctgaacctgaacctgcagcacaacaagatcttcgtgaaccaggacagcaacagcggcaagtggctgctgaccagaagaatcttcctggtggacgccgtgagcggcagagagaacgacctgggcacccagcccagagtgatcagagtggccacccagatcagcctgagcgtgcacctggtgcccaacaccatcaacggcaacatctacccccccctgatcaccatcgcctacagcgacatcgacatcaaggacgccaacagccagagcgtgaaggtgagcttcagcgtgacctacgagatggaccacggcgaggcccacgtgcagaccgacatcgccctgggcgtgctgggcggcctggccgtgctggccagcctgctgaagaccgccggctggaagagaagaatcggcagccccatgatcgacctgcagaccgtggtgaagttcctggtgtactacgccggcgacctggccaacgtgttcttcatcatcaccgtgggcaccggcctgtactggctgatcttcttcaaggcccagaagagcgtgagcgtgctgctgcccatgcccatccaggaggagagattcgtgacctacgtgggctgcgccttcgccctgaaggccctgcagttcctgcacaagctgatcagccagatcaccatcgacgtgttcttcatcgactgggagagacccaagggcaaggtgctgaaggccgtggagggcgagggcggcgtgagaagcgccaccgtgcccgtgagcatctggagaacctacttcgtggccaacgagtggaacgagatccagaccgtgagaaagatcaacagcctgttccaggtgctgaccgtgctgttcttcctggaggtggtgggcttcaagaacctggccctgatggacagcagcagcagcctgagcagaaacccccccagctacatcgccccctacagctgcatcctgagatacgccgtgagcgccgccctgtggctggccatcggcatcatccaggtggtgttcttcgccgtgttctacgagagattcatcgaggacaagatcagacagttcgtggacctgtgcagcatgagcaacatcagcgtgttcctgctgagccacaagtgcttcggctactacatccacggcagaagcgtgcacggccacgccgacaccaacatggaggagatgaacatgaacctgaagagagaggccgagaacctgtgcagccagagaggcctggtgcccaacaccgacggccagaccttcgagatcgccatcagcaaccagatgagacagcactacgacagaatccacgagaccctgatcagaaagaacggccccgccagactgctgagcagcagcgccagcaccttcgagcagagcatcaaggcctaccacatgatgaacaagttcctgggcagcttcatcgaccacgtgcacaaggagatggactacttcatcaaggacaagctgctgctggagagaatcctgggcatggagttcatggagcccatggagaagagcatcttctacaacgacgagggctacagcttcagcagcgtgctgtactacggcaacgaggccaccctgctgatcttcgacctgctgttcttctgcgtggtggacctggcctgccagaacttcatcctggccagcttcctgacctacctgcagcaggagatcttcagatacatcagaaacaccgtgggccagaagaacctggccagcaagaccctggtggaccagagattcctgatctag

SEQ ID NO: 53215 - DNA, 2745 bp, Artificial Sequence
  derived and/or modified sequence
atgtctctttcacactggccatacttccggctggtgttgaatttccggccccaagtcatttgcttgccccaacctcccaaagtcctcggctataggctggaacctccccatctgactcttgcctgcacccttgaggggatgtacaacattatcgaggagatattggaaagagacatcaatggcactctcctgtctcaagcgacctgtgagttatgcgacgggaatgaaaatagttttatggtcgtaaatgctcttggtgaccgctgcgtgagatgcgaaccgaccttcgtgaatacttcacggtcctgtgcgtgctcagaacccaatatccttaccggcggcctctgcttctccagtacaggaaattttcctctccgccggatctcagccgctcgatatggagaggtgggtatgtcactgacctccgaatggtttgccaaatacctccagagttcagcggccgcctgctgggtctatgccaatttaacctcctgtcaggcgctaggcaacatgtgcgtcatgaatatgaattcctacgactttgcaacgttcgacgcctgtgggctgtttcagttcatttttgagaatactgccgggctgagcacagtccattctatttccttctggcggcagaatctaccctggctgttttacggtgaccaactcgggctggcccctcaggtacttagttctaccagcctccctacaaactttagctttaaaggcgagaaccagaatactaagctcaagttcgtggctgcaagctacgacattagggggaatttcctgaagtggcagacactggagggtggtgtgttgcagctgtgccccgacaccgaaaccagactcaatgctgcctacagcttcgggactacataccaacagaactgcgagattccaataagcaagatcctaattgatttccctactcccatcttctatgacgtgtacctggagtatacagacgaaaatcaacaccagtatatcctcgctgttccagtcttgaaccttaatctccagcacaacaagattttcgtgaatcaggacagcaacagtggcaaatggctactgaccaggaggattttcctggtcgatgcagtctctggacgcgagaatgatctgggaacccaaccccgagtcattcgggtggctacccaaatctctctgagcgtccacctggttcccaacactatcaacggaaatatatatcctccattgatcactatcgcgtactccgacattgatataaaggacgccaacagtcagagtgtcaaagtgtcttttagcgtgacttatgagatggaccacggcgaggcacacgtccagactgacattgctctcggtgtgctgggcgggctggctgttttggcaagcctactgaagacggcggggtggaaaagacgtatcggaagtcctatgattgatctgcagacagttgtgaagttcctcgtctattacgctggcgatttagccaacgtgttctttatcatcaccgttggcacgggactatactggctgatttttttcaaagctcagaagtccgtctctgtgttgctgcctatgcctattcaggaagagcgctttgtaacctatgtgggttgcgcattcgccctgaaggctttgcagttcctacataagctcatctctcagataaccatagacgtattcttcatagattgggaaagaccaaaaggcaaggtgcttaaagccgttgagggagaaggcggagtgaggtcagccacagttccagtgtcaatctggaggacctactttgtcgccaacgaatggaacgaaatccagaccgtgagaaaaatcaactccttatttcaggtcctcactgtactgttcttcctcgaggtggtaggtttcaagaatttggccctaatggatagcagctctagcctgtcccgcaacccgccttcatacatcgctccctatagctgcatcctgcgctatgcggtgtccgccgccttgtggcttgcgatagggattattcaggtggtgtttttcgccgtgttctacgaacggtttatcgaggataaaatacggcaatttgtcgacctctgcagtatgagcaatatctcagtatttcttctgagtcacaaatgtttcggttattatatccacggccgatccgtgcacgggcacgcggataccaacatggaagaaatgaatatgaacctgaagagggaggccgagaacctgtgctcccaacgcggcttggtgccaaacactgatggccaaacattcgagattgctatttctaaccagatgagacagcactacgataggatccacgagaccctaattaggaaaaacgggcctgcccggctgctgagttcctccgccagcaccttcgaacagtccatcaaagcataccacatgatgaacaaatttctgggctcatttatcgaccatgtgcataaggagatggactattttatcaaggataagctccttctcgagagaatcctgggaatggaatttatggaaccgatggagaagtctattttttacaatgatgaggggtatagctttagctccgtattatactacggtaacgaggcaactttgctgattttcgacctactgtttttctgtgtggttgatttagcctgccagaactttatccttgcatccttcctcacttacctacagcaagagatcttcaggtacatcagaaacaccgtcgggcaaaagaacttggccagcaagaccttggtcgaccagcgtttcctcatctag

SEQ ID NO: 53216 - DNA, 2745 bp, Artificial Sequence
  derived and/or modified sequence
atgagcctgagccactggccctacttccggctggtgctgaacttccggccccaggtgatctgcctgccccagccccccaaggtgctgggctaccgcctggagcccccccacctgaccctggcctgcaccctggagggcatgtacaacatcatcgaggagatcctggagcgggacatcaatggcaccctgctgagccaggccacctgtgagctgtgtgatggaaatgaaaacagcttcatggtggtgaatgccctgggggacagatgtgtgcgctgtgagcccacctttgtgaacaccagccgcagctgtgcctgcagcgagcccaacatcctgaccggcggcctgtgcttcagcagcacaggcaacttccccctgcggcgcatctctgctgcccgctatggagaggtgggcatgagcctgaccagcgagtggtttgccaagtacctgcagagcagcgctgctgcctgctgggtgtatgccaacctgaccagctgccaggccctgggcaacatgtgtgtgatgaacatgaacagctatgactttgccacctttgatgcctgtggcctcttccagttcatctttgaaaatacagctggcctgagcacagtgcacagcatctccttctggaggcagaacctgccctggctgttctacggggaccagctgggcctggccccccaggtgctgagcagcaccagcctgcccaccaacttctccttcaagggggagaaccagaacaccaagctgaagtttgtggccgccagctatgacatccggggcaacttcctgaagtggcagaccctggagggcggcgtgctgcagctgtgcccagacacagagacccggctgaatgctgcctacagctttggcaccacctaccagcagaactgtgagatccccatcagcaagatcctgattgacttccccacccccatcttctatgatgtgtacctggagtacacagatgagaaccagcaccagtacatcctggccgtgcctgtgctgaacctgaacctgcagcacaacaagatctttgtgaaccaggacagcaacagcggcaagtggctgctgacccggcgcatcttcctggtggatgctgtgtctggaagagaaaatgacctgggcacccagcccagggtcatccgggtggccacccagatcagcctgtctgtgcacctggtgcccaacaccatcaatggaaacatctacccacccctcatcaccatcgcctacagcgacatcgacatcaaggatgccaacagccagagcgtgaaggtgtccttctctgtgacctatgagatggaccacggggaggcccacgtgcagacagacatcgccctgggcgtgctgggcggcctggccgtgctggccagcctgctgaagacagctggctggaagagaagaattggcagccccatgattgacctgcagacagtggtgaagttcctggtgtactatgctggggacctggccaacgtgttcttcatcatcaccgtgggcaccggcctgtactggctgatcttcttcaaggcccagaagtctgtgtctgtgctgctgcccatgcccatccaggaggagagatttgtgacctacgtgggctgtgcctttgccctgaaggccctgcagttcctgcacaagctgatcagccagatcaccattgatgtgttcttcatcgactgggagcggcccaagggcaaggtgctgaaggctgtggagggggagggcggcgtgcgcagcgccaccgtgcctgtgtccatctggaggacctactttgtggccaatgagtggaatgagatccagacagtgaggaagatcaacagcctcttccaggtgctgactgtgctcttcttcctggaggtggtgggcttcaagaacctggccctgatggacagcagcagcagcctgagcagaaatcctccttcctacatcgccccctacagctgcatcctgcgctatgctgtgtctgctgccctgtggctggccatcggcatcatccaggtggtgttctttgctgtgttctatgagcgcttcatcgaggacaagatccggcagtttgtggacctgtgcagcatgagcaacatctctgtgttcctgctgagccacaagtgcttcggctactacatccacggccgctctgtgcacggccatgctgacaccaacatggaggagatgaacatgaacctgaagcgggaggccgagaacctgtgcagccagaggggcctggtgcccaacacagatggccagacctttgagatcgccatcagcaaccagatgaggcagcactatgaccgcatccacgagaccctcatcaggaagaatggacctgcccggctgctgagcagcagcgccagcacctttgagcagagcatcaaggcctaccacatgatgaacaagttcctgggcagcttcatcgaccacgtgcacaaggagatggactacttcatcaaggacaagctgctgctggagcgcatcctgggcatggagttcatggagcccatggagaagagcatcttctacaatgatgagggctacagcttcagctctgtgctgtactatggaaatgaggccaccctgctgatctttgacctgctcttcttctgtgtggtggacctggcctgccagaacttcatcctggccagcttcctgacctacctgcagcaggagatcttccgctacatccggaacacagtgggccagaagaacctggccagcaagaccctggtggaccagcgcttcctgatctag

SEQ ID NO: 53217 - DNA, 2745 bp, Artificial Sequence
  derived and/or modified sequence
atgagcctgagccactggccctacttccggctggtgctgaacttccgcccacaagtgatctgccttccacagcctccaaaagtgctcggataccgcctggaacccccacatctcactctcgcctgcacactcgaagggatgtacaacattatcgaggaaattctggagagagatatcaacgggacactgctcagccaggcgacctgcgaactctgcgatggcaacgagaactcattcatggtcgttaacgccttaggcgaccggtgcgtgcgatgcgagcctacttttgtcaatacatcccgttcgtgtgcttgctccgagcctaatatccttactgggggactttgcttttcaagcaccggcaacttccctttgagaagaatctcggctgctcgatacggggaagtggggatgtccctgacgagtgaatggtttgcaaagtacttgcagagctccgccgccgcctgttgggtgtacgctaacctcacgagctgtcaggccctaggcaatatgtgtgttatgaatatgaacagctatgactttgctaccttcgatgcctgtgggctgttccagtttatcttcgagaataccgccgggctttcaactgtgcacagcatttcattctggagacaaaatctgccatggctgttctacggcgatcagctggggttagcaccccaggtactttcctctaccagtctacctacaaacttttctttcaaaggagaaaatcagaataccaagctgaagtttgtggctgcctcctatgatatccgaggaaatttcttaaaatggcagaccttggagggcggagtgctccagctgtgtcctgataccgaaacccgccttaatgctgcttactccttcggcaccacataccagcaaaactgcgagattccaatctccaagattctgattgactttcccaccccaattttttatgacgtgtacctggagtacaccgacgaaaatcagcaccaatatatcctggccgtgcctgtgctgaacctgaaccttcagcacaataagatcttcgtaaatcaggattcaaatagcggtaagtggttactcacaagaaggatctttcttgtcgatgccgtaagtgggcgagaaaatgatctgggaacacagccgagggttattagggtagccacacaaatcagcctgtcggtccacttggtaccaaatactatcaatgggaacatctatccacccctcattaccatcgcctactccgacatcgatattaaggacgccaactcccagagcgtgaaggttagcttctccgtaacatatgaaatggaccacggagaagcccacgttcagacagatattgccctgggtgtgctcggcggacttgccgtgcttgcatcattgctgaaaacagctggctggaaacgtcgcattggaagcccaatgatcgatctgcaaactgtggtgaaatttttagtatactatgcaggagatctggccaatgtattctttatcattaccgtgggtacagggctctactggctcattttttttaaggcccagaagagtgtgagtgtgctgctccctatgccaatacaggaggaaagattcgtgacatatgtagggtgtgcctttgcactcaaagccctgcagtttctgcacaaacttatttcccagattactattgatgtattctttattgattgggagcgccccaagggaaaagtgctgaaagcagtggaaggtgaggggggtgttcggagcgccaccgtgccagtttccatctggcgtacctactttgttgccaacgagtggaacgagatacaaaccgtacgaaaaatcaattccctcttccaggtcctgaccgttctgtttttcctggaggtggtcgggtttaagaacctggcattaatggatagtagcagctccctgtccaggaacccacctagctatatagcaccgtattcatgcatcctccggtacgctgtcagcgctgccctttggctggcgatcgggatcattcaagttgtattctttgcggtattctatgaacggttcattgaagacaaaattcgccaattcgtggacctgtgctccatgagcaatatctcagtgtttcttctatctcacaagtgtttcggatattatatacacggacgtagtgtccacggacacgcagataccaatatggaggagatgaacatgaacctgaagcgagaggccgagaatctttgttctcagagaggactggtgccaaacacagacgggcaaacgtttgagatcgcaatatctaatcagatgcggcagcattacgatcgaatccatgaaacactaattcgtaaaaacgggcccgctaggctgctttccagttccgcatccacattcgagcagagcattaaggcctatcacatgatgaacaagttcctgggtagtttcatcgaccacgtgcacaaggaaatggattacttcatcaaggataaactattactcgagcgcatcttgggaatggagttcatggagccaatggagaaatctattttttataatgacgagggctattccttctcgtccgtgctgtattacggtaacgaggccaccttgttaattttcgacctgcttttcttttgcgtcgtggatttggcttgccagaatttcatcttggccagcttcttgacttacctacaacaagagatatttcgttatatccgtaacaccgttggacagaagaatctggccagtaaaaccctggtggaccagcgtttcctgatttag

SEQ ID NO: 53218 - DNA, 2745 bp, Artificial Sequence
  derived and/or modified sequence
atgagcctgagccattggccatactttcggctggtcctgaatttccgtccacaggttatctgtctacctcaaccaccgaaggttctgggatataggctcgaacctccgcaccttaccttggcttgtacactcgaggggatgtacaacataatagaggagatcctggagagggacattaacggtaccctgttgagtcaagctacctgtgaactttgtgacggcaacgaaaatagttttatggtagtcaatgcactgggggataggtgtgtcagatgtgagcccacttttgtgaatacaagccggtcatgcgcttgttccgaaccaaatatcctgacagggggtctgtgcttctcaagcacaggtaactttccactgagacgcattagcgcagccagatacggggaggtgggaatgtccttgacatctgagtggtttgcaaaatatctccagagttcagcggcagcttgctgggtgtatgccaacctgacgtcttgtcaagctttgggaaacatgtgtgtgatgaacatgaactcttacgatttcgcgacctttgacgcttgcggattattccagtttatatttgaaaacaccgctggattgtcaaccgtgcatagtatttccttctggcggcagaatctaccatggttgttctacggggaccagctgggcctcgctccccaggtccttagctccactagtttaccgaccaacttttccttcaagggcgagaatcaaaacaccaagctcaagttcgtggctgcatcttatgacatccgtggaaactttctgaaatggcaaacccttgagggcggagtgcttcagctctgtccagataccgagactaggctgaacgccgcatattcgtttggtacaacttatcagcagaactgcgaaattcccatttcaaagatcttgattgactttcccactcccatcttctacgatgtgtacctggaatacactgatgaaaaccagcaccagtacatactggccgtgcccgtgttgaatttaaacctccagcataacaagattttcgtgaatcaggacagcaactccggtaagtggttattaactcgacggatctttctggttgacgccgtgagcggccgagagaatgatttgggcactcagccccgtgtgatccgagtagcgacccagatttcactgagtgtccacctggtgccaaatactattaacggaaatatctaccctccactaatcacaattgcttacagcgacatcgacatcaaagacgctaactctcagagtgttaaggttagtttttccgttacctatgagatggaccacggtgaggctcatgtgcagactgacatcgccctgggcgtacttggcggtttggctgtcctggccagcttgctcaagacggcaggctggaaaaggcggattgggtcgcccatgatcgacctacagactgtggtaaaattcttggtgtactacgctggagacctggcaaatgtttttttcattattaccgtcgggacgggtttgtattggctgatcttcttcaaggcgcagaagtccgtttccgtgttattaccaatgcctatccaagaggagcggtttgtgacctacgttggttgcgctttcgctctaaaggccttgcagtttctgcataagctgatctcccagattaccatagacgtgttcttcatcgactgggaacggcctaaaggaaaagtacttaaagccgtcgagggcgaggggggtgtgcgttccgctaccgtacccgtgtccatatggaggacatacttcgttgcaaatgaatggaatgaaatccagacagtgaggaagatcaactcattgtttcaggtgctgaccgtgctgttcttcttggaggtggtcgggtttaagaacctcgccctgatggactcatcttcctccctcagccgtaacccgccatcctacattgcgccatacagctgcatcctgcggtatgcagtctcagccgcactttggttagcgattggaataatccaagtggtcttcttcgctgttttctatgaacgcttcatcgaagacaagattcgccagtttgtagatctgtgcagcatgagcaatatctctgttttcctcctttcccataagtgttttgggtattacattcacgggaggagtgttcatgggcatgctgatactaacatggaggaaatgaacatgaacctaaagcgggaggctgaaaatttatgttcacagagaggccttgttccgaatacagatggacagaccttcgaaatcgcaataagtaatcaaatgaggcagcactacgaccgtattcacgaaactctgatccgcaaaaacggtcccgcacgactgctctcttcatccgcctccacctttgagcaaagcatcaaggcctaccatatgatgaataagtttctcggcagtttcattgaccacgtacacaaagaaatggactattttatcaaagacaaattgcttttggagcggatattgggcatggagttcatggaacctatggagaagtcgatcttctataacgacgagggctatagtttctccagcgtcctttactatggaaatgaggccaccctcttgatattcgacctcttgtttttttgtgtagtggatcttgcttgtcagaactttatcctcgctagttttctaacctatctccagcaagaaatatttagatacattcggaacacagtaggtcagaaaaacctggcctccaaaacgctcgttgatcagagatttctgatttag

SEQ ID NO: 53219 - DNA, 3255 bp, Artificial Sequence
  derived and/or modified sequence
aggctgtgaggcttccagcgtcggcccagaccttctctttccctttccagcagccggagaagtgcgacaacaaccagtactttgatatctccgccctctcgtgtgttccttgtggagctaaccagaggcaagatgcccgaggtgttacagaagatggctggaactgcatttcttgccctagtgacttaactgccgaaggaaaatgtcactgtcccattggccatattttaggctggtcttgaacttccgacctcaggtgatctgcctgcctcagcctcccaaagtgctgggatacaggcttgagccaccgcacctgaccttggcatgtactttagaaggaatgtacaacataattgaagaaattttggaaagagacattaatggaacattgttgtctcaagcaacttgtgagctctgtgatggaaatgaaaactcttttatggtagtaaatgctttaggagacaggtgcgtccgatgtgagccaacatttgttaataccagcaggtcctgtgcatgttcagaacctaacattttaacagggggattatgtttcagcagcacagggaattttcctctacgtagaatttcagctgcacgttatggagaagttggcatgtctttaacttcagaatggtttgcaaagtatttgcaatcatcagcagctgcatgttgggtatatgccaatctaacatcttgtcaagctcttggaaatatgtgtgtgatgaacatgaattcttacgactttgccacatttgatgcatgtggactatttcagtttatctttgaaaatactgctggactgagcactgttcattctatttcattttggagacagaatcttccttggctgttttatggagaccagttaggattagcacctcaagtgctcagttctacctctcttcctacaaatttcagttttaaaggagaaaaccagaatacaaaactgaagtttgttgctgcttcctatgatataagaggaaattttctcaagtggcaaactttagaaggaggtgttttacagctttgtccagacacagagacaaggctaaatgctgcttattcatttggaacaacctaccaacaaaattgtgagattcctatctctaagatcttaattgactttcccactcctatattttatgatgtgtaccttgaatatactgatgaaaatcaacatcaatatattttggctgtgcctgtgttaaacctaaatcttcaacataataagatatttgtgaaccaagacagcaactctggaaagtggcttctaactcggcgcattttcttagtggatgcagtaagtggacgagaaaatgacttaggaactcagccaagagtaattcgagttgctactcaaatatcactgagtgtccaccttgtacccaacacaataaatggaaacatctaccctcccttaatcaccattgcctacagtgacattgatatcaaagatgccaacagccagtctgtgaaggtttctttctcagtcacatatgaaatggatcatggagaagcacatgtccagacagatattgctttgggtgtattgggtgggctagctgttttagcatctcttttgaagacagcaggatggaagaggcgcattgggagtcccatgattgatttacagacagttgtgaaattcttggtgtactatgctggtgatctggccaatgttttctttatcatcacagtgggaacaggtctttactggcttattttcttcaaagcacagaagtctgtgtctgttttgctgccaatgccaattcaggaagaacgttttgtcacttatgttggatgtgcctttgctctgaaggcactacaatttttgcataagctcatatcccagattacaatagatgtattctttattgattgggagcgacctaaaggaaaggttcttaaagctgttgaaggtgagggtggtgtacgaagtgccactgttcctgtaagcatatggagaacatattttgtagcaaatgaatggaatgaaattcagactgtgagaaaaattaattcactctttcaagtacttactgtcctcttctttttggaggttgtgggattcaagaacttagcattaatggactcatcttctagtctttctagaaacccacctagctacatagctccttatagctgcattttgagatatgcagtgtctgctgctctttggctagccattggaattatacaggtcgtgttctttgctgtcttttatgagagatttatagaagataaaattcgacagttcgttgatttatgctctatgagtaatatatcagtgtttctgttatcccacaaatgttttggatattacattcatggtagatcagtacatgggcatgcagatactaatatggaagaaatgaatatgaaccttaaaagagaagcggaaaatttgtgtagccagagaggtttggtacccaacacagatggtcagacttttgagattgcaatttctaaccagatgagacaacattatgacagaattcatgagacactaataaggaaaaatggtcctgctagactactgagttcatcagcaagtacttttgagcagagtataaaagcatatcatatgatgaataaatttcttggctccttcattgaccatgttcataaggaaatggattactttataaaagataagttgcttcttgaaagaattcttggaatggaattcatggaaccaatggaaaaaagcatcttttacaatgatgaaggttattctttcagcagtgtcctgtattatggaaatgaagctactcttcttatttttgatctgctgttcttctgtgttgtggatttggcttgccaaaattttattttagcatccttccttacatatctacaacaagagatttttagatatatccgtaatacagtaggacaaaagaatttggcatccaaaacattggtggatcaaagatttttgatttaacttcctgaataaataacttaaagactcagtataatcatggccaaaaaaaagtcatgatatcaggttagtttgccatattttttaaaacttataatgcagactattctgtttttgttttttatttgcagaaagatttatttttataacttgggaatatataacctgatataatagaaaatactgttttcccattgtgtgtagtatttaatgcagtaaataataaattaatactgacagtgaggccaaaaaaaatctaaatgttgctttcagcataatactttttaatgctaattaaaacagtccccatc

SEQ ID NO: 53220 - protein, 548 aa, Artificial Sequence
  derived and/or modified sequence
MATSSEEVLLIVKKVRQKKQDGALYLMAERIAWAPEGKDRFTISHMYADIKCQKISPEGKAKIQLQLVLHAGDTTNFHFSNESTAVKERDAVKDLLQQLLPKFKRKANKELEEKNRMLQEDPVLFQLYKDLVVSQVISAEEFWANRLNVNATDSSSTSNHKQDVGISAAFLADVRPQTDGCNGLRYNLTSDIIESIFRTYPAVKMKYAENVPHNMTEKEFWTRFFQSHYFHRDRLNTGSKDLFAECAKIDEKGLKTMVSLGVKNPLLDLTALEDKPLDEGYGISSVPSASNSKSIKENSNAAIIKRFNHHSAMVLAAGLRKQEAQNEQTSEPSNMDGNSGDADCFQPAVKRAKLQESIEYEDLGKNNSVKTIALNLKKSDRYYHGPTPIQSLQYATSQDIINSFQSIRQEMEAYTPKLTQVLSSSAASSTITALSPGGALMQGGTQQAINQMVPNDIQSELKHLYVAVGELLRHFWSCFPVNTPFLEEKVVKMKSNLERFQVTKLCPFQEKIRRQYLSTNLVSHIEEMLQTAYNKLHTWQSRRLMKKT

SEQ ID NO: 53221 - protein, 95 aa, Artificial Sequence
  derived and/or modified sequence
MATSSEEVLLIVKKVRQKKQDGALYLMAERIAWAPEGKDRFTISHMYADIKCQKISPEGKAKIQLQLVLHAGDTTNFHFSNESTAVKERDAVKDL

SEQ ID NO: 53222 - protein, 432 aa, Artificial Sequence
  derived and/or modified sequence
MLQEDPVLFQLYKDLVVSQVISAEEFWANRLNVNATDSSSTSNHKQDVGISAAFLADVRPQTDGCNGLRYNLTSDIIESIFRTYPAVKMKYAENVPHNMTEKEFWTRFFQSHYFHRDRLNTGSKDLFAECAKIDEKGLKTMVSLGVKNPLLDLTALEDKPLDEGYGISSVPSASNSKSIKENSNAAIIKRFNHHSAMVLAAGLRKQEAQNEQTSEPSNMDGNSGDADCFQPAVKRAKLQESIEYEDLGKNNSVKTIALNLKKSDRYYHGPTPIQSLQYATSQDIINSFQSIRQEMEAYTPKLTQVLSSSAASSTITALSPGGALMQGGTQQAINQMVPNDIQSELKHLYVAVGELLRHFWSCFPVNTPFLEEKVVKMKSNLERFQVTKLCPFQEKIRRQYLSTNLVSHIEEMLQTAYNKLHTWQSRRLMKKT

SEQ ID NO: 53223 - DNA, 3308 bp, Artificial Sequence
  derived and/or modified sequence
ctccttccgcgtggtccctccccctcaggccgcggtcgcgattacgctctctacggcctgcgaccgcagggccgttgcgggctggagacacggcgccgactggaaccggaggagctctaggccaaatggttgggccagccaggatcccaggacccttcgccgctcgagaccggagagaggaaacgaaacaggcgggaacccgtgggggagggagggaactagcggaaggtgtcatggcggccgcgctcttgagtcacgtgcccagggcccgccttgctacttccggtcacgtgccctcagactcctcgcagccagcgatggaggcgagaccccctagtaacagaggcggtggctactgctgcggccactgggtttcggcctcttcccagcagcggctctaagaagcgcagcggaactcgaccggatccaacccagttagttacttcctgtctagagttgtagcttccacctgcaccttctagccaccatggcaacctcatctgaagaagttttgctgattgtaaagaaagtgcgtcaaaagaagcaggatggagctctgtacctcatggcagaaagaattgcttgggcacctgaaggcaaagatagatttacaatcagccatatgtatgcagatattaaatgccagaaaattagtccagaaggaaaagctaaaattcagcttcagctggtcctacatgcaggggacacaactaacttccatttttccaatgaaagcacagcagtgaaagagcgagatgcagtaaaagaccttcttcagcagctgctgcccaaattcaagaggaaagcaaataaagaactggaagagaagaacagaatgctgcaagaagatcctgttttgtttcagctttataaagaccttgttgtgagtcaagtgatcagtgctgaggaattctgggccaatcgtttaaatgtgaatgcaacagatagttcttccacatccaatcataagcaggatgttggcatttctgctgcatttctggctgatgtccggccccaaactgatggctgtaacggtctaagatataatttaacttctgatatcattgagtccatatttaggacctatccagcagtaaaaatgaaatatgcagaaaatgttccccacaacatgacagagaaggaattctggacacgttttttccagtcccattattttcacagggatcggctgaatacagggtcaaaggatctctttgcagaatgtgccaaaatagatgaaaaaggcctaaaaacaatggtttcattaggagtgaaaaacccactactagatttaacagctttggaagataaaccattagatgagggctatggcatttcctctgtgccatctgcttccaattctaaatccataaaagagaatagtaatgctgccatcatcaagagatttaaccatcacagtgccatggtcctggcagctggactcagaaaacaagaagcacaaaatgaacaaactagtgagcccagcaacatggatggaaattccggagatgcagactgctttcagccagcagtcaaaagggcgaaattacaagagtccattgaatatgaagacttggggaaaaataattctgtaaaaacgattgcactaaacctcaagaagtcagataggtattatcatggtccaactccaatccagtcactacagtatgcaacaagtcaggacattattaattcttttcaaagtattagacaagaaatggaagcttatacacccaagttaactcaggttctctcaagtagtgctgccagtagtaccatcacagcactgtcacctggaggggcacttatgcagggaggaacacagcaagccataaaccagatggtgccaaatgatattcaatctgaattgaaacacttatatgtagctgttggagaacttctacgacatttctggtcctgctttcctgttaatacgccattcctagaagaaaaggtagtgaaaatgaaaagtaatttggaacgattccaagttacgaagctctgtccattccaagaaaagattcggagacagtatttaagcacaaatttggtaagtcacatagaagagatgctccagacagcctacaacaagctccacacatggcagtcacggcgtctgatgaagaaaacgtgaggtggccatgatgcttacaggttttgtgagattgagagaactatgacctgcagcaactctggaaacctggcctgacagacaagcagatgacctcacaggagtgataagaaacatctgctccacgccaactcccagagctgatgctattgtacttgcacattggagactgaaaggaaagaagggactaaatgctggggaggtaaattaagacagaaccaaatgagctaagttgcaaatatatatatatacacacacacacatatatgtacatgtgtatgtacatatatattttaaaagactgtttactgcagttgctcaggaactgcttttgattcacattaagctgctttcagaaattaaaaaaacactttttaaagggtgcattgataaaatctgaggttttttggttgtcgtttttttctgtgtacatttttttcctaagtttatggcacagggtagaccttaagtattcctcctccatccttcattcttcaccctccattggatcctcaagttttaatgaattccaattataccttacatcagcaagttaaaaaaagtactttaaaataaagcaaagggagactgttgctcaaccatcaggaaacagttgtcagaagacatcattggttctgtgtttcctacggaaataagaaacgataaatattgcactgaatgtttgtggtttggagtccctgaataataaagagggaatatatttgcagaaagtcgcatagggttttttaatgcagaattttgtcagaagacaatggcgctgcatgtttttctttgagtgcaaatgtacattgctaagatttttttaagatggcatgtgctttgaaaagaagatattgcatttttaagagtttaaaaatcttatgagtgagaaatattaaaaaaatcttattttcacctctttagaagaaataaaagatgtttctcctatctccttttctctagtatttgactgttactgtccttggcgaatcgataatcattgcatagtgactgaaaagcctaagtgcaaaaaaaaaaaaaaaagatgttcttgtttctgaacttcgtgccatattttgttcctgatgggatcaacttaatgtttaagactttagatgtcttgtattaaaaattacacaaaaaaagtaaaactttttatacttacccttttaactct

SEQ ID NO: 53224 - DNA, 1647 bp, Artificial Sequence
  derived and/or modified sequence
atggcaacatcgtctgaggaggtgctgctgatagtcaaaaaagtccgccagaagaagcaggacggggctctgtacttaatggcggagcggatagcgtgggccccagaaggtaaagataggtttactatctcacacatgtatgccgatatcaagtgtcaaaagatctctccagaaggcaaggcaaaaattcaactgcagcttgtgctgcacgctggcgacacaacaaacttccatttttcaaatgaatcaacagcagtgaaggagcgcgatgctgtcaaggacctgctgcagcaacttctgcccaagtttaaaagaaaggctaataaggagctcgaagagaagaatcgaatgttacaagaggatcccgttctattccagctatacaaggacttggtcgtttcccaggtcatctctgccgaggagttctgggcaaaccgactcaatgttaacgctactgactcttcctccactagtaaccataagcaggatgtgggtatctctgccgcgttcttggctgatgtgcgacctcagaccgatggatgtaatggcctcagatataacttgacctctgatattatcgaatccatttttagaacctaccctgctgttaaaatgaaatacgccgagaatgttccccataacatgactgagaaggagttttggactaggttttttcagagtcattattttcacagagaccgcttgaatacaggttccaaggatctcttcgcagaatgtgctaagatcgacgagaaaggccttaagactatggtctcgctgggcgtcaaaaatccgttgctagatctgaccgccttagaggacaagcccctcgatgaaggatatggaatctcctctgtgccgagtgctagcaactctaagtcaatcaaagaaaatagtaacgccgccattatcaagagatttaaccaccactccgccatggtgctggccgcgggcttaagaaagcaggaagctcagaatgagcagacctctgagccaagcaacatggacggtaatagtggcgacgccgactgtttccagccggccgtgaagagagcaaagctgcaggagagtatcgagtatgaggatctgggcaagaacaattctgtcaagaccatcgccctaaatctgaaaaagtcagacagatactatcatgggcctactccgattcagtctctgcaatacgctacatcccaggacatcataaacagctttcagagcatccgacaagaaatggaggcatataccccaaaacttactcaagtgctgagttcatccgctgcttcttccacgattaccgccctttcacccggtggggctctgatgcaagggggaacacaacaggccattaatcaaatggtccccaacgacattcaatccgagctgaaacacttgtatgttgctgttggcgagctgctgagacacttttggtcttgtttcccagtcaacacgccattcctggaggagaaagtggttaaaatgaagtctaacctggagcgtttccaggtaactaagctgtgtcctttccaagaaaaaatcaggagacagtacttaagtactaatctcgtgagtcacattgaagaaatgctccaaacagcctacaataagctccatacgtggcaatctaggaggctcatgaagaagacatag

SEQ ID NO: 53225 - DNA, 1647 bp, Artificial Sequence
  derived and/or modified sequence
atggcaacttcttcagaggaggtgctgttgatagtgaaaaaagtgcgccaaaagaagcaagacggtgcgctttatttgatggccgagcggatcgcttgggctcctgagggaaaagaccgcttcacaatttcacatatgtacgctgatatcaaatgccagaagatctcacctgaagggaaagccaaaatccagttgcaactcgttttgcacgctggtgacacgacaaactttcacttttcgaacgagtcaactgccgttaaggagcgtgatgctgtcaaagacctcctgcaacagctcctaccgaagttcaagcgcaaagccaacaaggagctcgaagaaaagaaccgaatgctgcaggaggatccagtcctttttcagctgtacaaggatctcgttgtaagtcaggtgattagtgcagaagaattttgggccaatcggttgaacgtcaacgccacagactcttcaagtactagcaatcataagcaggacgtggggatcagtgcagccttcctcgcagatgttaggccccaaaccgacggctgcaatggactgcgctataatctgacttcagatatcatcgaaagcattttcaggacttatccagcagtgaagatgaagtatgccgaaaacgtgccgcacaacatgacagaaaaggagttctggaccaggttctttcaatcgcactattttcaccgcgacagactgaacacaggatccaaggacttgtttgcagaatgtgccaagatcgatgagaagggactgaaaaccatggtttcactgggagtgaaaaacccgctccttgatctgaccgcactagaagataaacctctggacgaagggtacggcataagttcagtacccagtgcctccaactcaaaatctataaaagaaaatagtaatgccgcaatcattaaaagattcaaccatcactccgcaatggtactggcggcagggctgcgaaagcaggaggcacaaaacgaacagaccagtgaaccttccaatatggatggtaatagcggcgatgcagattgcttccagcctgctgttaagagagcaaagctgcaggagtctattgaatatgaagacctaggcaaaaacaactccgtgaagacgatcgcccttaatctcaaaaagtccgaccgatattatcatggccctacgcccatccagtcactccagtatgccacctctcaggatatcatcaattctttccaaagcatacgccaggagatggaggcttatacacccaaattgacccaggtcctctcttcttctgccgcctcctctaccatcaccgcactttcaccaggcggtgcactcatgcaagggggcacacagcaggccattaaccagatggtcccaaatgacattcagagcgagttgaagcacctctatgtagccgtgggtgaattactgaggcacttttggtcatgttttcccgttaacaccccattcctagaggaaaaggtcgtcaaaatgaaatctaatctggaacgctttcaggtcaccaaattatgcccttttcaagagaagatcaggcggcagtacctctctactaacctcgtgtcacatatcgaagaaatgctccagacagcctacaataaactgcacacatggcaatccaggaggctgatgaagaaaacatag

SEQ ID NO: 53226 - DNA, 288 bp, Artificial Sequence
  derived and/or modified sequence
atggccactagctccgaggaagtactgcttattgtgaagaaggtgcgccaaaaaaagcaggacggggccttataccttatggcagaacgaatcgcctgggccccagagggcaaagaccgcttcacaattagtcacatgtacgccgacataaagtgccagaaaatctcccccgaaggaaaagcgaaaattcaattgcagctcgtcctgcatgccggcgacacgactaacttccactttagcaacgagtccaccgcagttaaagagcgagatgctgtaaaggatctgtag

SEQ ID NO: 53227 - DNA, 1299 bp, Artificial Sequence
  derived and/or modified sequence
atgctgcaggaggaccctgttctgttccagctgtataaggatctggtagtcagtcaagttatttccgcagaggaattctgggccaatcgcctaaatgtgaatgccacagattcttcttcaacgtctaatcacaagcaagacgtgggcataagcgctgccttcttggccgatgtaagaccccagacagatggctgcaacgggcttagatacaatttgacaagcgatatcatcgagagcatctttcgaacttacccagccgtgaagatgaagtatgccgaaaacgtgccacacaacatgactgaaaaggagttttggacaagattcttccagagtcactattttcacagagacaggctcaatacaggatcgaaagacttgtttgccgagtgcgcgaaaattgatgagaagggccttaaaaccatggttagtctgggcgtgaagaaccctttactcgacctcacggcattggaggataaacccctggacgaaggttacggtatctcctccgttccgtcagcctctaactccaaaagcattaaagagaactcgaatgccgcgatcattaaacgcttcaatcatcacagtgccatggtcctggcagctggtcttcgaaagcaggaggctcagaacgagcaaacttcagagcccagtaacatggatggaaattctggcgatgcagattgcttccaaccagctgtgaagcgtgcaaaactgcaggagtcaatagaatacgaggatctcgggaagaataactcagtaaagactattgccttaaacctcaagaagagtgatcggtactaccacggtccgacccctatacagagcctccagtacgcaacgtcccaggacataattaacagcttccagtcgattcggcaagagatggaagcctacacacctaagcttactcaggtgctgtcatcatccgccgccagtagtaccatcacagccttatctcctggtggcgctctgatgcaagggggtacgcaacaggctatcaaccagatggtgccgaatgacatacagtctgaactgaaacacttgtacgtcgctgtaggcgaactcctgcgccatttctggtcctgtttcccggtaaacactccctttctcgaggagaaggttgtgaagatgaagagcaatctggaacgtttccaggtgaccaagttgtgtccttttcaagaaaagattcgccggcagtatttatcaacaaaccttgtttcccacatcgaagaaatgttacagaccgcttacaacaagctgcatacttggcaaagcagacgcctgatgaaaaagacatag

SEQ ID NO: 53228 - DNA, 2982 bp, Artificial Sequence
  derived and/or modified sequence
gaccccctagtaacagaggcggtggctactgctgcggccactgggtttcggcctcttcccagcagcggctctaagaagcgcagcggaactcgaccggatccaacccagttagttacttcctgtctagagttgtagcttccacctgcaccttctagccaccatggcaacctcatctgaagaagttttgctgattgtaaagaaagtgcgtcaaaagaagcaggatggagctctgtacctcatggcagaaagaattgcttgggcacctgaaggcaaagatagatttacaatcagccatatgtatgcagatattaaatgccagaaaattagtccagaaggaaaagctaaaattcagcttcagctggtcctacatgcaggggacacaactaacttccatttttccaatgaaagcacagcagtgaaagagcgagatgcagtaaaagaccttcttcagcagctgctgcccaaattcaagaggaaagcaaataaagaactggaagagaagaacagaatgctgcaagaagatcctgttttgtttcagctttataaagaccttgttgtgagtcaagtgatcagtgctgaggaattctgggccaatcgtttaaatgtgaatgcaacagatagttcttccacatccaatcataagcaggatgttggcatttctgctgcatttctggctgatgtccggccccaaactgatggctgtaacggtctaagatataatttaacttctgatatcattgagtccatatttaggacctatccagcagtaaaaatgaaatatgcagaaaatgttccccacaacatgacagagaaggaattctggacacgttttttccagtcccattattttcacagggatcggctgaatacagggtcaaaggatctctttgcagaatgtgccaaaatagatgaaaaaggcctaaaaacaatggtttcattaggagtgaaaaacccactactagatttaacagctttggaagataaaccattagatgagggctatggcatttcctctgtgccatctgcttccaattctaaatccataaaagagaatagtaatgctgccatcatcaagagatttaaccatcacagtgccatggtcctggcagctggactcagaaaacaagaagcacaaaatgaacaaactagtgagcccagcaacatggatggaaattccggagatgcagactgctttcagccagcagtcaaaagggcgaaattacaagagtccattgaatatgaagacttggggaaaaataattctgtaaaaacgattgcactaaacctcaagaagtcagataggtattatcatggtccaactccaatccagtcactacagtatgcaacaagtcaggacattattaattcttttcaaagtattagacaagaaatggaagcttatacacccaagttaactcaggttctctcaagtagtgctgccagtagtaccatcacagcactgtcacctggaggggcacttatgcagggaggaacacagcaagccataaaccagatggtgccaaatgatattcaatctgaattgaaacacttatatgtagctgttggagaacttctacgacatttctggtcctgctttcctgttaatacgccattcctagaagaaaaggtagtgaaaatgaaaagtaatttggaacgattccaagttacgaagctctgtccattccaagaaaagattcggagacagtatttaagcacaaatttggtaagtcacatagaagagatgctccagacagcctacaacaagctccacacatggcagtcacggcgtctgatgaagaaaacgtgaggtggccatgatgcttacaggttttgtgagattgagagaactatgacctgcagcaactctggaaacctggcctgacagacaagcagatgacctcacaggagtgataagaaacatctgctccacgccaactcccagagctgatgctattgtacttgcacattggagactgaaaggaaagaagggactaaatgctggggaggtaaattaagacagaaccaaatgagctaagttgcaaatatatatatatacacacacacacatatatgtacatgtgtatgtacatatatattttaaaagactgtttactgcagttgctcaggaactgcttttgattcacattaagctgctttcagaaattaaaaaaacactttttaaagggtgcattgataaaatctgaggttttttggttgtcgtttttttctgtgtacatttttttcctaagtttatggcacagggtagaccttaagtattcctcctccatccttcattcttcaccctccattggatcctcaagttttaatgaattccaattataccttacatcagcaagttaaaaaaagtactttaaaataaagcaaagggagactgttgctcaaccatcaggaaacagttgtcagaagacatcattggttctgtgtttcctacggaaataagaaacgataaatattgcactgaatgtttgtggtttggagtccctgaataataaagagggaatatatttgcagaaagtcgcatagggttttttaatgcagaattttgtcagaagacaatggcgctgcatgtttttctttgagtgcaaatgtacattgctaagatttttttaagatggcatgtgctttgaaaagaagatattgcatttttaagagtttaaaaatcttatgagtgagaaatattaaaaaaatcttattttcacctctttagaagaaataaaagatgtttctcctatctccttttctctagtatttgactgttactgtccttggcgaatcgataatcattgcatagtgactgaaaagcctaagtgcaaaaaaaaaaaaaaaagatgttcttgtttctgaacttcgtgccatattttgttcctgatgggatcaacttaatgtttaagactttagatgtcttgtattaaaaattacacaaaaaaagtaaaactttttatacttacccttttaactcta

SEQ ID NO: 53229 - DNA, 2707 bp, Artificial Sequence
  derived and/or modified sequence
aggccgcggtcgcgattacgctctctacggcctgcgaccgcagggccgttgcgggctggagacacggcgccgactggaaccggaggagctctaggccaaatggttgggccagccaggatcccaggacccttcgccgctcgagaccggagagaggaaacgaaacaggcgggaacccgtgggggagggagggaactagcggaaggtgtcatggcggccgcgctcttgagtcacgtgcccagggcccgccttgctacttccggtcacgtgccctcagactcctcgcagccagcgatggaggcgagaccccctagtaacagaggcggtggctactgctgcggccactgggtttcggcctcttcccagcagcggctctaagaagcgcagcggaactcgaccggatccaacccagttagttacttcctgtctagagttgtagcttccacctgagttctcctgggaagaagtgtttgccactcaaggaatacactcaagaaaaacctggaaatcacagaaggcattgtaagatagctacagtgattctgttaaacctcctgaaattggtccttgaacaattaagaggtgctacagatgaccaggaaaatttaccaggcaaattagctgtgagacaattgaccatttgtgcccaatgttcgcaccttctagccaccatggcaacctcatctgaagaagttttgctgattgtaaagaaagtgcgtcaaaagaagcaggatggagctctgtacctcatggcagaaagaattgcttgggcacctgaaggcaaagatagatttacaatcagccatatgtatgcagatattaaatgccagaaaattagtccagaaggaaaagctaaaattcagcttcagctggtcctacatgcaggggacacaactaacttccatttttccaatgaaagcacagcagtgaaagagcgagatgcagtaaaagaccttcttcagcagctgctgcccaaattcaagaggaaagcaaataaagaactggaagagaagaacagaatgctgcaagaagatcctgttttgtttcagctttataaagaccttgttgtgagtcaagtgatcagtgctgaggaattctgggccaatcgtttaaatgtgaatgcaacagatagttcttccacatccaatcataagcaggatgttggcatttctgctgcatttctggctgatgtccggccccaaactgatggctgtaacggtctaagatataatttaacttctgatatcattgagtccatatttaggacctatccagcagtaaaaatgaaatatgcagaaaatgttccccacaacatgacagagaaggaattctggacacgttttttccagtcccattattttcacagggatcggctgaatacagggtcaaaggatctctttgcagaatgtgccaaaatagatgaaaaaggcctaaaaacaatggtttcattaggagtgaaaaacccactactagatttaacagctttggaagataaaccattagatgagggctatggcatttcctctgtgccatctgcttccaattctaaatccataaaagagaatagtaatgctgccatcatcaagagatttaaccatcacagtgccatggtcctggcagctggactcagaaaacaagaagcacaaaatgaacaaactagtgagcccagcaacatggatggaaattccggagatgcagactgctttcagccagcagtcaaaagggcgaaattacaagagtccattgaatatgaagacttggggaaaaataattctgtaaaaacgattgcactaaacctcaagaagtcagataggtattatcatggtccaactccaatccagtcactacagtatgcaacaagtcaggacattattaattcttttcaaagtattagacaagaaatggaagcttatacacccaagttaactcaggttctctcaagtagtgctgccagtagtaccatcacagcactgtcacctggaggggcacttatgcagggaggaacacagcaagccataaaccagatggtgccaaatgatattcaatctgaattgaaacacttatatgtagctgttggagaacttctacgacatttctggtcctgctttcctgttaatacgccattcctagaagaaaaggtagtgaaaatgaaaagtaatttggaacgattccaagttacgaagctctgtccattccaagaaaagattcggagacagtatttaagcacaaatttggtaagtcacatagaagagatgctccagacagcctacaacaagctccacacatggcagtcacggcgtctgatgaagaaaacgtgaggtggccatgatgcttacaggttttgtgagattgagagaactatgacctgcagcaactctggaaacctggcctgacagacaagcagatgacctcacaggagtgataagaaacatctgctccacgccaactcccagagctgatgctattgtacttgcacattggagactgaaaggaaagaagggactaaatgctggggaggtaaattaagacagaaccaaatgagctaagttgcaaatatatatatatacacacacacacatatatgtacatgtgtatgtacatatatattttaaaagactgtttactgcagttgctcaggaactgcttttgattcacattaagctgctttcagaaattaaaaaaacactttttaaagggtgcattgataaaa

SEQ ID NO: 53230 - DNA, 545 bp, Artificial Sequence
  derived and/or modified sequence
actcctcgcagccagcgatggaggcgagaccccctagtaacagaggcggtggctactgctgcggccactgggtttcggcctcttcccagcagcggctctaagaagcgcagcggaactcgaccggatccaacccagttagttacttcctgtctagagttgtagcttccacctgagttctcctgggaagaagtgtttgccactcaaggaatacactcaagaaaaacctggaaatcacagaaggcattcaccttctagccaccatggcaacctcatctgaagaagttttgctgattgtaaagaaagtgcgtcaaaagaagcaggatggagctctgtacctcatggcagaaagaattgcttgggcacctgaaggcaaagatagatttacaatcagccatatgtatgcagatattaaatgccagaaaattagtccagaaggaaaagctaaaattcagcttcagctggtcctacatgcaggggacacaactaacttccatttttccaatgaaagcacagcagtgaaagagcgagatgcagtaaaagacctt

SEQ ID NO: 53231 - DNA, 2587 bp, Artificial Sequence
  derived and/or modified sequence
agactcctcgcagccagcgatggaggcgagaccccctagtaacagaggcggtggctactgctgcggccactgggtttcggcctcttcccagcagcggctctaagaagcgcagcggaactcgaccggatccaacccagttagttacttcctgtctagagttgtagcttccacctgcaccttctagccaccatggcaacctcatctgaagaagttttgctgattgtaaagaaagtgcgtcaaaagaagcaggatggagctctgtacctcatggcagaaagaattgcttgggcacctgaaggcaaagatagatttacaatcagccatatgtatgcagatattaaataatgctgcaagaagatcctgttttgtttcagctttataaagaccttgttgtgagtcaagtgatcagtgctgaggaattctgggccaatcgtttaaatgtgaatgcaacagatagttcttccacatccaatcataagcaggatgttggcatttctgctgcatttctggctgatgtccggccccaaactgatggctgtaacggtctaagatataatttaacttctgatatcattgagtccatatttaggacctatccagcagtaaaaatgaaatatgcagaaaatgttccccacaacatgacagagaaggaattctggacacgttttttccagtcccattattttcacagggatcggctgaatacagggtcaaaggatctctttgcagaatgtgccaaaatagatgaaaaaggcctaaaaacaatggtttcattaggagtgaaaaacccactactagatttaacagctttggaagataaaccattagatgagggctatggcatttcctctgtgccatctgcttccaattctaaatccataaaagagaatagtaatgctgccatcatcaagagatttaaccatcacagtgccatggtcctggcagctggactcagaaaacaagaagcacaaaatgaacaaactagtgagcccagcaacatggatggaaattccggagatgcagactgctttcagccagcagtcaaaagggcgaaattacaagagtccattgaatatgaagacttggggaaaaataattctgtaaaaacgattgcactaaacctcaagaagtcagataggtattatcatggtccaactccaatccagtcactacagtatgcaacaagtcaggacattattaattcttttcaaagtattagacaagaaatggaagcttatacacccaagttaactcaggttctctcaagtagtgctgccagtagtaccatcacagcactgtcacctggaggggcacttatgcagggaggaacacagcaagccataaaccagatggtgccaaatgatattcaatctgaattgaaacacttatatgtagctgttggagaacttctacgacatttctggtcctgctttcctgttaatacgccattcctagaagaaaaggtagtgaaaatgaaaagtaatttggaacgattccaagttacgaagctctgtccattccaagaaaagattcggagacagtatttaagcacaaatttggtaagtcacatagaagagatgctccagacagcctacaacaagctccacacatggcagtcacggcgtctgatgaagaaaacgtgaggtggccatgatgcttacaggttttgtgagattgagagaactatgacctgcagcaactctggaaacctggcctgacagacaagcagatgacctcacaggagtgataagaaacatctgctccacgccaactcccagagctgatgctattgtacttgcacattggagactgaaaggaaagaagggactaaatgctggggaggtaaattaagacagaaccaaatgagctaagttgcaaatatatatatatacacacacacacatatatgtacatgtgtatgtacatatatattttaaaagactgtttactgcagttgctcaggaactgcttttgattcacattaagctgctttcagaaattaaaaaaacactttttaaagggtgcattgataaaatctgaggttttttggttgtcgtttttttctgtgtacatttttttcctaagtttatggcacagggtagaccttaagtattcctcctccatccttcattcttcaccctccattggatcctcaagttttaatgaattccaattataccttacatcagcaagttaaaaaaagtactttaaaataaagcaaagggagactgttgctcaaccatcaggaaacagttgtcagaagacatcattggttctgtgtttcctacggaaataagaaacgataaatattgcactgaatgtttgtggtttggagtccctgaataataaagagggaatatatttgcagaaagtcgcatagggttttttaatgcagaattttgtcagaagacaatggcgctgcatgtttttctttgagtgcaaatgtacattgctaagatttttttaagatggcatgtgctttgaaaagaagatattgcatttttaagagtttaaaaatcttatgagtgagaaatattaaaaaaatcttattttcacctctttagaagaaataaaagatgtttctcct

SEQ ID NO: 53232 - DNA, 1647 bp, Artificial Sequence
  derived and/or modified sequence
atggccaccagcagcgaggaggtgctgctgattgtgaagaaggtgcggcagaagaagcaggatggagccctgtacctgatggccgagagaattgcctgggcccctgagggcaaggaccgcttcaccatcagccacatgtatgctgacatcaagtgccagaagatcagccctgagggcaaggccaagatccagctgcagctggtgctgcatgctggggacaccaccaacttccacttcagcaatgaaagcacagctgtgaaggagagagatgctgtgaaggacctgctgcagcagctgctgcccaagttcaagaggaaggccaacaaggagctggaggagaagaacaggatgctgcaggaggaccctgtgctcttccagctgtacaaggacctggtggtgtcccaggtgatctctgctgaggagttctgggccaaccggctgaatgtgaatgccacagacagcagcagcaccagcaaccacaagcaggatgtgggcatctctgctgccttcctggctgatgtgcggccccagacagatggctgcaatggcctgcgctacaacctgaccagtgacatcatcgagagcatcttccgcacctacccagctgtgaagatgaagtatgcagaaaatgtgccccacaacatgacagagaaggagttctggacccgcttcttccagagccactacttccaccgggaccggctgaacacaggcagcaaggacctgtttgctgaatgtgccaagattgatgagaagggcctgaagaccatggtgtccctgggcgtgaagaaccccctgctggacctgacagccctggaggacaagcccctggatgagggctacggcatcagctctgtgcccagcgccagcaacagcaagagcatcaaggagaacagcaatgctgccatcatcaagcgcttcaaccaccacagcgccatggtgctggccgccggcctgaggaagcaggaggcccagaatgagcagaccagcgagcccagcaacatggatggcaacagcggagatgctgactgcttccagcctgctgtgaagagggccaagctgcaggagagcattgaatatgaggacctgggcaagaacaacagcgtgaagaccatcgccctgaacctgaagaagagtgaccgctactaccacggccccacccccatccagagcctgcagtatgccaccagccaggacatcatcaacagcttccagagcatccggcaggagatggaggcctacacccccaagctgacccaggtgctgagcagcagcgctgccagcagcaccatcacagccctgagccctgggggcgccctgatgcagggcggcacccagcaggccatcaaccagatggtgcccaatgacatccagagcgagctgaagcacctgtatgtggccgtgggggagctgctgcggcacttctggagctgcttccctgtgaacacccccttcctggaggagaaggtggtgaagatgaagagcaacctggagcgcttccaggtgaccaagctgtgccccttccaggagaagatccggcggcagtacctgagcaccaacctggtgagccacatcgaggagatgctgcagacagcctacaacaagctgcacacctggcagagccggcggctgatgaagaagacctag

SEQ ID NO: 53233 - DNA, 288 bp, Artificial Sequence
  derived and/or modified sequence
atggccaccagcagcgaggaggtgctgctgattgtgaagaaggtgcggcagaagaagcaggatggagccctgtacctgatggccgagagaattgcctgggcccctgagggcaaggaccgcttcaccatcagccacatgtatgctgacatcaagtgccagaagatcagccctgagggcaaggccaagatccagctgcagctggtgctgcatgctggggacaccaccaacttccacttcagcaatgaaagcacagctgtgaaggagagagatgctgtgaaggacctgtag

SEQ ID NO: 53234 - DNA, 1299 bp, Artificial Sequence
  derived and/or modified sequence
atgctgcaggaggaccctgtgctcttccagctgtacaaggacctggtggtgtcccaggtgatctctgctgaggagttctgggccaaccggctgaatgtgaatgccacagacagcagcagcaccagcaaccacaagcaggatgtgggcatctctgctgccttcctggctgatgtgcggccccagacagatggctgcaatggcctgcgctacaacctgaccagtgacatcatcgagagcatcttccgcacctacccagctgtgaagatgaagtatgcagaaaatgtgccccacaacatgacagagaaggagttctggacccgcttcttccagagccactacttccaccgggaccggctgaacacaggcagcaaggacctgtttgctgaatgtgccaagattgatgagaagggcctgaagaccatggtgtccctgggcgtgaagaaccccctgctggacctgacagccctggaggacaagcccctggatgagggctacggcatcagctctgtgcccagcgccagcaacagcaagagcatcaaggagaacagcaatgctgccatcatcaagcgcttcaaccaccacagcgccatggtgctggccgccggcctgaggaagcaggaggcccagaatgagcagaccagcgagcccagcaacatggatggcaacagcggagatgctgactgcttccagcctgctgtgaagagggccaagctgcaggagagcattgaatatgaggacctgggcaagaacaacagcgtgaagaccatcgccctgaacctgaagaagagtgaccgctactaccacggccccacccccatccagagcctgcagtatgccaccagccaggacatcatcaacagcttccagagcatccggcaggagatggaggcctacacccccaagctgacccaggtgctgagcagcagcgctgccagcagcaccatcacagccctgagccctgggggcgccctgatgcagggcggcacccagcaggccatcaaccagatggtgcccaatgacatccagagcgagctgaagcacctgtatgtggccgtgggggagctgctgcggcacttctggagctgcttccctgtgaacacccccttcctggaggagaaggtggtgaagatgaagagcaacctggagcgcttccaggtgaccaagctgtgccccttccaggagaagatccggcggcagtacctgagcaccaacctggtgagccacatcgaggagatgctgcagacagcctacaacaagctgcacacctggcagagccggcggctgatgaagaagacctag

SEQ ID NO: 53235 - DNA, 1647 bp, Artificial Sequence
  derived and/or modified sequence
atggccaccagcagcgaggaggtgctgctgatcgtgaagaaggtgagacaaaagaagcaggacggcgctttgtacttaatggcagagaggatcgcctgggcgcccgagggcaaagaccggtttacaatatcccatatgtatgccgacataaagtgccagaaaatatcacctgaaggcaaggccaagatccagttacagttagtgctacatgcaggggacaccacaaattttcatttttctaacgaatctacggccgttaaagagagggacgccgtcaaagaccttcttcagcaactgttacctaaattcaaacgaaaggctaacaaggagctcgaagaaaaaaaccgcatgctgcaagaagaccccgtgctgttccagctgtacaaggacttggtcgtttcccaggttatctccgccgaggagttctgggccaacagattgaacgtgaacgctacggacagcagtagtacttcgaaccacaagcaggatgtgggcatcagcgctgccttcctcgcagatgtaaggccccaaacggacggctgtaacggcctgagatacaatttgacttcagacatcatcgagtccatatttcggacttaccctgccgttaaaatgaagtatgccgagaatgtccctcacaacatgaccgaaaaggagttctggactcgctttttccagagtcactatttccaccgggataggctgaacaccggttccaaagacttatttgccgaatgcgccaagatcgatgagaaggggctcaagactatggtttcacttggagttaaaaaccccctgctggacctgactgccctggaggacaagcctttggacgagggctacgggatatccagcgtgcctagcgcttcgaacagtaaaagcatcaaggaaaattcaaatgcggcgatcatcaaacgcttcaaccaccattcagcaatggtcctggctgcgggcttgcggaagcaagaggcccagaatgagcagactagtgagccatctaatatggatgggaattcaggagacgctgactgcttccaacctgccgtgaagcgcgctaagctgcaggagtcgattgagtacgaggaccttggaaagaacaatagcgtcaaaaccattgccttaaatctgaaaaagagcgatcgctattatcacggtcccacaccaatacagagcctgcaatatgccacatcccaggacattatcaattctttccagagcatcaggcaggagatggaggcttacacgccgaagctcacccaggttctgagtagtagcgctgccagctcaaccatcacggcactgtcccctggaggagcactgatgcagggggggacacagcaggccatcaaccagatggtgcctaatgacatccagtccgaactcaaacacctgtacgttgctgtgggagagctgctgcgccacttctggagctgcttcccagtgaacaccccatttctggaggaaaaagttgtgaagatgaagtctaatcttgagcgattccaggtgaccaaactttgcccctttcaagagaagatccgcagacagtatctgtcgacaaacctcgtgtcacacatcgaagagatgttgcagaccgcctacaacaagctgcatacatggcagtctagacgcctgatgaagaaaacatag

SEQ ID NO: 53236 - DNA, 1647 bp, Artificial Sequence
  derived and/or modified sequence
atggccaccagcagcgaggaggtgctgctgatcgtgaagaaggtgcgacagaagaagcaggatggcgctctttaccttatggccgaaagaattgcttgggctccagagggaaaggacaggttcaccatttctcacatgtatgccgacattaaatgtcagaagatctccccagagggaaaggctaagattcaattgcagctcgttctgcatgccggagacaccaccaacttccattttagcaacgagagcaccgccgtgaaagagcgggacgctgttaaagacctattgcagcagcttctgcccaagttcaaacgcaaggccaataaggaactagaagagaagaatcgtatgcttcaggaggatcccgtgctctttcagttatacaaggacttggtcgtctcacaggtaattagtgcagaggagttttgggccaacaggctcaatgtgaacgctacagatagtagtagtaccagcaatcacaagcaggatgttggcatctcagcagcctttctggccgatgtcagaccccagaccgacggatgtaatggcctccgatataatctaactagcgatataattgaatctatcttcagaacatatcccgccgtcaagatgaaatacgctgagaacgtcccccataacatgaccgagaaggagttctggacccggttttttcagtcccactattttcatagggaccgcctgaatacaggcagcaaggacctgtttgccgagtgcgccaagatagacgagaaaggactgaaaacgatggtctcacttggggtgaagaacccattattagatttgacagctcttgaggataagccactcgacgaagggtacgggatctcaagcgtgccctccgcttcgaactcaaagtctatcaaggaaaactctaacgctgctatcatcaaaagatttaaccaccatagcgcaatggtgttggctgccgggttacgaaagcaggaagcccagaacgagcagacgagcgaacctagcaacatggatggtaatagcggggatgccgactgctttcagcccgccgtcaagcgcgctaagttgcaggaaagcattgagtatgaggatcttggaaaaaataatagtgtcaagaccatcgcccttaacctgaaaaaatctgacaggtactaccatggaccaacacccattcagtctctgcaatatgccaccagtcaggacattattaattcatttcagagtatcaggcaggaaatggaagcctacaccccgaagctgacccaggtgctcagctcaagcgcagcctcctctaccataacagcattatcacccggcggagccctgatgcagggcggaacacagcaagcaataaatcaaatggtccccaacgatattcagagtgagctgaagcatctttatgttgcagtgggagagctgctacggcacttctggtcttgtttccctgtgaacacccctttcctggaagagaaggtcgtgaagatgaagtctaaccttgaacgatttcaggtgacgaaattgtgccccttccaagagaagattcgccggcagtacctgtcaaccaacctcgtctcccacatcgaggagatgctacagaccgcttataataaactgcatacgtggcagagtcgtcggctgatgaaaaagacctag

SEQ ID NO: 53237 - DNA, 288 bp, Artificial Sequence
  derived and/or modified sequence
atggccaccagcagcgaggaggtgctgctgatcgtgaagaaggtgcggcagaagaagcaggacggtgcgctgtaccttatggctgagagaatagcatgggcaccagagggtaaggatagattcacaatttcccatatgtatgctgacattaaatgccagaaaatatcacctgaagggaaggcaaagattcagctgcaactggtgcttcacgcaggggacacaacaaatttccacttctccaacgagtctacggccgtcaaagaacgtgacgctgtaaaggatctctag

SEQ ID NO: 53238 - DNA, 1299 bp, Artificial Sequence
  derived and/or modified sequence
atgctgcaggaggaccccgtgctgttccagctgtacaaggacctggtagtgtcacaggttattagtgccgaggagttctgggctaaccgactcaacgtcaatgctacagatagctcaagtacgagtaatcataagcaagatgtggggatttctgccgcatttctggcggacgtcagacctcaaaccgacggttgcaacggcttgcggtacaatctgacctccgacatcattgaatctatctttcgcacctaccccgcagttaaaatgaagtacgccgagaacgtgccacataacatgactgagaaggagttctggacaaggttcttccaatctcactacttccaccgtgacaggctcaatacaggatctaaggatctgttcgcggaatgcgccaaaattgacgaaaaagggctgaaaaccatggtatctttaggagtgaaaaatccactgctcgacttaacggcactggaagacaaacccctcgatgaggggtacggtataagcagtgtcccctccgcaagtaactcaaagagtatcaaggagaactcaaatgcggcgattattaagagattcaatcatcactctgctatggtgcttgccgcaggactgcgaaagcaagaggcccagaacgaacaaacctctgaaccttccaacatggatgggaacagcggagatgctgattgctttcaaccagcagttaagcgagctaaattacaagagtcgatcgaatacgaagaccttgggaagaataatagtgtgaagaccatcgcactgaatctgaagaaatctgatcggtattatcatgggcctacccccatccagtccttgcagtacgcaacatcccaggacattattaactcatttcaaagcatccgacaagagatggaggcctatactccaaaactgacacaggtgctctccagcagcgccgcatcatctaccatcacggctctcagccctggcggcgccctgatgcaaggcggtacccagcaagccatcaatcagatggtgcccaacgacatacaaagcgagttaaagcatctgtacgtagcggtcggtgagttactcaggcatttctggtcctgttttccagtgaacaccccatttcttgaagagaaggtggttaaaatgaagtccaatctcgaaagattccaagttaccaagctctgcccctttcaagaaaagattaggcggcagtatctaagcaccaatctggtatcacatatcgaagagatgcttcagactgcatataacaagcttcacacgtggcagagcagacggcttatgaaaaaaacctag

SEQ ID NO: 53239 - DNA, 1647 bp, Artificial Sequence
  derived and/or modified sequence
atggcgacgtcgagcgaagaggtgctgttaattgtgaagaaggtgaggcagaaaaagcaggatggtgcactgtacctcatggcggagagaatcgcctgggcccctgaaggaaaggacaggtttaccatctctcacatgtacgctgacatcaaatgtcagaaaatctctcccgagggtaaagccaaaatccagctacagttggtactgcacgctggcgatacgaccaactttcatttctcaaatgaatccacagccgttaaggaacgggatgccgtcaaggatctgttgcagcaactgttacccaaatttaagagaaaagccaacaaggaactcgaagagaagaatcgtatgctgcaagaggacccagttttgttccagctttacaaagacttggtagtatcccaggtgatcagtgcggaggagttttgggcaaatcgtctgaacgtgaatgccactgactcgtcgtcaacctcaaaccacaaacaggatgtgggcatcagtgccgctttcctggccgacgtgagacctcaaacggatggctgtaacggactgaggtacaatctcacatcagacatcatagagagtattttcaggacttaccctgccgtgaagatgaaatatgcagagaatgtgcctcacaatatgactgagaaagagttctggactcggttcttccaaagccattacttccatagagaccgtctgaacactggtagcaaagacctgtttgcagagtgtgctaaaatcgacgaaaaagggctcaagactatggtgagtctgggagttaagaatccactcctcgatctgaccgcacttgaagacaaacccttagacgaaggatacggcatttcaagtgtgccatcagcttctaactcgaaatcaatcaaggaaaactcgaatgccgcaatcattaagcgctttaatcatcacagtgcaatggtcctcgcagccggactgcggaagcaggaggcgcagaatgagcaaacaagcgaaccaagcaacatggacggtaacagtggcgacgcagactgttttcagcccgcagtaaagcgggctaagttgcaggagtcgattgagtacgaagacctgggcaagaacaacagcgtgaaaaccatcgccctgaacctaaaaaaatcagaccgatactatcacggacctactccgattcagagccttcagtatgctacaagtcaggatataatcaacagttttcaatctatccgccaggagatggaagcctataccccaaagttaacccaggtcctgtctagcagcgctgcgtcctccacaatcacagctctgtctccagggggagcacttatgcagggagggacacagcaggccatcaatcaaatggtccctaatgacatacagtcagagttgaaacacttgtacgtggcagtcggcgaactgttgcgccacttctggagctgctttcctgtgaatacaccgtttctggaggaaaaagtggttaaaatgaagagcaacctggagcggttccaggtgacaaaattgtgcccctttcaggaaaagatacggcgacagtatctgtccactaacttggtgtcacatattgaggagatgctgcaaacagcatacaacaagcttcacacatggcagagccgacgcttgatgaagaaaacttag

SEQ ID NO: 53240 - DNA, 1647 bp, Artificial Sequence
  derived and/or modified sequence
atggccacttcgagcgaggaggtgttgctgatagtcaaaaaggttaggcaaaaaaagcaggacggtgccctctacctaatggcagagcgaatcgcttgggcgcctgaaggaaaggaccgcttcacaattagtcacatgtatgctgacatcaaatgtcaaaaaatctcaccagaaggtaaagcaaagatacaactgcagcttgtactccatgcaggggacactaccaacttccatttctctaatgagtccaccgcagtgaaagagagagatgcggtgaaagacctgctgcagcagctcctacccaagttcaagagaaaagcaaacaaggaactcgaagaaaagaaccggatgctccaggaggatccagttcttttccagctgtataaggaccttgttgtcagccaggtcatcagtgcagaggaattttgggctaaccgccttaacgttaacgcaacggactcaagctcgacttcgaaccacaaacaggacgttggaatttcagcagctttcttggccgatgttcggccacagaccgatggttgcaacggtttgcgttataacctaacatcagacatcatcgagtccatctttcgcacttaccccgctgttaaaatgaagtatgccgaaaacgtcccacataacatgaccgagaaagaattctggacgcggttcttccagtcgcactatttccatagggaccgcctgaacacgggtagtaaagatctgttcgccgagtgcgccaagattgacgagaaaggattgaagaccatggtgagtcttggggtgaagaatcccctgctagatctgacggcattagaagataagcctttagacgaagggtacgggatatcaagtgtcccatcagcgtcgaattccaagtccattaaagaaaatagtaacgccgcaatcataaaacgtttcaaccaccacagtgccatggtgctggccgcagggcttcgaaagcaagaggcccagaatgagcagacctccgagccatcaaacatggacggaaatagcggtgatgcggattgtttccagcccgctgttaagagggccaaactccaggagtccatagaatatgaagacttagggaagaacaacagcgtgaaaaccatcgccttaaatttgaaaaagtcggacagatattaccacgggcctacacctatccagagcctccagtatgctacaagccaggacattattaattctttccagtccatccgacaggagatggaagcttatacacccaaactaacacaggtgctgtcgtcatcagccgcatcatctacaattactgctctcagccctgggggagccctgatgcagggcggaacacaacaggccatcaaccagatggtgcccaacgatattcagtcagaactgaaacacctatatgtagctgtgggggagctgcttcgacacttttggtcgtgcttcccagtgaacaccccgttcctcgaagagaaagtcgtgaaaatgaagagtaatttagaaaggtttcaggttacaaagttgtgcccctttcaggaaaaaatccgccgacagtacctgtcaaccaatctggtctcccacattgaagaaatgctccaaactgcctataataaactgcacacctggcaatctcgcaggctgatgaagaaaacttag

SEQ ID NO: 53241 - DNA, 288 bp, Artificial Sequence
  derived and/or modified sequence
atggcgacatcaagcgaggaagtgctccttatcgttaaaaaggttcgccagaaaaagcaggacggagccctatacctgatggctgagagaatcgcgtgggcaccagaaggaaaggatcggtttacaatctcacatatgtatgccgatattaagtgccagaagatctcgcccgaggggaaagccaagatccagcttcaattggtcctccacgccggtgatactacaaattttcatttcagcaatgaatcaaccgcggtgaaagagagggatgctgtgaaagacttgtag

SEQ ID NO: 53242 - DNA, 1299 bp, Artificial Sequence
  derived and/or modified sequence
atgctgcaggaggatccagttctgttccagttgtacaaggacctggttgtgagtcaggttatctcagcggaggagttttgggcgaaccgcctgaatgtgaatgctacagactcttcctctaccagcaaccataaacaggacgtagggatctctgccgctttcctggccgacgtgcgtccccaaacggacgggtgcaacgggctgaggtacaatttgacgagtgatattatcgagagcatattcaggacgtacccagctgtaaagatgaaatatgccgaaaacgttcctcacaacatgacggaaaaagagttttggacccgattctttcagagccattactttcaccgcgacaggctgaacaccgggtccaaagacctgttcgcagagtgtgctaaaattgacgagaaaggtctcaagactatggtcagccttggagtgaagaacccacttctggacttgactgcactggaggacaagcccctggatgagggctacgggatatccagcgtcccctctgcgtctaattcaaaatctatcaaggagaattccaacgccgctatcatcaagcggttcaatcatcactctgctatggttttggccgctggcctgcggaaacaggaggctcagaacgaacaaacctctgaaccgtctaacatggatgggaacagcggcgatgctgactgttttcaacccgctgtgaagcgggcaaagttgcaagaaagcattgaatatgaagatttgggcaaaaataactctgtgaaaaccatcgccttgaatctgaagaaatcagaccggtactatcacggccctacgcctatacagagcctgcagtatgctaccagtcaagacatcatcaacagcttccagagtattagacaggagatggaggcctacacacctaagttgactcaggtcctatctagcagtgccgcatcctctacaatcacagccctctcgcctggtggagctcttatgcagggcggaactcaacaggccatcaatcagatggtgccaaatgatatccagtccgagttaaagcatctgtatgttgcggtgggggaactgctgaggcacttctggtcctgcttccccgtgaatactcccttcctggaggaaaaggtggtgaaaatgaagtctaatctggagcgcttccaggtgacaaagttatgtccttttcaagagaagatcaggcgacagtacctgtcaactaacctggtgtctcatatcgaagagatgctgcagacggcctacaacaaactgcatacctggcaatcccgtcgcctaatgaagaagacttag

SEQ ID NO: 53243 - DNA, 1647 bp, Artificial Sequence
  derived and/or modified sequence
atggccaccagcagcgaggaggtgctgctgatcgtgaagaaggtgagacagaagaagcaggacggcgccctgtacctgatggccgagagaatcgcctgggcccccgagggcaaggacagattcaccatcagccacatgtacgccgacatcaagtgccagaagatcagccccgagggcaaggccaagatccagctgcagctggtgctgcacgccggcgacaccaccaacttccacttcagcaacgagagcaccgccgtgaaggagagagacgccgtgaaggacctgctgcagcagctgctgcccaagttcaagagaaaggccaacaaggagctggaggagaagaacagaatgctgcaggaggaccccgtgctgttccagctgtacaaggacctggtggtgagccaggtgatcagcgccgaggagttctgggccaacagactgaacgtgaacgccaccgacagcagcagcaccagcaaccacaagcaggacgtgggcatcagcgccgccttcctggccgacgtgagaccccagaccgacggctgcaacggcctgagatacaacctgaccagcgacatcatcgagagcatcttcagaacctaccccgccgtgaagatgaagtacgccgagaacgtgccccacaacatgaccgagaaggagttctggaccagattcttccagagccactacttccacagagacagactgaacaccggcagcaaggacctgttcgccgagtgcgccaagatcgacgagaagggcctgaagaccatggtgagcctgggcgtgaagaaccccctgctggacctgaccgccctggaggacaagcccctggacgagggctacggcatcagcagcgtgcccagcgccagcaacagcaagagcatcaaggagaacagcaacgccgccatcatcaagagattcaaccaccacagcgccatggtgctggccgccggcctgagaaagcaggaggcccagaacgagcagaccagcgagcccagcaacatggacggcaacagcggcgacgccgactgcttccagcccgccgtgaagagagccaagctgcaggagagcatcgagtacgaggacctgggcaagaacaacagcgtgaagaccatcgccctgaacctgaagaagagcgacagatactaccacggccccacccccatccagagcctgcagtacgccaccagccaggacatcatcaacagcttccagagcatcagacaggagatggaggcctacacccccaagctgacccaggtgctgagcagcagcgccgccagcagcaccatcaccgccctgagccccggcggcgccctgatgcagggcggcacccagcaggccatcaaccagatggtgcccaacgacatccagagcgagctgaagcacctgtacgtggccgtgggcgagctgctgagacacttctggagctgcttccccgtgaacacccccttcctggaggagaaggtggtgaagatgaagagcaacctggagagattccaggtgaccaagctgtgccccttccaggagaagatcagaagacagtacctgagcaccaacctggtgagccacatcgaggagatgctgcagaccgcctacaacaagctgcacacctggcagagcagaagactgatgaagaagacctag

SEQ ID NO: 53244 - DNA, 288 bp, Artificial Sequence
  derived and/or modified sequence
atggccaccagcagcgaggaggtgctgctgatcgtgaagaaggtgagacagaagaagcaggacggcgccctgtacctgatggccgagagaatcgcctgggcccccgagggcaaggacagattcaccatcagccacatgtacgccgacatcaagtgccagaagatcagccccgagggcaaggccaagatccagctgcagctggtgctgcacgccggcgacaccaccaacttccacttcagcaacgagagcaccgccgtgaaggagagagacgccgtgaaggacctgtag

SEQ ID NO: 53245 - DNA, 1299 bp, Artificial Sequence
  derived and/or modified sequence
atgctgcaggaggaccccgtgctgttccagctgtacaaggacctggtggtgagccaggtgatcagcgccgaggagttctgggccaacagactgaacgtgaacgccaccgacagcagcagcaccagcaaccacaagcaggacgtgggcatcagcgccgccttcctggccgacgtgagaccccagaccgacggctgcaacggcctgagatacaacctgaccagcgacatcatcgagagcatcttcagaacctaccccgccgtgaagatgaagtacgccgagaacgtgccccacaacatgaccgagaaggagttctggaccagattcttccagagccactacttccacagagacagactgaacaccggcagcaaggacctgttcgccgagtgcgccaagatcgacgagaagggcctgaagaccatggtgagcctgggcgtgaagaaccccctgctggacctgaccgccctggaggacaagcccctggacgagggctacggcatcagcagcgtgcccagcgccagcaacagcaagagcatcaaggagaacagcaacgccgccatcatcaagagattcaaccaccacagcgccatggtgctggccgccggcctgagaaagcaggaggcccagaacgagcagaccagcgagcccagcaacatggacggcaacagcggcgacgccgactgcttccagcccgccgtgaagagagccaagctgcaggagagcatcgagtacgaggacctgggcaagaacaacagcgtgaagaccatcgccctgaacctgaagaagagcgacagatactaccacggccccacccccatccagagcctgcagtacgccaccagccaggacatcatcaacagcttccagagcatcagacaggagatggaggcctacacccccaagctgacccaggtgctgagcagcagcgccgccagcagcaccatcaccgccctgagccccggcggcgccctgatgcagggcggcacccagcaggccatcaaccagatggtgcccaacgacatccagagcgagctgaagcacctgtacgtggccgtgggcgagctgctgagacacttctggagctgcttccccgtgaacacccccttcctggaggagaaggtggtgaagatgaagagcaacctggagagattccaggtgaccaagctgtgccccttccaggagaagatcagaagacagtacctgagcaccaacctggtgagccacatcgaggagatgctgcagaccgcctacaacaagctgcacacctggcagagcagaagactgatgaagaagacctag

SEQ ID NO: 53246 - protein, 507 aa, Artificial Sequence
  derived and/or modified sequence
  misc_feature (1)..(1): Xaa can be any naturally occurring amino acid
XECPRGRSALLKGPPQEKPNRRSALLSVGEISELCPEITDFLCRDKKCIASHLLCDYKPDCSDRSDEAHCAHYTSTTGSCNFETSSGNWTTACSLTQDSEDDLDWAIGSRIPAKALIPDSDHTPGSGQHFLYVNSSGSKEGSVARITTSKSFPASLGMCTVRFWFYMIDPRSMGILKVYTIEESGLNILVWSVIGNKRTGWTYGSVPLSSNSPFKVAFEADLDGNEDIFIALDDISFTPECVTGGPVPVQPSPCEADQFSCIYTLQCVPLSGKCDGHEDCIDGSDEMDCPLSPTPPLCSNMEFPCSTDECIPSLLLCDGVPDCHFNEDELICSNKSCSNGALVCASSNSCIPAHQRCDGFADCMDFQLDESSCSECPLNYCRNGGTCVVEKNGPMCRCRQGWKGNRCHIKFNPPATDFTYAQNNTWTLLGIGLAFLMTHITVAVLCFLANRKVPIRKTEGSGNCAFVNPVYGNWSNPEKTESSVYSFSNPLYGTTSGSLETLSHHLK

SEQ ID NO: 53247 - protein, 258 aa, Artificial Sequence
  derived and/or modified sequence
LKFEGRVGKGQRGDIALDDIVLTENCLSLHDSVQEELAVPLPTGFCPLGYRECHNGKCYRLEQSCNFVDNCGDNTDENECGSSCTFEKGWCGWQNSQADNFDWVLGVGSHQSLRPPKDHTLGNENGHFMYLEATAVGLRGDKAHFRSTMWRESSAACTMSFWYFVSAKATGSIQILIKTEKGLSKVWQESKQNPGNHWQKADILLGKLRNFEVIFQGIRTRDLGGGAAIDDIEFKNCTTVGEISELCPEITDFLCRDK

SEQ ID NO: 53248 - protein, 1473 aa, Artificial Sequence
  derived and/or modified sequence
MFILKKSSSLWQVAKLQSPTFSQTGPGCILSFWFYNYGLSVGAAELQLHMENSHDSTVIWRVLYNQGKQWLEATIQLGRLSQPFHLSLDKVSLGIYDGVSAIDDIRFENCTLPLPAESCEGLDHFWCRHTRACIEKLRLCDLVDDCGDRTDEVNCAPELQCNFETGICNWEQDAKDDFDWTRSQGPTPTLNTGPMKDNTLGTAKGHYLYIESSEPQAFQDSAALLSPILNATDTKGCTFRFYYHMFGKRIYRLAIYQRIWSDSRGQLLWQIFGNQGNRWIRKHLNISSRQPFQILVEASVGDGFTGDIAIDDLSFMDCTLYPGNLPADLPTPPETSVPVTLPPHNCTDNEFICRSDGHCIEKMQKCDFKYDCPDKSDEASCVMEVCSFEKRSLCKWYQPIPVHLLQDSNTFRWGLGNGISIHHGEENHRPSVDHTQNTTDGWYLYADSSNGKFGDTADILTPIISLTGPKCTLVFWTHMNGATVGSLQVLIKKDNVTSKLWAQTGQQGAQWKRAEVFLGIRSHTQIVFRAKRGISYIGDVAVDDISFQDCSPLLSPERKCTDHEFMCANKHCIAKDKLCDFVNDCADNSDETTFICRTSSGRCDFEFDLCSWKQEKDEDFDWNLKASSIPAAGTEPAADHTLGNSSGHYIFIKSLFPQQPMRAARISSPVISKRSKNCKIIFHYHMYGNGIGALTLMQVSVTNQTKVLLNLTVEQGNFWRREELSLFGDEDFQLKFEGRVGKGQRGDIALDDIVLTENCLSLHDSVQEELAVPLPTGFCPLGYRECHNGKCYRLEQSCNFVDNCGDNTDENECGSSCTFEKGWCGWQNSQADNFDWVLGVGSHQSLRPPKDHTLGNENAILLMRRHKYPIRSVNLHTVKHVLKAQTVGNCSVSKLEARLLDFLSVPNENTFGSSDHTNWHFMYLEATAVGLRGDKAHFRSTMWRESSAACTMSFWYFVSAKATGSIQILIKRGRRRRRAPNPVLSGSPTIPRQGSQQLGGWRGGSARHRARAFPEPECPRGRSALLKGPPQEKPNRRSALLSVGEISELCPEITDFLCRDKKCIASHLLCDYKPDCSDRSDEAHCAHYTSTTGSCNFETSSGNWTTACSLTQDSEDDLDWAIGSRIPAKALIPDSDHTPGSGQHFLYVNSSGSKEGSVARITTSKSFPASLGMCTVRFWFYMIDPRSMGILKVYTIEESGLNILVWSVIGNKRTGWTYGSVPLSSNSPFKVAFEADLDGNEDIFIALDDISFTPECVTGGPVPVQPSPCEADQFSCIYTLQCVPLSGKCDGHEDCIDGSDEMDCPLSPTPPLCSNMEFPCSTDECIPSLLLCDGVPDCHFNEDELICSNKSCSNGALVCASSNSCIPAHQRCDGFADCMDFQLDESSCSDTWTLLGIGLAFLMTHITVAVLCFLANRKVPIRKTEGSGNCAFVNPVYGNWSNPEKTESSVYSFSNPLYGTTSGSLETLSHHLK

SEQ ID NO: 53249 - protein, 297 aa, Artificial Sequence
  derived and/or modified sequence
MEEPTAVEGQVQLPSPHQGSLRKAVAAALALDGESTMGHRKKKRKESRPESIIIYRSDNEKTDEEPGESEGGDQPKEEEGDDFLDYPVDDDMWNLPLDSRYVTLTGTITRGKKKGQMVDIHVTLTEKELQELTKPKESSRETTPEGRMACQMGADRGPHVVLWTLICLPVVFILSFVVSFYYGTITWYNIFLVYNEERTFWHKISYCPCLVLFYPVLIMAMASSLGLYAAVVQLSWSWEAWWQAARDMEKGFCGWLCSKLGLEDCSPYSIVELLESDNISSTLSNKDPIQEVETSTV

SEQ ID NO: 53250 - protein, 116 aa, Artificial Sequence
  derived and/or modified sequence
MEEPTAVEGQVQLPSPHQGSLRKAVAAALALDGESTMGHRKKKRKESRPESIIIYRSDNEKTDEEPGESEGGDQPKEEEGDDFLDYPVDDDMWNLPLDSRYVTLTGTITRGKKKGQ

SEQ ID NO: 53251 - protein, 102 aa, Artificial Sequence
  derived and/or modified sequence
MEEPTAVEGQVQLPSPHQGSLRKAVAAALALDGESTMGHRKKKRKESRPESIIIYRSDNEKTDEEPGESEGGDQPKEEEGDDFLDYPVDDDMWNLPLDSRYV

SEQ ID NO: 53252 - DNA, 894 bp, Artificial Sequence
  derived and/or modified sequence
atggaggagcccaccgccgtggagggccaggtgcagctgcccagcccccaccagggcagcctgagaaaggccgtggccgccgccctggccctggacggcgagagcaccatgggccacagaaagaagaagagaaaggagagcagacccgagagcatcatcatctacagaagcgacaacgagaagaccgacgaggagcccggcgagagcgagggcggcgaccagcccaaggaggaggagggcgacgacttcctggactaccccgtggacgacgacatgtggaacctgcccctggacagcagatacgtgaccctgaccggcaccatcaccagaggcaagaagaagggccagatggtggacatccacgtgaccctgaccgagaaggagctgcaggagctgaccaagcccaaggagagcagcagagagaccacccccgagggcagaatggcctgccagatgggcgccgacagaggcccccacgtggtgctgtggaccctgatctgcctgcccgtggtgttcatcctgagcttcgtggtgagcttctactacggcaccatcacctggtacaacatcttcctggtgtacaacgaggagagaaccttctggcacaagatcagctactgcccctgcctggtgctgttctaccccgtgctgatcatggccatggccagcagcctgggcctgtacgccgccgtggtgcagctgagctggagctgggaggcctggtggcaggccgccagagacatggagaagggcttctgcggctggctgtgcagcaagctgggcctggaggactgcagcccctacagcatcgtggagctgctggagagcgacaacatcagcagcaccctgagcaacaaggaccccatccaggaggtggagaccagcaccgtgtag

SEQ ID NO: 53253 - DNA, 351 bp, Artificial Sequence
  derived and/or modified sequence
atggaggagcccaccgccgtggagggccaggtgcagctgcccagcccccaccagggcagcctgagaaaggccgtggccgccgccctggccctggacggcgagagcaccatgggccacagaaagaagaagagaaaggagagcagacccgagagcatcatcatctacagaagcgacaacgagaagaccgacgaggagcccggcgagagcgagggcggcgaccagcccaaggaggaggagggcgacgacttcctggactaccccgtggacgacgacatgtggaacctgcccctggacagcagatacgtgaccctgaccggcaccatcaccagaggcaagaagaagggccagtag

SEQ ID NO: 53254 - DNA, 309 bp, Artificial Sequence
  derived and/or modified sequence
atggaggagcccaccgccgtggagggccaggtgcagctgcccagcccccaccagggcagcctgagaaaggccgtggccgccgccctggccctggacggcgagagcaccatgggccacagaaagaagaagagaaaggagagcagacccgagagcatcatcatctacagaagcgacaacgagaagaccgacgaggagcccggcgagagcgagggcggcgaccagcccaaggaggaggagggcgacgacttcctggactaccccgtggacgacgacatgtggaacctgcccctggacagcagatacgtgtag

SEQ ID NO: 53255 - DNA, 894 bp, Artificial Sequence
  derived and/or modified sequence
atggaggaacccaccgcagtggaggggcaagttcagttgccatcgccccatcagggttctctgcgcaaggccgtggcagccgcgttggcacttgacggcgagtctactatgggccaccggaagaaaaagagaaaggagagtcggcccgaatccattattatataccgatctgacaatgaaaagaccgatgaagaacccggggagagtgaaggaggggatcaaccgaaagaggaggagggagatgatttccttgattatccagtggacgacgacatgtggaatctccctctggatagccgttatgtgaccctgacaggtaccattacgcgtggcaaaaagaagggtcaaatggttgacatccatgtaaccctgactgagaaggagttacaagagttaacaaaaccaaaagagtccagtcgagagacaactccagagggtcgcatggcctgtcagatgggcgccgatagaggacctcacgttgtgctgtggactctgatctgtttgcctgtcgtttttatcctgagctttgtagtgagcttctattacggaacaatcacttggtataacatttttctggtctacaacgaagaacgcaccttttggcataagatctcctattgtccatgcctcgtgctgttttaccccgtgcttatcatggctatggcaagttcccttggcctatacgcagctgtggtgcagttaagctggtcctgggaagcatggtggcaggccgccagagacatggagaagggattttgcgggtggctgtgtagcaaactcggtctcgaggattgttctccatattccatcgtagagctgctggaaagcgacaatatctccagcaccttgtccaacaaggatcctatccaagaagtggaaacttccacagtttag

SEQ ID NO: 53256 - DNA, 894 bp, Artificial Sequence
  derived and/or modified sequence
atggaggagccaactgccgtggaaggccaggttcaactgccctctccacaccaagggtcgctcagaaaggccgtcgccgccgcactcgctctagatggtgagagcactatgggtcatcggaagaagaagagaaaggagagccggcctgaatctattattatttacagatccgataatgagaagacagatgaagagccaggcgagagtgaagggggggatcagcctaaggaggaggagggcgatgacttcttagactaccctgttgacgacgatatgtggaacctccccttggactcgcggtatgtcaccttaaccgggaccatcacacggggcaagaaaaaagggcaaatggtcgacattcatgtcaccctgaccgagaaagaactgcaggagttgaccaaacctaaggagagcagcagagagactacccccgagggtagaatggcttgccaaatgggagccgaccgagggccgcacgtggtgctctggacactgatttgccttcccgttgtgtttatactgtcctttgtcgtatcattttactacggtaccattacttggtacaacatattcctggtgtacaatgaagagcgtaccttctggcacaaaatttcttactgtccctgcctggtgctgttctacccagtgctcatcatggcgatggccagctctttgggcctatatgcggcagtcgtacagctctcctggagttgggaagcctggtggcaggctgcaagggatatggagaagggtttctgcggctggctatgctccaagttaggacttgaggactgcagcccatacagtatcgtggagcttctagagagtgacaatatcagtagcaccttgagcaacaaggatcccatccaggaagtggaaacctcaacagtgtag

SEQ ID NO: 53257 - DNA, 351 bp, Artificial Sequence
  derived and/or modified sequence
atggaggaaccaacagccgtcgaaggtcaggtgcagctgccttctcctcatcagggcagcctccgcaaggcagttgccgcggctttggcccttgacggggaatctaccatgggccacagaaagaaaaaacgtaaggaatccaggcccgagtccataatcatttatcggtccgataatgaaaagactgacgaggagccgggggagtccgagggcggggaccagccgaaggaggaggagggtgatgacttcctcgattatcctgtggacgatgacatgtggaacctgcccctggatagccgatatgtgaccctgacagggactatcactaggggaaaaaagaaagggcagtag

SEQ ID NO: 53258 - DNA, 894 bp, Artificial Sequence
  derived and/or modified sequence
atggaagaacctacagctgttgaggggcaggtgcagctccccagcccacaccagggatcactgcgaaaagccgtagccgccgctttagcgctagacggggaaagcaccatgggacatagaaaaaagaaaaggaaagagagccgaccagaaagcattatcatataccgatcagataacgagaagactgacgaggagccaggagaaagtgagggcggcgatcagcccaaagaggaggaaggcgatgatttcctagactaccccgttgacgacgatatgtggaaccttccactggacagccgttacgttacgctgacggggactattacgaggggcaaaaagaagggccagatggtggatatacacgttactctgactgagaaagaactccaagagctcaccaaacccaaagaatcctcccgcgagacaacaccagaaggcagaatggcctgtcagatgggcgctgatcgcggtccacacgtggtgttgtggaccctgatttgcctccctgtcgtgttcatcctgtccttcgtcgtctccttttactacggaaccattacctggtacaacatcttcctggtctacaacgaggaacggacattttggcacaagatctcttactgcccttgcctagtgttattttaccccgtgctgatcatggccatggcgagctctctcggtctttatgccgcggtggtacagctttcttggtcttgggaagcctggtggcaagcggctcgggacatggagaaaggattctgcgggtggctctgtagtaagttagggctcgaggactgttccccatacagtattgtggagctgttagaaagcgataacatctcctccactttatcaaacaaagatccaattcaggaggttgaaacctccacagtgtag

SEQ ID NO: 53259 - DNA, 894 bp, Artificial Sequence
  derived and/or modified sequence
atggaggaacccacagcagtagaaggacaggtgcagctgcctagcccgcatcagggctcactccgaaaagcagttgcggcagcactggccctggacggggaatccacaatgggtcatcgcaaaaagaaacggaaagagagcaggccagaatcgattattatctacaggtccgacaatgaaaagacagatgaagagccaggcgagtcagaggggggtgatcagcctaaagaagaagaaggcgacgattttctagattaccccgtcgacgatgatatgtggaacctgcctctcgacagtcggtatgtcactctcacaggcactataacacgaggtaagaagaagggccagatggtggacattcacgtgaccctgacggagaaagaactgcaagaactgacaaaaccgaaagagtcaagtagggagacaactccagaggggcggatggcgtgtcaaatgggcgccgacaggggtcctcacgttgtgctctggaccctgatttgcctccccgtcgttttcatcctgtcatttgtggtcagcttttattacgggacgatcacgtggtataatatcttcctggtttacaacgaggaacgtacgttctggcataagattagctattgtccctgcctggtcttattctatccagtactgataatggccatggcttcctcactggggttgtacgccgcagttgttcagctctcctggtcctgggaggcctggtggcaggcggccagggatatggaaaagggcttctgtgggtggttgtgcagcaagctcgggctggaggactgttcaccttattcaattgtggagctcctcgaatctgataacatctcaagtacgcttagtaacaaggaccctattcaagaggtggagactagcaccgtctag

SEQ ID NO: 53260 - DNA, 309 bp, Artificial Sequence
  derived and/or modified sequence
atggaggagcctaccgccgtggagggccaagttcagttacccagccctcatcaggggtctcttaggaaggctgttgctgccgcactagctttggacggtgagtccactatgggacaccgtaagaaaaagagaaaggaaagccgccccgagtccatcattatctatcgtagcgacaatgagaagaccgacgaggagccgggagagtcggaagggggagaccaacctaaagaggaagaaggtgacgacttcctggattacccagtagatgatgatatgtggaacctacctctggactctcgctacgtctag

SEQ ID NO: 53261 - DNA, 894 bp, Artificial Sequence
  derived and/or modified sequence
atggaggagcccacagctgtggagggccaggtgcagctgcccagcccccaccagggcagcctgaggaaggctgtggccgccgccctggccctggatggagagagcaccatgggccacaggaagaagaagaggaaggagagcaggcctgagagcatcatcatctacagaagtgacaatgagaagacagatgaggagcccggggagagcgagggcggggaccagcccaaggaggaggagggagatgacttcctggactaccctgtggatgatgacatgtggaacctgcccctggacagccgctacgtgaccctgaccggcaccatcacccggggcaagaagaagggccagatggtggacatccacgtgaccctgacagagaaggagctgcaggagctgaccaagcccaaggagagcagccgggagaccaccccagagggccgcatggcctgccagatgggcgctgaccggggcccccacgtggtgctgtggaccctcatctgcctgcctgtggtgttcatcctgagctttgtggtgtccttctactacggcaccatcacctggtacaacatcttcctggtgtacaatgaggagaggaccttctggcacaagatctcctactgcccctgcctggtgctcttctaccctgtgctgatcatggccatggccagcagcctgggcctgtatgctgctgtggtgcagctgtcctggagctgggaggcctggtggcaggccgcccgggacatggagaagggcttctgtggctggctgtgcagcaagctgggcctggaggactgcagcccctacagcatcgtggagctgctggagagtgacaacatcagcagcaccctgagcaacaaggaccccatccaggaggtggagaccagcacagtgtag

SEQ ID NO: 53262 - DNA, 351 bp, Artificial Sequence
  derived and/or modified sequence
atggaggagcccacagctgtggagggccaggtgcagctgcccagcccccaccagggcagcctgaggaaggctgtggccgccgccctggccctggatggagagagcaccatgggccacaggaagaagaagaggaaggagagcaggcctgagagcatcatcatctacagaagtgacaatgagaagacagatgaggagcccggggagagcgagggcggggaccagcccaaggaggaggagggagatgacttcctggactaccctgtggatgatgacatgtggaacctgcccctggacagccgctacgtgaccctgaccggcaccatcacccggggcaagaagaagggccagtag

SEQ ID NO: 53263 - DNA, 309 bp, Artificial Sequence
  derived and/or modified sequence
atggaggagcccacagctgtggagggccaggtgcagctgcccagcccccaccagggcagcctgaggaaggctgtggccgccgccctggccctggatggagagagcaccatgggccacaggaagaagaagaggaaggagagcaggcctgagagcatcatcatctacagaagtgacaatgagaagacagatgaggagcccggggagagcgagggcggggaccagcccaaggaggaggagggagatgacttcctggactaccctgtggatgatgacatgtggaacctgcccctggacagccgctacgtgtag

SEQ ID NO: 53264 - DNA, 894 bp, Artificial Sequence
  derived and/or modified sequence
atggaggagcccaccgccgtggagggccaggtgcagctgcccagcccgcatcaggggtctcttcgaaaggcggtagcggccgctttagccctggatggggaaagcacaatgggccacagaaaaaagaaaagaaaggaatctagaccagaaagtataatcatatatagatccgacaatgagaaaacggacgaagaacccggtgagtctgagggaggagaccagccgaaagaagaagagggagatgacttccttgactacccagtcgacgacgacatgtggaatctgccgcttgattcccgatacgtgacccttactggcaccattacgagagggaaaaaaaaaggccaaatggtggacattcatgttacgctgactgaaaaagagttacaagagttgaccaagcctaaagagtcttctcgcgaaactacacccgaagggaggatggcttgtcagatgggcgctgaccgcggcccccatgtagtgctgtggaccttaatctgtctgccggtagtattcatcctgagttttgtagtgtccttctattatggtacaatcacctggtataatatcttccttgtgtacaacgaggaacgtaccttttggcataagatcagttattgtccctgtttggtcctgttctatcccgtgctgattatggctatggcaagctccctggggttatatgcagccgtggttcagctgagttggtcctgggaggcttggtggcaggcagctagggatatggaaaagggtttttgcgggtggctatgtagcaaacttgggctggaggactgcagcccgtactcgatcgtggagcttcttgagagcgataacatttcctccaccctgagcaataaagatcctatccaggaagtggaaactagtactgtttag

SEQ ID NO: 53265 - DNA, 894 bp, Artificial Sequence
  derived and/or modified sequence
atggaggagcccaccgccgtggagggccaggtgcagctgcccagccctcatcagggcagcctgcgtaaagctgtggccgctgcactcgcactcgatggggaaagcactatggggcaccggaaaaagaagagaaaggagtcccgacccgagtccatcatcatctaccggtcggacaatgagaaaactgatgaagagcctggggaatctgaaggcggtgaccaacccaaagaagaagagggggatgacttcctggactaccctgtggatgacgatatgtggaacctgcctctggacagccgctacgtgacacttactgggaccatcacgcggggcaagaagaagggccagatggttgacatccacgtaacacttacggagaaggaactgcaggagttaaccaaaccaaaagagtcttctcgggagacaacaccggaaggtcggatggcatgccagatgggcgctgataggggaccgcacgtagtactctggaccctgatctgcttgccggttgttttcatcctgagtttcgtagtcagtttctactacgggaccattacctggtacaatatttttctcgtttataacgaggagagaacattctggcacaagatttcttattgtccatgcctggttttgttttaccccgtgttaataatggccatggccagttctctcggtctttatgcggctgtggtccaactttcttggtcctgggaagcctggtggcaggccgcacgcgacatggaaaagggattttgcggctggctctgcagcaagttaggtttggaagattgctccccttatagcattgtggaactgctggagagtgataatatctcctctacactttccaataaggaccctatacaggaagtcgaaacatccacagtatag

SEQ ID NO: 53266 - DNA, 351 bp, Artificial Sequence
  derived and/or modified sequence
atggaggagcccaccgccgtggagggccaggtgcagctgcccagccctcaccaggggtccttgcggaaagctgtggccgccgccctcgccctcgacggcgagagcaccatgggacaccgaaaaaagaagcggaaggagtcccgccctgaaagcataatcatctatcgtagtgacaacgagaaaaccgatgaagagccaggtgagtctgagggtggcgatcagccgaaggaggaggagggcgatgatttcttggactatccagtggatgatgacatgtggaacctcccactggactctagatatgtcacacttactgggactatcacgcgtggaaagaaaaagggccagtag

SEQ ID NO: 53267 - DNA, 894 bp, Artificial Sequence
  derived and/or modified sequence
atggaggagcccaccgccgtggagggccaggtgcagctgcccagccctcatcagggatccttgcgcaaggctgtagccgcagcacttgcactggacggagagagtacgatgggtcatcgcaagaaaaagagaaaagaaagtaggcctgagagcatcattatctaccggtccgataatgagaaaactgacgaggaaccaggggagagcgaaggaggtgatcaacccaaggaggaagagggtgatgatttcctcgattaccccgttgatgatgacatgtggaacctcccccttgacagtcgatacgtgacactcactggaacgattaccagggggaagaagaagggccagatggtggacattcacgtaacattaacagagaaagagttgcaggaactcaccaaacccaaagagagtagtagggagaccaccccagagggaaggatggcctgtcagatgggtgcagatcgcggaccccacgtagtgctctggaccctcatctgcttgcccgtggtgtttatactttctttcgtggtcagcttttactacggaaccatcacctggtacaacatctttctggtgtacaacgaagagcgcacattctggcataagatcagctattgtccgtgcttagtgctattctacccagtgctcattatggcaatggcctcctctctcggtttatacgcagcagtcgtgcaactctcttggtcctgggaagcatggtggcaggctgcaagggacatggagaagggcttctgcggatggttgtgctcaaagttgggattggaggactgctccccctatagcatagttgaactgctggagagcgataatatcagcagtacactgtcaaataaagacccaattcaggaagtagagacaagcacagtctag

SEQ ID NO: 53268 - DNA, 894 bp, Artificial Sequence
  derived and/or modified sequence
atggaggagcccaccgccgtggagggccaggtgcagctgcccagcccgcaccaaggatctctgagaaaggcggttgcggctgccctggcccttgacggagagtctaccatgggccacagaaagaaaaaaagaaaggaaagtagaccagaatctatcattatttatcggtcagataatgaaaagacagacgaggaacccggggagtccgagggaggagatcaacccaaagaagaagaaggagatgattttctggattatccggtcgacgacgacatgtggaatctaccgctggactcgcggtacgtcaccctaaccggtacaatcacccggggcaagaagaagggacagatggtagacattcatgtgacactgacagagaaggagctccaggagttaacgaagcccaaagaatcatcgagggagaccacgccagaagggcgtatggcctgtcagatgggagctgacaggggcccacatgtcgttctctggactctgatctgtctgcctgtggtcttcattctatcgtttgtggtaagcttctactatggaaccattacatggtataacatattcctggtctataatgaagaacgcaccttctggcacaagatatcatactgcccttgtctggttcttttttatcccgtgctcattatggcgatggctagcagtttagggttgtacgctgccgtcgtgcaactgagttggagctgggaagcctggtggcaagctgcccgtgacatggaaaaaggcttctgcggctggctctgttctaaactgggtctcgaagattgctctccctacagcatcgttgagttactggagagtgataatatttccagcactctgagtaacaaggacccgattcaggaagtggaaacaagcacagtgtag

SEQ ID NO: 53269 - DNA, 309 bp, Artificial Sequence
  derived and/or modified sequence
atggaggagcccaccgccgtggagggccaggtgcagctgcccagccctcaccagggaagcctccgtaaagccgtggcagccgcattagccttagatggtgagtcaaccatgggccataggaagaagaagcggaaggagtcgcggccagagagtatcattatttaccgcagtgacaatgagaagacagatgaggaacctggcgaatctgaggggggggatcagccgaaggaggaggagggcgacgacttcctagattacccagtcgatgacgatatgtggaacctacccctggattccaggtacgtgtag

SEQ ID NO: 53270 - DNA, 894 bp, Artificial Sequence
  derived and/or modified sequence
atggaggagccgaccgcggtggagggtcaggtgcaactgcccagtcctcaccagggaagcctgcgcaaagctgtagccgcagccctggcacttgatggggagagcaccatgggtcaccggaaaaagaagagaaaagaaagcaggccagagtctattatcatttatagaagcgacaatgagaagaccgacgaagagcccggtgaaagcgaaggcggtgatcagcccaaagaagaggagggcgacgacttcctcgattacccggtggatgatgacatgtggaacttacctctggattcaagatatgtgaccctcactgggacaattaccagaggcaaaaaaaagggccaaatggttgacatccatgtgactctgactgaaaaagagttgcaggaactgaccaagcccaaagaatcctcccgagaaacaacaccggaagggaggatggcatgtcagatgggagccgatcggggtccacacgtggtgttatggaccctcatctgcttacccgtggtgtttatactgagtttcgtggtgagcttttactacggaacaatcacctggtacaacatctttctggtctataacgaggaacgcacattctggcataagatttcttattgtccttgcctggtactgttctaccctgtgttgataatggcgatggcctcttcgttaggcctgtatgcagccgtggtccaactgagttggtcctgggaggcctggtggcaagccgctcgcgatatggagaaagggttttgcgggtggctctgctctaaacttggcctcgaagactgctccccgtattccatcgtggagcttctggaatcggataacataagttctacgttatctaacaaggaccccatccaagaagtggaaaccagtacagtgtag

SEQ ID NO: 53271 - DNA, 894 bp, Artificial Sequence
  derived and/or modified sequence
atggaagaaccgaccgccgtggaaggccaggtgcagctgccctctccacaccaggggtcattgagaaaagctgttgccgctgcattagctttggacggagagagtactatggggcatcgaaaaaagaagcgcaaggaatccagaccagaatcaattatcatatatcgcagtgataatgagaaaacagatgaagagcccggagaatctgagggtggtgaccagccaaaagaggaggaaggcgacgatttcttggattatccggtcgatgatgacatgtggaatctgcccctggatagccgatatgtgaccctaactggaacgattacacggggtaaaaagaagggccaaatggtcgatatccacgtcactctcaccgaaaaggagctacaggaactaaccaagcccaaagaatcctctcgcgagactacgcccgaaggcagaatggcctgtcagatgggagccgaccgcggaccccatgtggtcttgtggacactgatctgccttccagtggtgttcatcctctcttttgtagtgtcattttattacggtactatcacctggtataacatttttctggtgtacaacgaggaacggacgttctggcataaaatttcatactgcccttgcctagtgctgttttaccccgtgcttattatggccatggcttcctcattaggtctttacgcagcagtagtgcagttgtcatggtcgtgggaagcctggtggcaggctgcacgagatatggaaaagggcttctgcgggtggctgtgcagtaaactcggactggaggattgttcaccctattccatagttgaactcttggaatcggataatatcagctccacattgtcaaataaagaccccattcaagaggtcgaaacatccacagtctag

SEQ ID NO: 53272 - DNA, 351 bp, Artificial Sequence
  derived and/or modified sequence
atggaggagcctactgctgttgaaggtcaggtacagttaccgtccccacaccagggttccctgcggaaagcggtagcggcagcgttagccctggatggcgagtctaccatgggccatagaaaaaaaaagcgcaaggaatcaagacccgagtctataattatctaccgcagtgataatgagaagacagatgaggaaccaggggagagcgaaggtggagatcagccaaaagaggaagaaggcgacgactttctagattatccagtggacgacgacatgtggaacctgccgttggactcccggtacgttaccctgaccggaactataacacggggtaaaaagaaaggtcaatag

SEQ ID NO: 53273 - DNA, 894 bp, Artificial Sequence
  derived and/or modified sequence
atggaggagcccaccgccgtggaagggcaagtgcaattgcccagcccacaccaaggctctttgcggaaggctgttgcagctgctctcgccctggatggggaatcaactatgggccatcgcaagaagaaacgcaaagagagtagacctgagagcataattatctatcgaagtgataacgaaaagacagatgaggaacctggcgagtcagaaggtggagaccaaccgaaggaggaggagggagatgacttcctggattaccccgtggatgacgatatgtggaacctgcccttagactccagatacgtgacgctgactggtaccatcacccggggaaaaaagaagggccaaatggtggacattcatgtcaccctcaccgagaaagaactgcaggagctaacgaaacccaaagagtcatcccgtgagacaacacccgaagggagaatggcctgccagatgggggctgacaggggaccccatgtggtcttatggaccctcatctgtctgcctgtcgtcttcatcctgtcattcgtagtgtccttctattatggaacgattacctggtacaatatcttcttagtgtataacgaggaaaggacattctggcataaaatcagttactgtccctgccttgtcctgttttacccagttctcatcatggccatggcttccagccttgggctttatgcagccgtagtgcaactgtcctggagctgggaggcatggtggcaagctgccagagatatggaaaaggggttttgcgggtggctttgctcgaaactaggccttgaagactgttcgccctatagcatcgtggaactccttgagtccgacaatatctcctcaacactgtcgaataaggacccgatccaggaggttgaaacatctacagtgtag

SEQ ID NO: 53274 - DNA, 894 bp, Artificial Sequence
  derived and/or modified sequence
atggaggaacccacagccgtcgagggacaagtccagctcccctctccgcatcagggttccctcagaaaggctgtggctgctgcgctggcacttgacggcgagagtacaatggggcataggaaaaaaaaacggaaagagtctcggccagaaagcattatcatctatcgctccgacaatgaaaagaccgacgaggagccaggcgagtcggagggaggagaccagccgaaagaagaagagggcgacgactttctcgattacccggtggatgacgatatgtggaatctgcctctagattccaggtatgtgaccctcacaggtactattactcgcggtaaaaagaagggccagatggtcgacattcatgtgacactcaccgagaaggagctgcaggagttgaccaaacccaaagaaagtagtagggaaacaacacccgaaggcagaatggcctgtcagatgggggcagatagaggtccacatgtagtactatggacactgatctgtctccccgttgtctttattctgagtttcgtagtatctttttattatgggactatcacctggtataacatcttcctagtctataacgaggagcggacgttctggcacaagatttcttactgcccatgcctggtgctgttttacccagtgctaattatggcgatggctagtagccttggcctatacgcagccgtggtgcagctctcttggtcatgggaagcctggtggcaagccgcacgcgacatggagaaagggttctgtggttggctgtgttcaaagctggggttagaggactgctcgccctactctattgtggagctattggagtcagataatattagttctacactcagcaacaaagacccaatccaggaggtcgagaccagtaccgtatag

SEQ ID NO: 53275 - DNA, 309 bp, Artificial Sequence
  derived and/or modified sequence
atggaggagcccaccgcagtggagggccaagtgcagctgccctcccctcatcagggctccctcaggaaggcggtcgcagctgctctagcattggacggcgagtctacaatgggacaccgcaagaagaagcggaaagaatctcggccagagtctataattatatatagatcggacaatgaaaaaaccgatgaggaaccaggtgagtctgagggcggagaccagccaaaggaagaggagggtgacgatttcctcgactaccctgtcgacgacgatatgtggaatctcccccttgactccaggtacgtatag

SEQ ID NO: 53276 - DNA, 3342 bp, Artificial Sequence
  derived and/or modified sequence
ggcaaagccgcatcctcccggagcagaaccgctccccgccggctgtccgcaacctccgccagcgtcggtccctgggcaggtgtggaatgcatccttgggacatctttgcatagccccatctaggaagaagttctgtgatgtgtgaactgtgagtttactcaaacaagtccaactctttataagacataggtagacgtcaggtctggaatggaagagccaacagcagtagaaggccaggtccagcttccaagcccccaccagggctctctcaggaaggctgtggctgctgccctggcgctggatggggaatccacaatggggcacaggaaaaagaagaggaaagagtcacgcccagaatccatcatcatctaccgctcagacaatgagaaaacagatgaggagcccggagaatcagaaggtggagatcagcctaaagaggaggagggagatgatttcctagactatcctgtggatgatgatatgtggaacctgcctctggacagccgctacgtcaccttaactgggaccatcacacgagggaagaaaaagggtcagatggtggacatccatgtcacattgacagagaaagagctgcaggaactgaccaaacctaaagagtcatcaagggaaacgacgcctgaaggaagaatggcctgccagatgggagctgaccgtgggccccatgtggtcctctggacgctgatctgcctgcctgtggttttcatcctttcttttgttgtctctttctactacggcactatcacctggtacaacatcttcctcgtgtataatgaggaaaggaccttctggcacaagatctcgtattgcccttgcctcgttctcttctatccagtgctcatcatggccatggcttcttccctcggcctctacgctgctgtggtccagctctcgtggtcctgggaagcatggtggcaagctgcccgggacatggagaaaggcttctgtggctggctctgcagcaagctgggtctggaggactgttctccctacagcattgtggagttgcttgaatccgacaatatctcaagcactctctccaacaaggaccccatccaagaagtagaaacctccacggtctaaactcccaacaacttactccctcctctggccccagtagcctatatatcatcttaaaattccagcagattatttctttaaattaccccctactctccgcagttcttctgggaaatcagagtccatactgatcagttttaccatcttgagggttccaggagggcatggagcagacaagcaattgtgccaaagcagttcacccaatggacaaactctttttgattccctgccctaaaatcaccatttatttaggacaatggaactctgctgtgtgtcgttttgggagcctggaagtgttactggtgcctggaactgaggggagtatgtgactaaatgtgtcagggagaataaagaacctcggggtaaccaaatccaccaagataatagacagggatggagtgagacatttaggaagctggactaccacagtgtagcagaaggtaaagatttgtgtgtatcatttagatttagatttagctgcatagaattaaaaccctaaaatatcagtggcttaaacaagatagaagtgtatttctttcttgtgcagaagaagtctggaggcagaccatcctgggaccctgtgaagtaatccaggtcccaggcttcttctatttctctaccattagtaggatgtgacccttctcacccttatccccaacatcccagtgctgattacatcttcagccatcacatccatgtttctgataaaatagaggaaagggcagagaagcacacacccttcctgttcaaggagacttcccagaagtcccactcgattcttcttatatctcattggcaagacctcagtcacatgatgtcatgagcaaaagaggctggaaatgtagttgtttggctgggtagctatattctcagctaaatactgggttcacgctaattggcaagaaaaaggaagaatggttatttgggttttgttttgttttgttttgtttcgctttagagacggagtctcactctgttgccgaggctggagtgcagtggcactatctcggctcactgcaaccttcgcctcctgggttcaagcaattcttgtgccttggcctccccagtagctgggattacaggtgcgtgccaccatacccggctaatttttgtattttttttttagtagagatggggtttcaccatgtgcccaggctggtcttgaactcctgacctcaggtgatccgcctgcctcggcctcccaaaatgctgggattgtaggcaagaatggttatcttggtaggcaagtcagaatctttgcctcacaatgatcatttaaatacattcagaacccccaaactgctaatatggttttatttatttatttattcattcatttgtttattcatttatttatttaggcctgaatcttacacagagaatttatatatagatattagctacatatactttgaatatgctatacatcgatattagcacctcacgtactttgcaattaagcttctgtaatgtcatgtgatttgtttttggaaaggaatagtggacaggagagtacaatttataatagtagcataactctttgtcctggtggtggaggtgggacgaggtggtgatatttaacctagattaaagaccaggaagggaggaattgcatctgccaaagtttcctccaacagcgatcagtagccctaagtacaaagaagccagatttagccttctgttgtttggcaaaacctcactcagagctttactccctcagacctttctgagtttaaccacagacatgatctttgctgtgctgagaaacttgtgtctacctggcctgtagggagtgtaaactagattaatacagattaacagactctgaacttaaaaaaaaaaatcactcctaagggtgtccttctaatttcaaaatatcaactcctaagaggtcagcagaatttggagatttgggtccttataagaatagctggtgctcttttcttgttcatgtctcaaaacaaagctgttgagagaactgctgcgatgaatcaaaccagaggagtttgtcatgctccccacagagagcccaggacatttgcctgatgtatggtgctgagctccaccttcagaggaactctctcttttttttttttttaaataactattattagcttgacaagaaaaaaaaagtgcccaacagttttagtgttaatcttggtgctctatggtgcattagcagagatatgaacaattaaatgaagacaaagaaaataaaaataaagtctgattaacttttgctca

SEQ ID NO: 53277 - DNA, 3174 bp, Artificial Sequence
  derived and/or modified sequence
agaaccgctccccgccggctgtccgcaacctccgccagcgtcggtccctgggcaggtgtgggtgagactgctcgttcgtttctttaaatttcgatgccattggggagggtggaagggaaatgcaaaaaaaaaaaaagaagaagaaagaaacaagcagggtgtgctctatttcaaaaattcaatcctcagggctgaagctctcacgattaattaaaattaaatctccagtgcagctggaaaaagaaaggctgctgctcggcgccctcgctgcgcccgcctgccggggtcggacgtcggcgatgctgtggctccaggtggaatgcatccttgggacatctttgcatagccccatctaggaagaagttctgtgatgtgtgaactgtgagtttactcaaacaagtccaactctttataagacataggtagacgtcaggtctggaatggaagagccaacagcagtagaaggccaggtccagcttccaagcccccaccagggctctctcaggaaggctgtggctgctgccctggcgctggatggggaatccacaatggggcacaggaaaaagaagaggaaagagtcacgcccagaatccatcatcatctaccgctcagacaatgagaaaacagatgaggagcccggagaatcagaaggtggagatcagcctaaagaggaggagggagatgatttcctagactatcctgtggatgatgatatgtggaacctgcctctggacagccgctacgtcaccttaactgggaccatcacacgagggaagaaaaagggtcagatggtggacatccatgtcacattgacagagaaagagctgcaggaactgaccaaacctaaagagtcatcaagggaaacgacgcctgaaggaagaatggcctgccagatgggagctgaccgtgggccccatgtggtcctctggacgctgatctgcctgcctgtggttttcatcctttcttttgttgtctctttctactacggcactatcacctggtacaacatcttcctcgtgtataatgaggaaaggaccttctggcacaagatctcgtattgcccttgcctcgttctcttctatccagtgctcatcatggccatggcttcttccctcggcctctacgctgctgtggtccagctctcgtggtcctgggaagcatggtggcaagctgcccgggacatggagaaaggcttctgtggctggctctgcagcaagctgggtctggaggactgttctccctacagcattgtggagttgcttgaatccgacaatatctcaagcactctctccaacaaggaccccatccaagaagtagaaacctccacggtctaaactcccaacaacttactccctcctctggccccagtagcctatatatcatcttaaaattccagcagattatttctttaaattaccccctactctccgcagttcttctgggaaatcagagtccatactgatcagttttaccatcttgagggttccaggagggcatggagcagacaagcaattgtgccaaagcagttcacccaatggacaaactctttttgattccctgccctaaaatcaccatttatttaggacaatggaactctgctgtgtgtcgttttgggagcctggaagtgttactggtgcctggaactgaggggagtatgtgactaaatgtgtcagggagaataaagaacctcggggtaaccaaatccaccaagataatagacagggatggagtgagacatttaggaagctggactaccacagtgtagcagaaggtaaagatttgtgtgtatcatttagatttagatttagctgcatagaattaaaaccctaaaatatcagtggcttaaacaagatagaagtgtatttctttcttgtgcagaagaagtctggaggcagaccatcctgggaccctgtgaagtaatccaggtcccaggcttcttctatttctctaccattagtaggatgtgacccttctcacccttatccccaacatcccagtgctgattacatcttcagccatcacatccatgtttctgataaaatagaggaaagggcagagaagcacacacccttcctgttcaaggagacttcccagaagtcccactcgattcttcttatatctcattggcaagacctcagtcacatgatgtcatgagcaaaagaggctggaaatgtagttgtttggctgggtagctatattctcagctaaatactgggttcacgctaattggcaagaaaaaggaagaatggttatttgggttttgttttgttttgttttgtttcgctttagagacggagtctcactctgttgccgaggctggagtgcagtggcactatctcggctcactgcaaccttcgcctcctgggttcaagcaattcttgtgccttggcctccccagtagctgggattacaggtgcgtgccaccatacccggctaatttttgtattttttttttagtagagatggggtttcaccatgtgcccaggctggtcttgaactcctgacctcaggtgatccgcctgcctcggcctcccaaaatgctgggattgtaggcaagaatggttatcttggtaggcaagtcagaatctttgcctcacaatgatcatttaaatacattcagaacccccaaactgctaatatggttttatttatttatttattcattcatttgtttattcatttatttatttaggcctgaatcttacacagagaatttatatatagatattagctacatatactttgaatatgctatacatcgatattagcacctcacgtactttgcaattaagcttctgtaatgtcatgtgatttgtttttggaaaggaatagtggacaggagagtacaatttataatagtagcataactctttgtcctggtggtggaggtgggacgaggtggtgatatttaacctagattaaagaccaggaagggaggaattgcatctgccaaagtttcctccaacagcgatcagtagccctaagtacaaagaagccagatttagccttctgttgtttggcaaaacctcactcagagctttactccctcagacctttctgagtttaaccacagacatgatctttgctgtgctgagaaacttgtgtctacctggcctgtagggagtgtaaactagattaatacagattaacagactctgaacttaaaaaaaaaaa

SEQ ID NO: 53278 - DNA, 584 bp, Artificial Sequence
  derived and/or modified sequence
ggcccggccccgccccgcccgccggccgcggcaaagccgcatcctcccggagcagaaccgctccccgccggctgtccgcaacctccgccagcgtcggtccctgggcaggtggaatgcatccttgggacatctttgcatagccccatctaggaagaagttctgtgatgtgtgaactgtgagtttactcaaacaagtccaactctttataagacataggtagacgtcaggtctggaatggaagagccaacagcagtagaaggccaggtccagcttccaagcccccaccagggctctctcaggaaggctgtggctgctgccctggcgctggatggggaatccacaatggggcacaggaaaaagaagaggaaagagtcacgcccagaatccatcatcatctaccgctcagacaatgagaaaacagatgaggagcccggagaatcagaaggtggagatcagcctaaagaggaggagggagatgatttcctagactatcctgtggatgatgatatgtggaacctgcctctggacagccgctacgtcaccttaactgggaccatcacacgagggaagaaaaagggtcagat

SEQ ID NO: 53279 - DNA, 1634 bp, Artificial Sequence
  derived and/or modified sequence
ggccgcggcaaagccgcatcctcccggagcagaaccgctccccgccggctgtccgcaacctccgccagcgtcggtccctgggcaggtgtgggtggaatgcatccttgggacatctttgcatagccccatctaggaagaagttctgtgatgtgtgaactgtgagtttactcaaacaagtccaactctttataagacataggtagacgtcaggtctggaatggaagagccaacagcagtagaaggccaggtccagcttccaagcccccaccagggctctctcaggaaggctgtggctgctgccctggcgctggatggggaatccacaatggggcacaggaaaaagaagaggaaagagtcacgcccagaatccatcatcatctaccgctcagacaatgagaaaacagatgaggagcccggagaatcagaaggtggagatcagcctaaagaggaggagggagatgatttcctagactatcctgtggatgatgatatgtggaacctgcctctggacagccgctacgtcaccttaactgggaccatcacacgagggaagaaaaagggtcagatggtggacatccatgtcacattgacagagaaagagctgcaggaactgaccaaacctaaagagtcatcaagggaaacgacgcctgaaggaagaatggcctgccagatgggagctgaccgtgggccccatgtggtcctctggacgctgatctgcctgcctgtggttttcatcctttcttttgttgtctctttctactacggcactatcacctggtacaacatcttcctcgtgtataatgaggaaaggaccttctggcacaagatctcgtattgcccttgcctcgttctcttctatccagtgctcatcatggccatggcttcttccctcggcctctacgctgctgtggtccagctctcgtggtcctgggaagcatggtggcaagctgcccgggacatggagaaaggcttctgtggctggctctgcagcaagctgggtctggaggactgttctccctacagcattgtggagttgcttgaatccgacaatatctcaagcactctctccaacaaggaccccatccaagaagtagaaacctccacggtctaaactcccaacaacttactccctcctctggccccagtagcctatatatcatcttaaaattccagcagattatttctttaaattaccccctactctccgcagttcttctgggaaatcagagtccatactgatcagttttaccatcttgagggttccaggagggcatggagcagacaagcaattgtgccaaagcagttcacccaatggacaaactctttttgattccctgccctaaaatcaccatttatttaggacaatggaactctgctgtgtgtcgttttgggagcctggaagtgttactggtgcctggaactgaggggagtatgtgactaaatgtgtcagggagaataaagaacctcggggtaaccaaatccaccaagataatagacagggatggagtgagacatttaggaagctggactaccacagtgtagcagaaggtaaagatttgtgtgtatcatttagatttagatttagctgcatagaattaaaaccctaaaatatcagtggcttaaacaagatagaa

SEQ ID NO: 53280 - DNA, 3460 bp, Artificial Sequence
  derived and/or modified sequence
ggcccggccccgccccgcccgccggccgcggcaaagccgcatcctcccggagcagaaccgctccccgccggctgtccgcaacctccgccagcgtcggtccctgggcaggtgtggtgcagctggaaaaagaaaggctgctgctcggcgccctcgctgcgcccgcctgccggggtcggacgtcggcgatgctgtggctccaggtggaatgcatccttgggacatctttgcatagccccatctaggaagaagttctgtgatgtgtgaactgtgagtttactcaaacaagtccaactctttataagacataggtagacgtcaggtctggaatggaagagccaacagcagtagaaggccaggtccagcttccaagcccccaccagggctctctcaggaaggctgtggctgctgccctggcgctggatggggaatccacaatggggcacaggaaaaagaagaggaaagagtcacgcccagaatccatcatcatctaccgctcagacaatgagaaaacagatgaggagcccggagaatcagaaggtggagatcagcctaaagaggaggagggagatgatttcctagactatcctgtggatgatgatatgtggaacctgcctctggacagccgctacgtcaccttaactgggaccatcacacgagggaagaaaaagggtcagatggtggacatccatgtcacattgacagagaaagagctgcaggaactgaccaaacctaaagagtcatcaagggaaacgacgcctgaaggaagaatggcctgccagatgggagctgaccgtgggccccatgtggtcctctggacgctgatctgcctgcctgtggttttcatcctttcttttgttgtctctttctactacggcactatcacctggtacaacatcttcctcgtgtataatgaggaaaggaccttctggcacaagatctcgtattgcccttgcctcgttctcttctatccagtgctcatcatggccatggcttcttccctcggcctctacgctgctgtggtccagctctcgtggtcctgggaagcatggtggcaagctgcccgggacatggagaaaggcttctgtggctggctctgcagcaagctgggtctggaggactgttctccctacagcattgtggagttgcttgaatccgacaatatctcaagcactctctccaacaaggaccccatccaagaagtagaaacctccacggtctaaactcccaacaacttactccctcctctggccccagtagcctatatatcatcttaaaattccagcagattatttctttaaattaccccctactctccgcagttcttctgggaaatcagagtccatactgatcagttttaccatcttgagggttccaggagggcatggagcagacaagcaattgtgccaaagcagttcacccaatggacaaactctttttgattccctgccctaaaatcaccatttatttaggacaatggaactctgctgtgtgtcgttttgggagcctggaagtgttactggtgcctggaactgaggggagtatgtgactaaatgtgtcagggagaataaagaacctcggggtaaccaaatccaccaagataatagacagggatggagtgagacatttaggaagctggactaccacagtgtagcagaaggtaaagatttgtgtgtatcatttagatttagatttagctgcatagaattaaaaccctaaaatatcagtggcttaaacaagatagaagtgtatttctttcttgtgcagaagaagtctggaggcagaccatcctgggaccctgtgaagtaatccaggtcccaggcttcttctatttctctaccattagtaggatgtgacccttctcacccttatccccaacatcccagtgctgattacatcttcagccatcacatccatgtttctgataaaatagaggaaagggcagagaagcacacacccttcctgttcaaggagacttcccagaagtcccactcgattcttcttatatctcattggcaagacctcagtcacatgatgtcatgagcaaaagaggctggaaatgtagttgtttggctgggtagctatattctcagctaaatactgggttcacgctaattggcaagaaaaaggaagaatggttatttgggttttgttttgttttgttttgtttcgctttagagacggagtctcactctgttgccgaggctggagtgcagtggcactatctcggctcactgcaaccttcgcctcctgggttcaagcaattcttgtgccttggcctccccagtagctgggattacaggtgcgtgccaccatacccggctaatttttgtattttttttttagtagagatggggtttcaccatgtgcccaggctggtcttgaactcctgacctcaggtgatccgcctgcctcggcctcccaaaatgctgggattgtaggcaagaatggttatcttggtaggcaagtcagaatctttgcctcacaatgatcatttaaatacattcagaacccccaaactgctaatatggttttatttatttatttattcattcatttgtttattcatttatttatttaggcctgaatcttacacagagaatttatatatagatattagctacatatactttgaatatgctatacatcgatattagcacctcacgtactttgcaattaagcttctgtaatgtcatgtgatttgtttttggaaaggaatagtggacaggagagtacaatttataatagtagcataactctttgtcctggtggtggaggtgggacgaggtggtgatatttaacctagattaaagaccaggaagggaggaattgcatctgccaaagtttcctccaacagcgatcagtagccctaagtacaaagaagccagatttagccttctgttgtttggcaaaacctcactcagagctttactccctcagacctttctgagtttaaccacagacatgatctttgctgtgctgagaaacttgtgtctacctggcctgtagggagtgtaaactagattaatacagattaacagactctgaacttaaaaaaaaaaatcactcctaagggtgtccttctaatttcaaaatatcaactcctaagaggtcagcagaatttggagatttgggtccttataagaatagctggtgctcttttcttgttcatgtctcaaaacaaagctgttgagagaactgctgcgatgaatcaaaccagaggagtttgtcatgctccccacagagagcccaggacatttgcctgatgtatggtgctgagctccaccttcagaggaactctctcttttttttttttttaaataactattattagcttgacaagaaaaaaaaagtgcccaacagttttagtgttaatcttggtgctctatggtgcattagcagagatatgaacaattaaatgaagacaaagaaaataaaaataaagtctgattaacttttgctc

SEQ ID NO: 53281 - DNA, 578 bp, Artificial Sequence
  derived and/or modified sequence
agaaccgctccccgccggctgtccgcaacctccgccagcgtcggtccctgggcaggtgtggtgcagctggaaaaagaaaggctgctgctcggcgccctcgctgcgcccgcctgccggggtcggacgtcggcgatgctgtggctccaggtggaatgcatccttgggacatctttgcatagccccatctaggaagaagttctgtgatgtgtgaactgtgagtttactcaaacaagtccaactctttataagacataggtagacgtcaggtctggaatggaagagccaacagcagtagaaggccaggtccagcttccaagcccccaccagggctctctcaggaaggctgtggctgctgccctggcgctggatggggaatccacaatggggcacaggaaaaagaagaggaaagagtcacgcccagaatccatcatcatctaccgctcagacaatgagaaaacagatgaggagcccggagaatcagaaggtggagatcagcctaaagaggaggagggagatgatttcctagactatcctgtggatgatgatatgtggaacctgcctctggacagccgctacgt

SEQ ID NO: 53282 - DNA, 477 bp, Artificial Sequence
  derived and/or modified sequence
atgagcagcgccatcgagagaaagagcctggaccccagcgaggagcccgtggacgaggtgctgcagatcccccccagcctgctgacctgcggcggctgccagcagaacatcggcgacagatacttcctgaaggccatcgaccagtactggcacgaggactgcctgagctgcgacctgtgcggctgcagactgggcgaggtgggcagaagactgtactacaagctgggcagaaagctgtgcagaagagactacctgagactgttcggccaggacggcctgtgcgccagctgcgacaagagaatcagagcctacgagatgaccatgagagtgaaggacaaggtgtaccacctggagtgcttcaagtgcgccgcctgccagaagcacttctgcgtgggcgacagatacctgctgatcaacagcgacatcgtgtgcgagcaggacatctacgagtggaccaagatcaacggcatgatctag

SEQ ID NO: 53283 - DNA, 477 bp, Artificial Sequence
  derived and/or modified sequence
atgtcgagtgccattgagcgcaagagtctcgacccgagtgaggaaccggtggatgaggtgctgcagatcccaccttctctgttaacatgtggcggctgccagcagaatattggggataggtacttccttaaagcgatcgatcagtattggcacgaggattgcctgtcttgtgacttgtgcggatgtcgtctgggggaagtcggacggagactgtattacaaattaggtcggaaactatgcagaagggattatctaagactcttcgggcaggatgggctgtgcgcctcttgcgataaaaggatcagggcgtatgagatgactatgcgggtgaaggataaggtttaccatctggaatgtttcaaatgcgctgcgtgtcagaaacacttctgcgtcggtgaccgctatctgctcatcaatagcgacatcgtttgcgaacaggatatatacgagtggacaaagattaatggcatgatttag

SEQ ID NO: 53284 - DNA, 477 bp, Artificial Sequence
  derived and/or modified sequence
atgagcagcgccattgaaaggaagagcctggaccccagcgaggagcctgtggatgaggtgctgcagatcccccccagcctgctgacctgtggcggctgccagcagaacattggagaccgctacttcctgaaggccatcgaccagtactggcatgaggactgcctgagctgtgacctgtgtggctgccgcctgggggaggtgggcagaagactctactacaagctgggcaggaagctgtgcagaagagactacctgcggctgtttggccaggacggcctgtgtgccagctgtgacaagaggatccgggcctatgagatgaccatgagggtgaaggacaaggtgtaccacctggagtgcttcaagtgtgccgcctgccagaagcacttctgtgtgggggaccgctacctgctgatcaacagcgacatcgtgtgtgagcaggacatctatgagtggaccaagatcaatggcatgatctag

SEQ ID NO: 53285 - DNA, 477 bp, Artificial Sequence
  derived and/or modified sequence
atgagcagcgccatcgagcggaagagcctggaccccagcgaggagcccgtggacgaggtactgcagatcccaccctccctcctgacctgcggaggatgtcagcaaaacatcggcgacagatactttttgaaggcaattgaccagtattggcacgaggattgcctcagttgtgatctctgtgggtgccggttaggcgaggtcggtagacgtttgtactacaaacttggcagaaagctctgtagacgggattatttacgactgttcggacaggatgggctgtgtgcatcgtgtgacaagcggatcagagcatacgagatgaccatgcgggtaaaagataaagtttatcatctggagtgcttcaagtgtgctgcctgtcagaagcacttctgtgtaggcgatcgctatttgctcattaattcagatatcgtgtgcgagcaagacatatatgaatggactaaaatcaacgggatgatatag

SEQ ID NO: 53286 - DNA, 477 bp, Artificial Sequence
  derived and/or modified sequence
atgtcaagcgcaatcgagcggaagtctctcgacccttctgaggaaccggtggacgaagtcctgcagatcccaccaagcttgctgacatgcggcggatgtcagcaaaatatcggagacagatattttcttaaggccatagatcagtactggcatgaggactgcctgtcttgtgacttatgcggatgccgactgggggaggtcggccgacggttgtattacaagttgggtcgcaagttatgccgaagggattatctaagattgtttgggcaagatgggctgtgcgctagttgtgacaagcggattagagcatatgagatgaccatgcgcgtgaaggataaagtgtaccatctcgaatgttttaagtgtgccgcttgccagaaacatttttgtgttggcgaccggtatttgctgatcaattctgacattgtgtgtgaacaggatatttacgagtggaccaagatcaatggtatgatctag

SEQ ID NO: 53287 - DNA, 3868 bp, Artificial Sequence
  derived and/or modified sequence
gtttccggtggctcgtcgcgctcgctcactccagctgcagccactctcgcccgtggctgcttcctccatcctggtattttttggagcttccatcctggttcttccaaagtgcccggacccaaaacaggaaagtgttgcggagataggaacatgggagagaaacaatctgggtaacatgaaagtgatgctggttgctaagggaaggcaacttgattctgtgggaagggctgtagctgatccatccgttgtctagatttgagtatgagcacagtggaagaggattctgacacagtaacagtagaaactgtgaactctgtgactttgactcaggacacagaagggaatctcattcttcactgccctcagaatgtttcagaaaatgatcagagctttgaagtgaccatgactgcaaccacagaagtagcagatgatgaggttactgaggggactgtgacacagatacagattttgcagaatgagcaactagatgaaatatctcccttgggtaacgaggaagtttcagcagttagccaagcatggtttacaactaaagaagataaggattctctgactaataaaggacataaatggaagcaggggatgtggtccaaggaagaaattgatattttgatgaacaatattgaacgctatcttaaggcacgcggaataaaagatgctacagaaatcatctttgagatgtcaaaagacgaaagaaaagatttctacaggactatagcatggggtctgaaccggcctttgtttgcagtttatagaagagtgcttcgcatgtatgatgacagaaaccatgtgggaaaatatacacctgaagaaattgagaagctcaaggagaaaaaggcaattgctgcctgtttttttttcacccacagacaactgtggaccccaaaaaaaggccacactttcaaactttggctctcaaagtattgctgcccacaacttccaaaccagtcaaatgggaagaagaagaatgaagaataaatgatgaaattaaaagggagaaaacaattgaaccaaatgctgattggcagactcttgttttaggctccggataaagcatggcaatgactgggcaacaataggggcggcgctaggaagaagtgcatcttctgtcaaagatcggtgccgactgatgaaggatacttgcaacacagggaagtggacagaagaagaagaaaagagacttgcagaagtggttcatgagttgacaagcactgagccaggtgacatagtcacacagggtgtgtcttgggcagctgtggctgaacgagtcggtacccgctcagaaaagcaatgtcgttctaaatggctcaactacctgaattggaaacagagtgggggtactgaatggaccaaggaagatgaaatcaatctcatcctcaggatagcagaacttgatgtagctgatgaaaatgacattaactgggatctgttagctgagggatggagtagtgtccgttcaccacaatggctacgaagtaaatggtggaccatcaaaaggcaaattgcaaaccataaggatgtttcgttccctgatggtggtctgtcggagaatcaatgttctttttgtctacccatctcccttcagtcttaataaaaggtcttaaacagttacatgagaaccaaaaaaacaacccaacgcttttggagaataaatcaggatctggagttccaaacagtaataccaattccagtgtgcagcatgttcagataagagttgcccgcttggaagataatacagccatctcttctagccccatggcagcattgcagattccagtccagatcacccatgtttcttcagcagactctcctgctaccgttgactcagaaacaataacactaaacagtggaacactacagacatttgagattcttccctctttccatctacagcccactggcactccaggcacctacctacttcaaacaagctcaagccaaggccttcccctaactctgactgctagtcccacagtaaccctgacagctgctgctcctgcttctcctgaacagattattgttcatgctttatccccagaacatttgttgaacacaagtgataatgttacagtgcagtgtcacacaccaagagtcatcattcagactgttgccacagaggacatcacttcttccatatcccaagcagaactgacagtcgatagtgatattcagtcatctgattttcctgagcctccagacgccctagaagcagacactttcccagatgaaattcatcaccctaagatgactgtggagccatcatttaatgatgctcatgtatccaaattcagtgaccaaaatagcacagaactgatgaatagtgttatggtcagaacagaagaagaaatctctgacaccgaccttaaacaagaggaatcaccctctgatttagccagtgcttatgttactgagggtttagagtctcccactatagaagaacaagttgatcaaacaattgatgatgaaacaatacttatcgttccttcaccacatggctttatccaggcatctgatgttatagatactgaatctgtcttgcctttgacaacactaacagatcccatactccaacatcatcaggaagaatcaaatatcattggatcatccttgggcagtcctgtttcagaagattcaaaggatgtcgaagatttggtaaactgtcattagaataattcttagaaataggcagttcaagcaaagaaggcacactgttaattacaacctcttcaaagaaataggagcaacccccaagaggcttaatttaccaatttaaatagccacagtccttaagccacacacattgttgctgctatgactttttacctcctttaaacacatcatctgaggttgagttttatgacagtatgtagttgagtggaggctgggagttttaagcataaatccctgtttagtgttacatgggaataaggaatttcattcacttcagccactaagaaaagtttagaatcacgaaagcttaactgctgtggtttaaagtacagtttctctaaagatcagacatggcactgtctcctctcaagcctggttgtagttcagatgagtcttttcaacatggtcttcaacatggtctagagcttaccagtgatcttctgatcttcaagaagactaagtttgagacttgaccagcatacaagtatagagacctaggaggtggtcttgtggtggtacatttggttaacccattgctggcagtgggagctgatttaggcagggtaaacaggaaagcattaaaagttaaaattcactacaggttttttgttacttttaaagggaatatggataagcatagtaacaaaacccaccagaatctaagcagttttcaccccctcagaaaccactgtcattagtttacaaagttagcactttgaagtaaaactaaatgaggaaggaagtaatgttacctatccttgataccatgaccatttattagatgttttgctatataaattaccgagagaatagtttgtcatccacttagtgtgttagctggtggggtacaatataacctctcatctcaggctattttaaaaaaacaatatttgcttctataacaaaaggaaacaaatctaagaatcattcctgtactacagaagggttaaggcaaaggtagccttttgggctttttaatgaatatgacccctatagaaaagtcaagaaaaaaaaacccttgtataaattattttatttattattgtaattagatcttcacaaagttgtcttttcactgtgttttgtcaacgtgaaattaaattgtagttataagcaaaagttggttgcctagggaacaattgtatattcagtttaacagaaataaaagaatatttgtctt

SEQ ID NO: 53288 - protein, 370 aa, Artificial Sequence
  derived and/or modified sequence
MNCEREQLRGNQEAAAAPDTMAQPYASAQFAPPQNGIPAEYTAPHPHPAPEYTGQTTVPEHTLNLYPPAQTHSEQSPADTSAQTVSGTATQTDDAAPTDGQPQTQPSENTENKSQPKRLHVSNIPFRFRDPDLRQMFGQFGKILDVEIIFNERGSKGFGFVTFENSADADRAREKLHGTVVEGRKIEVNNATARVMTNKKTVNPYTNGWKLNPVVGAVYSPEFYAVPGFPYPAATAAAAYRGAHLRGRGRTVYNTFRAAAPPPPIPAYGGVVYQDGFYGADIYGGYAAYRYAQPTPATAAAYSDSYGRVYAADPYHHALAPAPTYGVGAMNAFAPLTDAKTRSHADDVGLVLSSLQASIYRGGYNRFAPY

SEQ ID NO: 53289 - DNA, 2196 bp, Artificial Sequence
  derived and/or modified sequence
tccggctctcctttgtttattttctaatctatatttttactggaagatttcctctttattctctcccgccctcctacaagcgctcttgctggccgtctgggtgcacacaccgctccctcgatcaccccagcccccttcctggtctcccgagcgcggggtttgaaggtcacctcctttccagtccccgtgcgagccgcgctgccgccgcctcctccagccagagtcggtgggactggctgcgctgccctgaagtggttctccaagcagcgcggagggtggcggacggcggacggagcccaggggccgcgtcgggtggggaaacccgaactcgcggaggggaatccctccccctccgccccagccccccagcagcacccgcggtggggcgggggcgctctgccagccccgggaacagcagaggcggcggcactggctggacccacgcgcgcgcctccggggctgaagaaggaaggagtgagccgagccgagcaccccacatctggaggggacagccagccgtgggccccgccccggcgtccggagcaggagaactccgagcttcttgcccaggcagagagagcaggagcggaccgcgcgcccgggattgagagtccttgcgctccagacccccacccagtggccgccagggtccccgcctgtccggaccctcgccgcgcccaggcaggcgcgccagggcggggctgacctgcccgcgaagttgcggacagtgcgtgagaaaccagcacccccttccgccgcctccagcttatggtgagtgtggctgggggtgcagagagcgcacgggaattcgggggtctggggccgagaacgtgaccgcagccgggctcgccgggagttctaggaaactggtcaaagaactcatgcaagtggaacttacagcttccttgatcggactcagcattcagatatcaaagcagactgcaatacctgcgtggaaatagaagacagaaaggtttcaagacaacagatgaattgtgaaagagagcagctaaggggtaatcaggaagcagccgctgcccctgacacaatggctcagccttacgcttcggcccagtttgctcccccgcagaacggtatccccgcggaatacacggcccctcatccccaccccgcgccagagtacacaggccagaccacggttcccgagcacacattaaacctgtaccctcccgcccagacgcactccgagcagagcccggcggacacgagcgctcagaccgtctctggcaccgccacacagacagatgacgcagcaccgacggatggccagccccagacacaaccttctgaaaacacggaaaacaagtctcagcccaagcggctgcatgtctccaatatccccttcaggttccgggatccggacctcagacaaatgtttggtcaatttggtaaaatcttagatgttgaaattatttttaatgagcgaggctcaaagggatttggtttcgtaactttcgaaaatagtgccgatgcggacagggcgagggagaaattacacggcaccgtggtagagggccgtaaaatcgaggtaaataatgccacagcacgtgtaatgacaaataaaaagaccgtcaacccttatacaaatggctggaaattgaatccagttgtgggtgcagtctacagtcccgaattctatgcagtgccaggcttcccgtatccagcagccaccgccgcggccgcctaccgaggggcgcacctgcgaggccgcggtcgcaccgtgtacaacaccttcagggccgcggcgcccccgcccccgatcccggcctacggcggtgttgtttaccaggatggattttatggtgcagacatttatggtggttatgctgcataccgctacgcccagcctacccctgccactgccgctgcctacagtgacagttacggacgagtttatgctgccgacccctaccaccacgcacttgctccagcccccacctacggcgttggtgccatgaatgcttttgcacctttgactgatgccaagactaggagccatgctgatgatgtgggtctcgttctttcttcattgcaggctagtatataccgagggggatacaaccgttttgctccatactaaatgacaaaaccataaaaaccttccaatgtggggagaaaggaagctttccgaggcctgagtattgcaatacatgcagtagtacatcattttagcaa

SEQ ID NO: 53290 - DNA, 1113 bp, Artificial Sequence
  derived and/or modified sequence
atgaattgtgagagggagcagttgcggggtaatcaggaggctgcagccgctccggacacgatggctcaaccttacgcctccgcgcagttcgcacctccacagaacggaatcccagccgagtacaccgctccacaccctcatcctgctcccgaatacacaggccagacaacagtgccagaacacacattaaacttgtatccgcccgctcagacccactcagaacagagccctgcggatacaagcgcccaaacagtgagcggcacagcaacccagacagatgacgctgcccccaccgatgggcaacctcaaacccagccgtcagaaaacactgagaataagtctcaacccaagcgactccatgtctcaaacattcccttcagattcagagaccccgacttacgccagatgtttgggcagttcggtaagatcctagacgtggaaattatctttaacgaacgggggtctaagggctttggattcgtcacctttgagaattccgcagacgccgaccgtgccagggagaagctgcacgggactgtggtggaagggaggaaaatcgaggtaaataatgcaaccgctagagtgatgacaaataagaaaactgtgaatccctacaccaacggttggaaactgaacccagttgttggagctgtgtacagtcccgaattctacgccgtccccggattcccgtatccagccgcaacagctgctgctgcctacaggggcgcccatttgagaggccggggtaggacagtctacaacacgtttcgtgcagcagctcctcctccccctatccccgcttacgggggcgtggtttatcaggacggattttatggcgccgacatctacggcggctatgcagcttataggtacgcccagccaacccccgccactgctgccgcttatagtgatagctatggcagggtgtacgccgctgatccgtaccaccatgcacttgcccctgctccgacctatggcgtgggagcgatgaatgcattcgcacccctgaccgatgccaaaacccggtcacacgctgatgacgttggtttggtgctctctagcctacaggcgagcatctaccgcggtggatacaacagattcgctccatactag

SEQ ID NO: 53291 - DNA, 1113 bp, Artificial Sequence
  derived and/or modified sequence
atgaactgtgagcgggagcagctgcggggcaaccaggaggccgccgccgccccagacaccatggcccagccctatgccagcgcccagtttgccccaccccagaatggcatcccagctgagtacacagccccccacccccacccagcccctgagtacacaggccagaccaccgtgcctgagcacaccctgaacctgtaccccccagcccagacccacagcgagcagagccctgctgacaccagcgcccagacagtgtctggaacagccacccagacagatgatgctgcccccacagatggccagccccagacccagcccagcgagaacacagagaacaagagccagcccaagaggctgcacgtgagcaacatccccttccgcttccgggaccctgacctgcggcagatgtttggccagtttgggaagatcctggatgtggagatcatcttcaatgaaagaggcagcaagggcttcggctttgtgacctttgagaacagcgcagatgctgaccgggcccgggagaagctgcatggaacagtggtggagggcaggaagattgaggtgaacaatgccacagcccgggtgatgaccaacaagaagacagtgaacccctacaccaacggctggaagctgaaccctgtggtgggcgctgtgtacagccctgagttctatgctgtgcccggcttcccctacccagctgccacagctgctgctgcctacagaggagcccacctgcggggccggggccgcacagtgtacaacaccttccgggctgctgcccctcctccacccatcccagcctacggcggcgtggtgtaccaggacggcttctacggggctgacatctatggaggctatgctgcctaccgctatgcccagcccaccccagccacagctgctgcctacagcgacagctatggccgggtgtatgctgctgacccctaccaccacgccctggccccagcccccacctatggagtgggcgccatgaatgcctttgcccccctgacagatgccaagaccaggagccatgctgatgatgtgggcctggtgctgagcagcctgcaggccagcatctaccggggcggctacaacagatttgccccctactag

SEQ ID NO: 53292 - DNA, 1113 bp, Artificial Sequence
  derived and/or modified sequence
atgaactgcgagcgggagcagctgcggggcaaccaggaggccgccgccgctcctgacacgatggcgcaaccatatgcctcggcacagttcgcaccaccccaaaatggcatccctgctgaatacacagcaccccacccgcacccagcacctgagtacacgggacagactaccgtacctgagcacaccctgaacttatatccaccggctcaaacacactccgagcagtcccccgcagatacctctgcacaaaccgtgtccgggacagccacgcagacagacgatgctgcaccgacggacggccagccccagacacaaccatcagagaataccgagaataagtcccagcctaaacgtctgcatgtcagtaatatccccttccggttcagggaccctgacctgaggcaaatgtttggacagtttgggaagattctggatgtggagataattttcaacgagcgtggcagtaagggattcggctttgttacctttgaaaactctgctgatgctgaccgggctcgagaaaagctacacgggacagtagtcgaggggcggaaaatcgaagtgaacaacgcaacagctagggtcatgaccaacaagaagacagtaaatccatataccaatggatggaagctgaaccccgtggtcggcgccgtgtattcaccagaattttatgccgtccctggatttccatatccagctgctacggctgctgcggcttatcggggagctcatctcaggggacgcggacgcacggtctataacacctttagagccgctgccccaccaccccctattcccgcatacggaggcgtcgtgtatcaggatggattctacggggccgacatctacgggggctacgcagcctataggtacgcccagcccacccccgcaactgcagccgcatactccgacagttacggtcgtgtttatgctgctgacccttaccatcacgcccttgcgcctgcaccaacatacggggtgggtgcgatgaatgcatttgctcctctgaccgatgccaagacacgctcacacgccgatgacgtcggtctggtcctgtcatctctacaggcctcgatttacaggggcgggtacaaccgatttgccccatactag

SEQ ID NO: 53293 - DNA, 1113 bp, Artificial Sequence
  derived and/or modified sequence
atgaactgtgagagggaacagctgcggggaaatcaggaggcggctgctgcgcctgacacaatggctcagccatacgcttcagctcagtttgccccaccacagaatgggatcccagccgagtacaccgcccctcaccctcacccagcacccgagtacaccggccaaaccaccgtccccgaacacacattaaacctgtacccccctgctcagacacacagcgagcagtcccccgcagacaccagtgctcagactgtttcaggaactgccacacagacggatgatgcggcaccaacagacggtcaaccgcagacccaaccctccgaaaacacagagaacaagtcccagccaaaacgcctgcacgtttctaatatccccttcagatttagagatccagacctgaggcagatgttcgggcagttcggcaaaatcctggatgtggagataatcttcaatgaacgagggtctaagggtttcgggtttgtcaccttcgagaacagcgcagatgctgatcgcgcacgtgaaaagcttcatggcaccgtcgtcgaaggccgaaagatcgaagtgaataatgccactgcacgagtgatgaccaataaaaaaacggtgaatccatataccaacggctggaagctgaaccctgtggtgggggcagtgtactcccccgagttctatgcagtgccgggttttccctatcccgctgcaactgcagctgccgcatatagaggtgctcacctgcgagggagggggcgtactgtatacaatactttcagggccgctgccccacctccccctatccccgcttatggcggagtggtctaccaagacggtttctacggagccgatatctacggcggatatgccgcataccgctacgcacaacccactccggctacggccgctgcctattccgattcatatggaagagtctacgcggctgacccataccatcacgctctggcaccagccccaacatacggggtcggagccatgaatgcattcgctcccctgacagatgccaagacccgcagccatgcggatgacgttggtcttgtactgagttcactgcaggcatcaatttacaggggcggatataatagattcgcaccttactag

SEQ ID NO: 53294 - DNA, 1113 bp, Artificial Sequence
  derived and/or modified sequence
atgaactgcgagagagagcagctgagaggcaaccaggaggccgccgccgcccccgacaccatggcccagccctacgccagcgcccagttcgcccccccccagaacggcatccccgccgagtacaccgccccccacccccaccccgcccccgagtacaccggccagaccaccgtgcccgagcacaccctgaacctgtacccccccgcccagacccacagcgagcagagccccgccgacaccagcgcccagaccgtgagcggcaccgccacccagaccgacgacgccgcccccaccgacggccagccccagacccagcccagcgagaacaccgagaacaagagccagcccaagagactgcacgtgagcaacatccccttcagattcagagaccccgacctgagacagatgttcggccagttcggcaagatcctggacgtggagatcatcttcaacgagagaggcagcaagggcttcggcttcgtgaccttcgagaacagcgccgacgccgacagagccagagagaagctgcacggcaccgtggtggagggcagaaagatcgaggtgaacaacgccaccgccagagtgatgaccaacaagaagaccgtgaacccctacaccaacggctggaagctgaaccccgtggtgggcgccgtgtacagccccgagttctacgccgtgcccggcttcccctaccccgccgccaccgccgccgccgcctacagaggcgcccacctgagaggcagaggcagaaccgtgtacaacaccttcagagccgccgccccccccccccccatccccgcctacggcggcgtggtgtaccaggacggcttctacggcgccgacatctacggcggctacgccgcctacagatacgcccagcccacccccgccaccgccgccgcctacagcgacagctacggcagagtgtacgccgccgacccctaccaccacgccctggcccccgcccccacctacggcgtgggcgccatgaacgccttcgcccccctgaccgacgccaagaccagaagccacgccgacgacgtgggcctggtgctgagcagcctgcaggccagcatctacagaggcggctacaacagattcgccccctactag

SEQ ID NO: 53295 - protein, 397 aa, Artificial Sequence
  derived and/or modified sequence
MNCEREQLRGNQEAAAAPDTMAQPYASAQFAPPQNGIPAEYTAPHPHPAPEYTGQTTVPEHTLNLYPPAQTHSEQSPADTSAQTVSGTATQTDDAAPTDGQPQTQPSENTENKSQPKRLHVSNIPFRFRDPDLRQMFGQFGKILDVEIIFNERGSKGFGFVTFENSADADRAREKLHGTVVEGRKIEVNNATARVMTNKKTVNPYTNGWKLNPVVGAVYSPEFYAGTVLLCQANQEGSSMYSAPSSLVYTSAMPGFPYPAATAAAAYRGAHLRGRGRTVYNTFRAAAPPPPIPAYGGVVYQDGFYGADIYGGYAAYRYAQPTPATAAAYSDSYGRVYAADPYHHALAPAPTYGVGAMNAFAPLTDAKTRSHADDVGLVLSSLQASIYRGGYNRFAPY

SEQ ID NO: 53296 - DNA, 1513 bp, Artificial Sequence
  derived and/or modified sequence
gtgcatttgtgttgtgggggcatggggtgcatttgtgtgtatatatgtgtggatgtagggtgcgtttgtctgtgtgtatttgtgtgggcatggagtgcatttgcgttgcgggggtgtggagtgtgtttgtgtgtgtgcacacgcacatggttctcatggtcctcccgttttcaactgaacctgtaattagctcctcagagaccaggtttcaagacaacagatgaattgtgaaagagagcagctaaggggtaatcaggaagcagccgctgcccctgacacaatggctcagccttacgcttcggcccagtttgctcccccgcagaacggtatccccgcggaatacacggcccctcatccccaccccgcgccagagtacacaggccagaccacggttcccgagcacacattaaacctgtaccctcccgcccagacgcactccgagcagagcccggcggacacgagcgctcagaccgtctctggcaccgccacacagacagatgacgcagcaccgacggatggccagccccagacacaaccttctgaaaacacggaaaacaagtctcagcccaagcggctgcatgtctccaatatccccttcaggttccgggatccggacctcagacaaatgtttggtcaatttggtaaaatcttagatgttgaaattatttttaatgagcgaggctcaaagggatttggtttcgtaactttcgaaaatagtgccgatgcggacagggcgagggagaaattacacggcaccgtggtagagggccgtaaaatcgaggtaaataatgccacagcacgtgtaatgacaaataaaaagaccgtcaacccttatacaaatggctggaaattgaatccagttgtgggtgcagtctacagtcccgaattctatgcaggcacggtcctgttgtgccaggccaaccaggagggatcttccatgtacagtgcccccagttcacttgtatatacttctgcaatgccaggcttcccgtatccagcagccaccgccgcggccgcctaccgaggggcgcacctgcgaggccgcggtcgcaccgtgtacaacaccttcagggccgcggcgcccccgcccccgatcccggcctacggcggtgttgtttaccaggatggattttatggtgcagacatttatggtggttatgctgcataccgctacgcccagcctacccctgccactgccgctgcctacagtgacagttacggacgagtttatgctgccgacccctaccaccacgcacttgctccagcccccacctacggcgttggtgccatgaatgcttttgcacctttgactgatgccaagactaggagccatgctgatgatgtgggtctcgttctttcttcattgcaggctagtatataccgagggggatacaaccgttttgctccatactaaatgacaaaaccataaaaaccttccaatgtggggagaaaggaagctttccgaggcctgagtattgcaatacatgcagtagtacatcattttagcaactct

SEQ ID NO: 53297 - DNA, 1194 bp, Artificial Sequence
  derived and/or modified sequence
atgaattgcgagcgcgaacaactgcggggcaaccaggaggccgcagctgccccagatacgatggcacagccatatgcaagtgcacagtttgccccacctcagaatgggatcccagctgaatacactgccccgcacccccatccagcaccggagtacacaggacaaactactgtgcctgagcatactctgaatctctaccctccggctcagacccactcagagcagagtccagcagacacttccgcacaaaccgtttcaggtaccgcaactcagactgatgatgccgctcccaccgacggtcagcctcaaacgcaaccgagtgagaacactgagaacaagagtcagccaaagcggttgcacgtctctaatattcctttccgatttagagatccagacttgcggcaaatgtttgggcagtttggaaaaatcctggacgtggaaatcatattcaacgagcgcggaagcaaaggtttcggcttcgtaacttttgaaaactcagcagacgcagacagggcccgcgagaaactccatggtactgttgtcgaaggtcggaaaattgaagtgaataatgccaccgcaagagtaatgaccaataaaaagactgtcaacccttacacaaacgggtggaaactaaaccccgtggttggtgccgtctactcaccagagttttatgctggcactgtgctactttgccaagctaaccaggaagggagttctatgtacagtgcaccctccagcctggtgtacacaagcgcaatgcccggatttccctatcctgccgccaccgccgctgccgcctacaggggggcacatctcagaggcaggggcagaaccgtatacaacacttttagggccgccgctccaccccctccgatccccgcctatgggggggtcgtttaccaggacggcttttacggggcagatatctacggaggatacgctgcatacagatacgctcagccgacaccagcgaccgccgctgcctacagcgatagctatggcagggtgtacgcagccgacccgtaccaccatgccttggctcctgctcccacatatggagtgggtgccatgaacgctttcgctccactcaccgacgcaaaaacacgcagccatgcagatgatgttggtctcgttctcagctcactacaggctagtatttataggggtgggtacaacaggttcgctccatactag

SEQ ID NO: 53298 - DNA, 1194 bp, Artificial Sequence
  derived and/or modified sequence
atgaactgcgagcgggagcagctgcggggcaaccaggaggcagcggctgctcccgatactatggcacaaccgtacgcttcagcccaattcgcccctcctcagaacggcataccagcagaatacaccgccccgcacccacaccctgctcctgaatacaccggacagacaaccgtacccgagcacactctcaatctgtatccccccgctcagacacatagtgagcagtcacccgctgatacaagcgcccagacagtctccggaacggcaacacagaccgacgatgcagcccccaccgatggacagccacagacacagcccagcgagaacacagaaaacaagtcccagcctaaacgccttcatgttagcaacatacctttcaggttccgggacccagatttacggcaaatgttcggccagtttggtaaaatcctcgacgtcgagataattttcaacgagagaggatcaaagggctttggattcgttacatttgagaatagcgctgacgccgaccgggcccgggaaaaactgcatggaactgtggtagaggggcggaaaatagaagtcaataacgccacagcccgggtcatgaccaataaaaagactgtcaacccgtataccaacgggtggaagttgaatcccgtagtgggggctgtttactcacccgagttttatgctggaacggtgctcttatgtcaggcgaatcaagagggctcttccatgtattctgctccaagcagtttggtgtatacatcagccatgccggggtttccatatccagctgctacagccgccgccgcataccggggagcacacctccgcggcagaggcaggactgtctacaacaccttccgcgctgcggccccacccccccctattccagcgtatgggggggtggtctaccaggacggattttatggagcagacatttacggagggtatgctgcttacagatacgcccagcctacacctgcaaccgccgctgcctattctgactcctacggccgggtctacgcagccgacccatatcaccacgcgctcgctccagcccccacctatggcgtgggcgcaatgaacgctttcgcacctctgaccgacgcaaaaacgcgtagccacgccgatgatgtggggttagtgttaagctccttacaggccagtatatacagagggggatacaaccgcttcgcaccctattag

SEQ ID NO: 53299 - DNA, 792 bp, Artificial Sequence
  derived and/or modified sequence
atgaactgcgaaagagagcagttacgtgggaatcaggaggccgctgctgctcccgacactatggcccagccatatgcctctgcacaattcgcaccccctcagaacggaatacccgccgaatacaccgcgccacatccacatcccgcacctgagtacaccggccagaccactgtccccgagcacactttaaatctctatcccccagcgcaaacacactccgagcagtcacctgccgataccagcgctcagaccgtgtcaggaacagccacccagacagacgatgccgcacccaccgatgggcagccccaaacccagccctctgaaaatacggagaacaaaagtcaacccaagcgcctccacgtaagtaatatccccttccgcttcagggatccagatttgcgtcagatgtttggacagtttgggaaaatcctcgatgttgagattattttcaacgaaagaggaagcaaaggctttgggttcgttacattcgagaattccgccgacgccgaccgagctcgggagaagttgcatggaacagtggtcgaaggtagaaagatcgaggtgaataatgcgacagcacgcgttatgaccaataagaaaactgtgaacccctataccaatggctggaaactcaaccccgtggtcggcgccgtgtactcccccgagttctacgccggaaccgtactattatgtcaggccaatcaagagggttcatccatgtattccgccccctctagtctggtctacacaagcgcaatgccaggtttcccttacccagccgcaacagcctag

SEQ ID NO: 53300 - DNA, 1194 bp, Artificial Sequence
  derived and/or modified sequence
atgaactgtgagcgggagcagctgcggggcaaccaggaggccgccgccgccccagacaccatggcccagccctatgccagcgcccagtttgccccaccccagaatggcatcccagctgagtacacagccccccacccccacccagcccctgagtacacaggccagaccaccgtgcctgagcacaccctgaacctgtaccccccagcccagacccacagcgagcagagccctgctgacaccagcgcccagacagtgtctggaacagccacccagacagatgatgctgcccccacagatggccagccccagacccagcccagcgagaacacagagaacaagagccagcccaagaggctgcacgtgagcaacatccccttccgcttccgggaccctgacctgcggcagatgtttggccagtttgggaagatcctggatgtggagatcatcttcaatgaaagaggcagcaagggcttcggctttgtgacctttgagaacagcgcagatgctgaccgggcccgggagaagctgcatggaacagtggtggagggcaggaagattgaggtgaacaatgccacagcccgggtgatgaccaacaagaagacagtgaacccctacaccaacggctggaagctgaaccctgtggtgggcgctgtgtacagccctgagttctacgccggcaccgtgctgctgtgccaggccaaccaggagggcagctccatgtacagcgcccccagcagcctggtgtacaccagcgccatgcctggcttcccctacccagctgccacagctgctgctgcctacagaggagcccacctgcggggccggggccgcacagtgtacaacaccttccgggccgccgcccctcctccacccatcccagcctatggaggagtggtgtaccaggacggcttctatggagctgacatctacggcggctacgccgcctaccgctatgcccagcccaccccagccacagctgctgcctacagcgacagctatggccgggtgtatgctgctgacccctaccaccacgccctggccccagcccccacctacggcgtgggcgccatgaatgcctttgcccccctgacagatgccaagaccaggagccatgctgatgatgtgggcctggtgctgagcagcctgcaggccagcatctacagaggaggctacaacagatttgccccctactag

SEQ ID NO: 53301 - DNA, 792 bp, Artificial Sequence
  derived and/or modified sequence
atgaactgtgagcgggagcagctgcggggcaaccaggaggccgccgccgccccagacaccatggcccagccctatgccagcgcccagtttgccccaccccagaatggcatcccagctgagtacacagccccccacccccacccagcccctgagtacacaggccagaccaccgtgcctgagcacaccctgaacctgtaccccccagcccagacccacagcgagcagagccctgctgacaccagcgcccagacagtgtctggaacagccacccagacagatgatgctgcccccacagatggccagccccagacccagcccagcgagaacacagagaacaagagccagcccaagaggctgcacgtgagcaacatccccttccgcttccgggaccctgacctgcggcagatgtttggccagtttgggaagatcctggatgtggagatcatcttcaatgaaagaggcagcaagggcttcggctttgtgacctttgagaacagcgcagatgctgaccgggcccgggagaagctgcatggaacagtggtggagggcaggaagattgaggtgaacaatgccacagcccgggtgatgaccaacaagaagacagtgaacccctacaccaacggctggaagctgaaccctgtggtgggcgctgtgtacagccctgagttctacgccggcaccgtgctgctgtgccaggccaaccaggagggcagctccatgtacagcgcccccagcagcctggtgtacaccagcgccatgcctggcttcccctacccagctgccacagcctag

SEQ ID NO: 53302 - DNA, 1194 bp, Artificial Sequence
  derived and/or modified sequence
atgaactgcgagcgggagcagctgcggggcaaccaggaggccgccgccgcgcctgacactatggcacagccctatgccagcgcccagtttgcccctccacagaatgggattcctgctgagtacaccgccccccacccacaccctgctcccgagtatacaggccaaacaaccgtgccagagcatactctaaacctataccctccagctcaaactcactccgagcagagcccagctgatacctctgcccagactgtgtccggtacagccacacaaaccgatgacgccgcacccactgacgggcagcctcagacgcagccgtctgagaatacagaaaataagagtcaacctaaacgactccatgtgagtaatattccgttccgctttagagatccagacctccggcagatgtttggtcagttcgggaaaattttggatgtcgaaattatctttaatgaacggggctccaaaggattcggctttgtcacatttgaaaattcagccgatgccgatagggcacgggagaaacttcatgggacggttgtggaggggagaaagattgaggttaataatgctactgcacgggtgatgacgaataagaaaaccgttaatccttacacgaacggttggaaactcaatccagtggtaggtgccgtctatagccctgagttctatgcaggaactgtgcttctctgccaggccaaccaggaggggtcttcaatgtatagcgccccgtcttcattagtgtatacgtcagccatgcccggatttccttaccctgcagcaacagctgccgctgcctacaggggggcccatttacggggccggggaagaacagtatataacacatttcgagccgccgccccccctcctcccattccagcttacggcggtgttgtgtaccaagatggattttacggtgccgacatctatggaggctatgccgcttataggtacgcgcagccgacacccgctacggccgcagcctatagtgacagctatggcagagtctacgccgccgacccttaccaccatgctctggcaccggctcccacctatggcgtgggagccatgaacgcttttgcccctcttaccgacgctaaaacacggtcccacgccgacgacgtgggactggtgctgtcgagtttgcaagcctctatttatcggggcggctacaacagatttgccccttactag

SEQ ID NO: 53303 - DNA, 1194 bp, Artificial Sequence
  derived and/or modified sequence
atgaactgcgagcgggagcagctgcggggcaaccaggaggccgccgccgcaccagacacaatggctcagccatatgcctccgctcaatttgcacctcctcaaaacggaatacctgccgaatatactgccccgcaccctcatcccgcgccagagtacaccggccagacaacagtacccgaacacaccctgaacttgtatcccccggcgcaaactcacagtgaacagtccccagcggatacaagcgcccagaccgtatccggaacggccacacagacagatgacgctgcccccacagatgggcagccccagacgcagccctctgaaaatactgagaataagtcccagccaaagagactgcacgtcagcaacatccccttccgctttcgtgatccggatctacgccagatgtttggtcagttcggaaaaatactggacgtggaaatcatctttaatgagcgtgggtctaagggatttggatttgtcactttcgagaatagcgcagacgccgatagggctagggaaaaactgcacggaactgtggtagaaggcagaaagatagaggtgaacaatgcaacagctcgtgttatgaccaataaaaaaactgttaatccatacaccaatgggtggaaactaaaccctgtggtgggcgcagtgtatagccctgagttttacgccggaacagttctactatgtcaagccaatcaggaaggctctagcatgtatagtgcgccatcctccctcgtttacacctcagcaatgcctgggtttccctatcctgccgccactgcagcagccgcataccggggagctcatctgcggggcaggggtcgtaccgtgtacaacactttcagagctgccgcccctcctccccccatcccagcctatgggggggtcgtgtatcaagacggattttacggagcagatatctatggcggttacgccgcttaccgctacgcccagccaacacctgcaaccgcagcagcatactctgacagttacgggagagtgtacgcggccgacccataccatcacgcactggcgcccgcgccaacgtatggcgttggagcaatgaatgcctttgccccactgacggacgctaaaaccaggtctcacgccgatgatgttggacttgtgttatcgagcctccaggcctcgatttaccgtggaggctacaaccgatttgcaccatactag

SEQ ID NO: 53304 - DNA, 792 bp, Artificial Sequence
  derived and/or modified sequence
atgaactgcgagcgggagcagctgcggggcaaccaggaggccgccgcagcacctgacactatggctcagccctacgctagcgctcagtttgcaccgccccagaacggaataccagcagagtatacagcgcctcatccccacccagcgccggaatataccgggcaaacaaccgtcccggaacatacccttaacctttacccaccagcccagacacacagcgaacaaagcccagccgatacctctgcccaaactgtgtcaggaaccgccacccagacggatgacgccgcgccaactgatgggcagccccagacccagccgagtgaaaacacggagaacaaaagccagcctaaaagattgcacgtcagcaacattcctttccggttccgggatcctgacctgaggcagatgttcggacaattcggaaagattctggatgtggaaattatattcaacgagagagggtcaaagggctttggatttgtcaccttcgagaacagcgccgacgcagatagggccagggagaaacttcatggtacggtggtggaagggcggaaaatcgaagtcaataacgcaacagcgagagtaatgacgaacaagaaaacggtaaacccttacacaaatggatggaagctaaacccggtggtcggcgccgtgtatagcccagagttctatgccggcactgtcttgttatgccaggcgaatcaggaagggtcctccatgtatagcgcgccaagtagtctggtgtacactagtgcaatgccggggttcccctatccagctgctacagcatag

SEQ ID NO: 53305 - DNA, 1194 bp, Artificial Sequence
  derived and/or modified sequence
atgaactgtgagagggagcagttgcgcggtaaccaggaggcagccgctgcccctgatacaatggcacagccgtatgcatccgctcagttcgcaccgcctcagaacggcattccagccgaatatactgcccctcatccgcatcccgcacctgaatacactggtcaaacaacagtccctgaacataccctgaatctgtatccacctgcacaaacccattctgagcagagcccggctgataccagtgcacagactgtgtccggcactgctactcagaccgatgacgccgcacccacagatggccagcctcagacccagcccagtgaaaacaccgaaaataaaagccagcctaagaggctccatgtgtctaacatacccttcaggttccgtgatcccgatcttcgtcagatgttcgggcaatttggaaagatcctcgacgtggagataattttcaacgagaggggctctaagggttttggctttgtgacttttgagaactcagcagacgctgatcgcgcaagggagaaactacatgggaccgttgtggaaggacgcaaaattgaagtgaataacgctactgcccgagtgatgaccaacaaaaaaacagtgaatccttataccaatggctggaagctgaatcctgttgttggcgctgtctactccccggagttctatgccggaacggtccttctgtgtcaagctaaccaggagggtagcagtatgtactcggcgccaagcagcttggtgtatacctcagctatgcctggtttcccatatcctgctgccaccgctgcggctgcctatcgtggagctcatctgcgaggacggggtaggacagtctataacacctttagagctgcagcccctccacccccaatcccggcatacgggggagttgtgtaccaggatggcttttacggggctgatatatatggtgggtacgcggcttataggtacgcccagcccaccccggcaaccgccgcagcctactctgattcctacggaagggtgtatgcagccgacccctaccatcatgccttggcaccagcccctacgtacggcgtaggcgctatgaatgcattcgccccattaacagatgccaagaccagatcacacgctgatgacgtcggcctggtgctctctagccttcaggcctcaatctaccgcggaggatacaaccggttcgctccctattag

SEQ ID NO: 53306 - DNA, 1194 bp, Artificial Sequence
  derived and/or modified sequence
atgaactgtgagcgcgagcagctgagagggaaccaggaggcagcagcagctccagacaccatggcacagccctatgccagtgcccagttcgcaccaccacagaacggcatacccgctgagtatactgcccctcatccccaccccgctccagagtacaccggacagactaccgtgcctgagcacaccctgaatctgtaccctcctgcacagacacactcagagcagagcccggctgatacatcagcgcagacagtatcaggcaccgcaacacagaccgatgatgccgcaccaactgatggtcagccacagacacagccttccgaaaatacagaaaacaaatctcaacctaagcgtcttcacgtgtctaatatccccttccgattcagggaccccgaccttagacagatgttcggccagtttggtaaaatcttggacgtggagatcatctttaatgaacggggatctaagggctttgggttcgtgactttcgagaactccgctgacgcagacagagcgagggagaagctgcacgggacagtggtggaaggccgtaaaattgaggttaataatgccaccgctcgcgtgatgaccaacaagaagacagtgaatccatataccaacgggtggaaactgaaccccgtggtcggcgctgtgtatagtccagaattctatgccggtacagtgctgctttgccaggccaatcaagagggtagcagtatgtacagcgccccaagcagtctggtctacacgtctgctatgccgggtttcccttatcctgcggctacagcggcagctgcctatagaggcgcacacctgagaggtcgtggtagaacagtttacaataccttcagggctgcagcgccacccccacctatacctgcctatggcggtgtagtttaccaggatgggttttatggtgcagatatctacggaggttatgcagcttatagatatgctcagcccacacccgctaccgcagctgcctacagcgactcctacggacgcgtatatgccgctgacccgtaccaccacgctctcgcacctgccccaacatacggcgtgggtgctatgaatgcattcgccccattaaccgacgccaaaacccggagtcacgccgacgatgtcggtctggtcctttccagtctgcaggcctccatttaccgcggaggctacaatcgattcgccccatactag

SEQ ID NO: 53307 - DNA, 792 bp, Artificial Sequence
  derived and/or modified sequence
atgaactgcgagagagaacagcttagaggaaaccaagaagccgctgctgcacctgatacgatggcccagccctacgcctctgcgcagttcgccccaccccagaatggcattcctgccgaatacaccgctccacatcctcatcctgccccagaatataccggccagactaccgtccccgaacatactctgaatctgtaccctcccgcacagacacattctgaacagtcacccgctgacacatctgcacagaccgtatcagggacggctactcagaccgacgacgccgcacccaccgatggacagccccaaactcagccatcagaaaataccgaaaataaatctcagccgaaacgcctgcatgtcagtaatatccccttcaggttccgtgatcccgacctgagacagatgttcggccagttcggaaaaatcctagacgtagagattatttttaatgaacggggaagcaagggctttgggttcgtgacgtttgagaatagtgccgatgcggatcgcgcacgcgagaaattacacggaactgtcgtggaaggcaggaaaattgaagttaacaacgccactgctcgggtcatgaccaataagaaaaccgtcaatccttacacaaatggctggaagctgaacccggtggtaggcgcagtctattcccctgaattttacgccggaactgtattgctttgtcaggccaaccaagaagggagcagtatgtatagcgctccttcgagtcttgtctacacatcagcaatgcccggtttcccttatcccgcagccacagcttag

SEQ ID NO: 53308 - DNA, 1194 bp, Artificial Sequence
  derived and/or modified sequence
atgaactgcgagagagagcagctgagaggcaaccaggaggccgccgccgcccccgacaccatggcccagccctacgccagcgcccagttcgcccccccccagaacggcatccccgccgagtacaccgccccccacccccaccccgcccccgagtacaccggccagaccaccgtgcccgagcacaccctgaacctgtacccccccgcccagacccacagcgagcagagccccgccgacaccagcgcccagaccgtgagcggcaccgccacccagaccgacgacgccgcccccaccgacggccagccccagacccagcccagcgagaacaccgagaacaagagccagcccaagagactgcacgtgagcaacatccccttcagattcagagaccccgacctgagacagatgttcggccagttcggcaagatcctggacgtggagatcatcttcaacgagagaggcagcaagggcttcggcttcgtgaccttcgagaacagcgccgacgccgacagagccagagagaagctgcacggcaccgtggtggagggcagaaagatcgaggtgaacaacgccaccgccagagtgatgaccaacaagaagaccgtgaacccctacaccaacggctggaagctgaaccccgtggtgggcgccgtgtacagccccgagttctacgccggcaccgtgctgctgtgccaggccaaccaggagggcagcagcatgtacagcgcccccagcagcctggtgtacaccagcgccatgcccggcttcccctaccccgccgccaccgccgccgccgcctacagaggcgcccacctgagaggcagaggcagaaccgtgtacaacaccttcagagccgccgccccccccccccccatccccgcctacggcggcgtggtgtaccaggacggcttctacggcgccgacatctacggcggctacgccgcctacagatacgcccagcccacccccgccaccgccgccgcctacagcgacagctacggcagagtgtacgccgccgacccctaccaccacgccctggcccccgcccccacctacggcgtgggcgccatgaacgccttcgcccccctgaccgacgccaagaccagaagccacgccgacgacgtgggcctggtgctgagcagcctgcaggccagcatctacagaggcggctacaacagattcgccccctactag

SEQ ID NO: 53309 - DNA, 792 bp, Artificial Sequence
  derived and/or modified sequence
atgaactgcgagagagagcagctgagaggcaaccaggaggccgccgccgcccccgacaccatggcccagccctacgccagcgcccagttcgcccccccccagaacggcatccccgccgagtacaccgccccccacccccaccccgcccccgagtacaccggccagaccaccgtgcccgagcacaccctgaacctgtacccccccgcccagacccacagcgagcagagccccgccgacaccagcgcccagaccgtgagcggcaccgccacccagaccgacgacgccgcccccaccgacggccagccccagacccagcccagcgagaacaccgagaacaagagccagcccaagagactgcacgtgagcaacatccccttcagattcagagaccccgacctgagacagatgttcggccagttcggcaagatcctggacgtggagatcatcttcaacgagagaggcagcaagggcttcggcttcgtgaccttcgagaacagcgccgacgccgacagagccagagagaagctgcacggcaccgtggtggagggcagaaagatcgaggtgaacaacgccaccgccagagtgatgaccaacaagaagaccgtgaacccctacaccaacggctggaagctgaaccccgtggtgggcgccgtgtacagccccgagttctacgccggcaccgtgctgctgtgccaggccaaccaggagggcagcagcatgtacagcgcccccagcagcctggtgtacaccagcgccatgcccggcttcccctaccccgccgccaccgcctag

SEQ ID NO: 53310 - protein, 373 aa, Artificial Sequence
  derived and/or modified sequence
MRMEDEDYNTSISYGDEYPDYLDSIVVLEDLSPLEARVTRIFLVVVYSIVCFLGILGNGLVIIIATFKMKKTVNMVWFLNLAVADFLFNVFLPIHITYAAMDYHWVFGTAMCKISNFLLIHNMFTSVFLLTIISSDRCISVLLPVWSQNHRSVRLAYMACMVIWVLAFFLSSPSLVFRDTANLHGKISCFNNFSLSTPGSSSWPTHSQMDPVGYSRHMVVTVTRFLCGFLVPVLIITACYLTIVCKLQRNRLAKTKKPFKIIVTIIITFFLCWCPYHTLNLLELHHTAMPGSVFSLGLPLATALAIANSCMNPILYVFMGQDFKKFKVALFSRLVNALSEDTGHSSYPSHRSFTKMSSMNERTSMNERETGML

SEQ ID NO: 53311 - protein, 371 aa, Artificial Sequence
  derived and/or modified sequence
MEDEDYNTSISYGDEYPDYLDSIVVLEDLSPLEARVTRIFLVVVYSIVCFLGILGNGLVIIIATFKMKKTVNMVWFLNLAVADFLFNVFLPIHITYAAMDYHWVFGTAMCKISNFLLIHNMFTSVFLLTIISSDRCISVLLPVWSQNHRSVRLAYMACMVIWVLAFFLSSPSLVFRDTANLHGKISCFNNFSLSTPGSSSWPTHSQMDPVGYSRHMVVTVTRFLCGFLVPVLIITACYLTIVCKLQRNRLAKTKKPFKIIVTIIITFFLCWCPYHTLNLLELHHTAMPGSVFSLGLPLATALAIANSCMNPILYVFMGQDFKKFKVALFSRLVNALSEDTGHSSYPSHRSFTKMSSMNERTSMNERETGML

SEQ ID NO: 53312 - protein, 143 aa, Artificial Sequence
  derived and/or modified sequence
MRMEDEDYNTSISYGDEYPDYLDSIVVLEDLSPLEARVTRIFLVVVYSIVCFLGILGNGLVIIIATFKMKKTVNMVWFLNLAVADFLFNVFLPIHITYAAMDYHWVFGTAMCKISNFLLIHNMFTSVFLLTIISSDRCISVLL

SEQ ID NO: 53313 - protein, 147 aa, Artificial Sequence
  derived and/or modified sequence
MRMEDEDYNTSISYGDEYPDYLDSIVVLEDLSPLEARVTRIFLVVVYSIVCFLGILGNGLVIIIATFKMKKTVNMVWFLNLAVADFLFNVFLPIHITYAAMDYHWVFGTAMCKISNFLLIHNMFTSVFLLTIISSDRCISVLLPVWS

SEQ ID NO: 53314 - DNA, 1122 bp, Artificial Sequence
  derived and/or modified sequence
atgagaatggaagacgaagactacaacaccagtattagctatggagacgagtaccctgattacttagattctatcgttgtcttggaggacctctccccattggaggcaagggtcactagaatatttctggttgttgtatacagcattgtgtgctttctgggcattttaggcaacggattagtgattattattgcgacttttaaaatgaagaagacagttaatatggtgtggtttttgaatctggccgtcgccgatttcctgtttaacgtttttcttcctattcacatcacctacgcagctatggattaccattgggtttttgggacagccatgtgcaagatctcaaacttccttttgatccacaacatgtttacctcagtctttctgctgacaatcatctccagcgacagatgtatttctgtgctgctccccgtgtggagccagaaccatcggtcagtccggctggcatatatggcctgtatggtgatttgggtgctggccttctttctctcttcacctagtctcgtatttagagacacagcaaatctccacggtaagatctcttgcttcaataacttttccctgtctacacccggctcttcatcttggcctacccattcccagatggaccccgtcggatatagtcgtcatatggtcgttactgtgacgcgtttcctgtgcggcttcttagtacctgtccttattattactgcttgttatctgactatagtgtgcaaattacagcgcaaccggctcgcaaagacaaaaaaacctttcaaaataatagtcactattatcataactttttttctctgttggtgcccgtaccatacactgaatctgctagaattgcatcacacggctatgccaggctctgtattctcactaggactgccactggctactgccctagctatcgcgaattcttgcatgaatcctatcctgtacgtgttcatggggcaagactttaaaaagttcaaggtggctctgttcagccgcctggtcaatgctttatccgaggacaccggtcattcaagctatccatctcaccggagcttcactaagatgtccagcatgaacgaacggacctccatgaacgaacgtgagacaggcatgctctag

SEQ ID NO: 53315 - DNA, 1122 bp, Artificial Sequence
  derived and/or modified sequence
atgagaatggaggacgaagattataatacctcaatatcatacggggacgaataccctgactatcttgacagcatagtcgtgctggaggacctctccccattggaggcacgggtaacaaggatttttctggtcgtggtctatagcatcgtgtgttttctgggcattctgggaaatgggctagtcattattattgcaacttttaagatgaaaaaaactgtgaacatggtctggtttctgaaccttgcggtcgccgacttcctgtttaatgtgtttctcccaatacatatcacatatgctgctatggattatcattgggtttttgggactgccatgtgcaagattagtaatttcctgctcattcacaatatgttcacctccgtgtttttgctgacaatcattagcagtgaccgttgtatctcagtgcttctcccggtgtggtcccaaaaccaccggtctgttcggttagcctacatggcttgcatggtaatctgggtgttggccttcttcctgtcaagccctagtctggtgttcagggatacagccaatctgcacgggaaaatttcgtgctttaacaacttcagtctgagcacaccgggctctagttcttggcccacacattctcagatggacccggtaggctattcccgtcacatggttgtaaccgtgacaaggttcctttgcggtttcctggtccccgtacttattatcactgcatgctaccttacaatcgtgtgtaagttgcaaaggaacagacttgctaaaactaagaaacctttcaaaattatcgtcaccatcatcattacattctttttatgttggtgcccttatcacacactgaatcttttggagctgcatcacactgcaatgcctgggtcagtcttctctttgggactccctttggccaccgcccttgccattgcaaattcctgcatgaacccgatcttgtatgtgtttatggggcaggatttcaaaaagttcaaagtagccctgttcagccggctggtgaatgcactgtctgaggacacagggcactcatcatacccatcacaccgaagcttcaccaagatgagctctatgaacgagcgaacaagcatgaacgagagagagaccggtatgctatag

SEQ ID NO: 53316 - DNA, 432 bp, Artificial Sequence
  derived and/or modified sequence
atgcgtatggaagatgaagactacaataccagtatctcctacggtgatgagtacccggactatctcgatagcattgtggtattagaagacttaagccccttagaggcacgcgtgactaggatcttcctcgtggtcgtctactctatcgtatgctttctgggcatccttggtaatgggctcgtgattatcattgccacgtttaaaatgaagaaaacggtgaatatggtctggtttctcaacttagctgtagctgactttctatttaacgtttttctccccatccacatcacatacgcggctatggattatcattgggtgttcggtactgccatgtgcaagatctcaaacttccttctcatacacaatatgtttacatctgtgtttttgctcacaattatttcctcagaccgttgcattagtgttctgttgtag

SEQ ID NO: 53317 - DNA, 1122 bp, Artificial Sequence
  derived and/or modified sequence
atgagaatggaggacgaggactataacacctccatctcttatggggacgagtaccccgactacctcgatagcattgtggtgctggaggatctttccccactggaggctagggtgaccaggattttcttggtcgtcgtttatagtatcgtttgctttctgggtatcctcgggaatgggctcgtcataatcatcgccactttcaagatgaaaaagactgttaatatggtgtggtttctgaatctcgcagtcgccgactttctgtttaacgtattccttcctatccacatcacatacgctgctatggactatcactgggtcttcgggaccgccatgtgcaagatatctaacttcttactcattcataatatgtttaccagcgtcttcttgttgactattatttcgtcagaccgctgtatttctgttctgttgcccgtgtggtcacaaaaccatcgcagtgtgcgcctcgcctacatggcctgcatggtaatctgggtgctggctttcttcttgtcttctccttctctggttttccgggataccgccaacctccacggaaagattagctgctttaataacttctcactgtcaacacccggatctagctcatggccaactcatagccagatggatcccgtgggatacagcaggcatatggtcgtcacggtgacgagatttctgtgtggtttcctggtgcccgtcctgatcataactgcctgctacctcacaatcgtgtgtaaactgcagagaaacagactggccaagaccaaaaaacccttcaaaattattgtaacgatcataattacatttttcctttgttggtgcccttaccacaccctcaatctgcttgaactacaccatacggccatgcctggctcagtgtttagcctgggactcccccttgctaccgccctggctatcgctaattcgtgcatgaatccaatcctctacgtattcatgggccaggacttcaaaaaatttaaggtggcgctgttttcacgtctagtcaatgctctgtccgaggataccgggcactcttcttatccatcccataggagtttcactaaaatgtcctctatgaacgagaggacctccatgaacgagagggagaccggaatgttgtag

SEQ ID NO: 53318 - DNA, 444 bp, Artificial Sequence
  derived and/or modified sequence
atgcgtatggaggacgaggactataatacgagcatttcttatggcgatgaatacccagattatctagatagcatagtggtgctcgaagatctcagcccactggaggcgcgcgtaacccgaatttttcttgttgtagtgtattccattgtctgtttcctgggcatacttggtaatgggctcgtcattattatagctactttcaagatgaaaaagactgtgaacatggtgtggtttctgaacctggccgtggccgatttcctttttaatgttttcctccctatccacataacttacgccgcgatggattaccattgggtgtttggtacagctatgtgtaagattagtaacttcctcttaatccacaacatgtttacttcggtgtttctactgaccattatatcctcagacaggtgtatcagtgttttgctccccgtgtggtcatag

SEQ ID NO: 53319 - DNA, 1122 bp, Artificial Sequence
  derived and/or modified sequence
atgaggatggaggatgaggactacaacaccagcatctcctatggagatgagtacccagactacctggacagcatcgtggtgctggaggacctgagccccctggaggcccgggtgacccgcatcttcctggtggtggtgtacagcatcgtgtgcttcctgggcatcctgggcaatggcctggtgatcatcatcgccaccttcaagatgaagaagacagtgaacatggtgtggttcctgaacctggccgtggccgacttcctgttcaacgtgttcctgcccatccacatcacctatgctgccatggactaccactgggtgtttggaacagccatgtgcaagatcagcaacttcctgctgatccacaacatgttcaccagcgtcttcctgctgaccatcatcagcagtgaccgctgcatctctgtgctgctgcctgtgtggagccagaaccacaggtctgtgcggctggcctacatggcctgcatggtgatctgggtgctggccttcttcctgagcagccccagcctggtgttccgggacacagccaacctgcacggcaagatcagctgcttcaacaacttcagcctgagcaccccaggcagcagctcctggcccacccacagccagatggaccctgtgggctacagccgccacatggtggtgacagtgacccgcttcctgtgtggcttcctggtgcctgtgctgatcatcacagcctgctacctgaccatcgtgtgcaagctgcagaggaaccggctggccaagaccaagaagcccttcaagatcatcgtgaccatcatcatcaccttcttcctgtgctggtgcccctaccacaccctgaacctgctggagctgcaccacacagccatgcctggcagcgtcttcagcctgggcctgcccctggccacagccctggccatcgccaacagctgcatgaaccccatcctgtatgtgttcatgggccaggacttcaagaagttcaaggtggccctcttcagccggctggtgaatgccctgtctgaggacaccggccacagcagctaccccagccacaggagcttcaccaagatgagctccatgaatgaaagaacctccatgaatgaaagagagaccggcatgctgtag

SEQ ID NO: 53320 - DNA, 432 bp, Artificial Sequence
  derived and/or modified sequence
atgaggatggaggatgaggactacaacaccagcatctcctatggagatgagtacccagactacctggacagcatcgtggtgctggaggacctgagccccctggaggcccgggtgacccgcatcttcctggtggtggtgtacagcatcgtgtgcttcctgggcatcctgggcaatggcctggtgatcatcatcgccaccttcaagatgaagaagacagtgaacatggtgtggttcctgaacctggccgtggccgacttcctgttcaacgtgttcctgcccatccacatcacctatgctgccatggactaccactgggtgtttggaacagccatgtgcaagatcagcaacttcctgctgatccacaacatgttcaccagcgtcttcctgctgaccatcatcagcagtgaccgctgcatctctgtgctgctgtag

SEQ ID NO: 53321 - DNA, 444 bp, Artificial Sequence
  derived and/or modified sequence
atgaggatggaggatgaggactacaacaccagcatctcctatggagatgagtacccagactacctggacagcatcgtggtgctggaggacctgagccccctggaggcccgggtgacccgcatcttcctggtggtggtgtacagcatcgtgtgcttcctgggcatcctgggcaatggcctggtgatcatcatcgccaccttcaagatgaagaagacagtgaacatggtgtggttcctgaacctggccgtggccgacttcctgttcaacgtgttcctgcccatccacatcacctatgctgccatggactaccactgggtgtttggaacagccatgtgcaagatcagcaacttcctgctgatccacaacatgttcaccagcgtcttcctgctgaccatcatcagcagtgaccgctgcatctctgtgctgctgcctgtgtggagctag

SEQ ID NO: 53322 - DNA, 1122 bp, Artificial Sequence
  derived and/or modified sequence
atgcggatggaggacgaggactacaacaccagcatcagctacggcgatgagtaccccgattatctggactctatcgtcgttctggaggacttgagcccccttgaggctagagtcacacgcatttttctggtggtggtctactccatcgtgtgttttctcggtatcctaggcaacgggttggtgataatcatcgctacatttaaaatgaaaaagactgtgaacatggtgtggttcctgaacctcgctgtcgccgatttcctgttcaacgtctttctgcccattcatataacctacgcagcaatggactatcactgggtctttgggacagccatgtgtaaaataagcaatttcttgctaatccataacatgtttacctcagttttcctactgactattatcagctctgataggtgcatttcagttttgctgccagtttggtctcaaaaccaccggagcgttagattagcttatatggcctgcatggtgatctgggtgctggcattttttctgagctccccaagtctagtatttcgggacactgccaatctccatggaaaaatatcatgctttaataacttcagtctgagcacacccggatcttcttcgtggcctacacactcccagatggacccagtcggatattctagacacatggtcgttactgtaacccggttcctgtgcggttttctggtgccggtgctcattataaccgcgtgttacctcacaattgtctgtaagttgcaaaggaacaggctcgctaagacgaaaaaacccttcaaaatcattgtgactattatcatcacattctttctgtgctggtgtccttaccacactctcaatctcctcgaactgcaccacacggcaatgccgggttctgtctttagtcttggtcttccattggcaaccgcattggccatcgccaatagttgcatgaatcctatcctgtacgtgtttatggggcaggatttcaaaaaatttaaggtcgccctgttcagccggctcgttaatgctttatctgaagacacagggcatagctcatacccatcccataggtcattcaccaaaatgtcttctatgaatgagagaacatccatgaatgagcgcgagaccgggatgctgtag

SEQ ID NO: 53323 - DNA, 1122 bp, Artificial Sequence
  derived and/or modified sequence
atgcggatggaggacgaggactacaacaccagcatcagctacggcgacgaatacccagactacttggattcaatcgtggtattggaggatctgagccccctggaggcgagagtgactaggatcttcctggtggtggtatactccattgtgtgttttctggggatcttaggtaatggccttgtgattattatcgccacctttaagatgaaaaagaccgtaaacatggtctggtttcttaacctcgctgtcgcagatttcctcttcaatgtgtttctccccatacatattacatatgccgccatggattaccattgggtgttcggcaccgccatgtgtaagatctcgaattttttgctgatccataatatgttcacttctgtgtttctgctgactataattagtagtgacagatgtatctctgtgcttctgcctgtgtggtcgcagaaccacaggtcagttcgactggcttatatggcctgcatggtgatatgggtgctcgcgttttttctctcaagcccatccctcgttttccgcgatactgctaacctgcatggcaagatctcatgtttcaacaactttagtctgtccacccccggcagcagctcctggccaactcactcacagatggatcctgttgggtacagcaggcatatggtagttactgtgaccaggtttctgtgtggcttcttggtacccgttttgattatcacagcctgttacctgaccatagtatgtaagcttcagcggaatagactggccaagacaaaaaaaccctttaagatcattgtaacaatcatcattactttcttcctctgttggtgcccttatcacactcttaacctgttggagctgcatcacaccgcaatgcccgggtccgtctttagtctggggctgcctttagctactgccctcgcgatcgcgaatagttgcatgaatcccattctgtatgtgtttatgggtcaggattttaaaaaatttaaggtcgccctcttttctaggctggtcaacgccttgagcgaagatacgggccacagctcttacccctcacacaggagctttaccaagatgtctagcatgaacgaaagaacttccatgaatgagcgtgaaacaggtatgctgtag

SEQ ID NO: 53324 - DNA, 432 bp, Artificial Sequence
  derived and/or modified sequence
atgcggatggaggacgaggactacaacaccagcatcagctacggcgacgaatacccagactatctagacagtatagtcgtgctggaagacctcagccccctggaagctcgtgtaactagaatttttcttgtagttgtttactccatcgtatgctttctggggatcctggggaacggtcttgttattatcatcgccacatttaagatgaaaaagacagtcaatatggtgtggttcctaaaccttgcagtggctgattttctctttaatgtatttctgcccattcacatcacttacgcggcgatggattaccactgggtcttcgggactgccatgtgtaagatttccaactttctactcatccacaatatgtttacaagcgtgttcctgctcaccattatctcctcagataggtgcatctccgtgttgctgtag

SEQ ID NO: 53325 - DNA, 1122 bp, Artificial Sequence
  derived and/or modified sequence
atgcggatggaggacgaggactacaacaccagcatcagctacggcgatgagtacccagactacctcgacagtatcgtcgtcctcgaagatctgtcaccgctggaagccagggttacaagaatatttctggtggttgtgtactcaatcgtatgctttctgggaatcttaggcaacgggctcgtcattatcattgctacgttcaagatgaaaaaaacagtcaatatggtatggttcctcaacttggccgtagccgatttcctgtttaacgtattcctaccaatacatattacttatgctgccatggactaccattgggtcttcggcaccgccatgtgcaagatttcaaatttcctgctgatccacaatatgttcacgagcgtgttcctcctcactattatctctagcgataggtgcatttctgttctcctgcccgtctggagccaaaatcacaggtctgtacgtctcgcttatatggcctgtatggtcatttgggtactggccttcttcttatcttccccttcccttgtcttccgagacactgccaacctgcatgggaagatctcctgctttaacaacttctcactgagcacacccggtagttccagttggcctacacactcccagatggaccctgtcggctacagcaggcacatggtggtgactgtgaccaggtttttatgcgggttcctggtcccagtgcttatcattactgcctgctacctaaccatagtgtgcaaattacagaggaaccgcctcgctaagaccaagaaaccgttcaagattatcgtcacaattatcattacctttttcttatgttggtgcccctatcacactcttaacttgctggaattgcaccacacagccatgcccgggtccgtgtttagtctgggcttgcctctggccacagctcttgctatcgctaattcctgcatgaatcccattctctacgtctttatgggccaagactttaaaaaattcaaagtggctttgttctccagactcgttaatgccctgagtgaggacactggacactcctcttatccgagtcacagaagtttcacgaaaatgtcatctatgaacgaacgaacctccatgaacgagagagagaccggcatgctttag

SEQ ID NO: 53326 - DNA, 444 bp, Artificial Sequence
  derived and/or modified sequence
atgcggatggaggacgaggactacaacaccagcatcagctacggcgatgaataccctgattacctagatagcatagtcgtactggaggacctgtcacccttagaagctcgggttacacgcatctttctggtggtggtttattccattgtgtgcttcctgggcatactgggaaatggattagtcatcattatcgcaacatttaaaatgaagaaaacagtcaacatggtttggtttttaaacctcgcagttgccgactttctgttcaacgtcttccttccaattcacatcacctacgcagctatggattaccactgggtttttggtaccgccatgtgcaagatctcgaattttctgctgatccataatatgtttaccagtgtgtttctgctgacaataattagtagcgatagatgcatctctgtgcttctccccgtgtggagttag

SEQ ID NO: 53327 - DNA, 1122 bp, Artificial Sequence
  derived and/or modified sequence
atgcggatggaagacgaagactacaacacctctatctcgtatggcgatgagtacccggactacttggactctattgtagtgcttgaagacctctctcccctcgaagcgagagtaacccggatcttccttgtcgtcgtgtattcaatcgtttgcttcctggggatactgggcaacggccttgttattatcattgcgacctttaagatgaagaaaacagtcaacatggtctggtttttgaacctggctgttgctgatttcctctttaatgtcttcctgcccattcacatcacatatgccgcaatggactaccactgggtcttcggcaccgcaatgtgcaagatatctaactttctcctcattcacaacatgtttacaagtgtgtttctgctgacaataatcagctccgaccgatgcatcagcgtgctgttgcctgtgtggagccagaatcaccgaagcgtgagacttgcatacatggcatgcatggtgatctgggtgctcgctttctttcttagtagccccagtctggtgttccgagacaccgcaaatctgcatggtaagattagttgctttaacaatttcagtctctcaacaccagggtcaagttcctggccaactcactcccagatggaccccgtgggttattccaggcatatggtcgtgactgtgactaggttcttatgcggtttccttgtgcccgtacttataattactgcctgctatctcaccatcgtatgtaagttacagagaaacaggctggccaaaactaagaaacccttcaaaattatcgtgactattattattaccttcttcctgtgttggtgcccttatcatacgctcaatctcctggagctccatcacacagcaatgcccggaagtgtctttagcctcggtctccccctggccacagccttggcaattgctaactcctgcatgaatccaatactttatgtctttatgggccaggacttcaaaaaatttaaagtggctcttttcagccggttggtcaatgccctgagtgaagatacagggcatagctcttacccatcccataggagttttaccaagatgagctctatgaatgaacgcactagcatgaatgagcgggaaactggtatgttgtag

SEQ ID NO: 53328 - DNA, 1122 bp, Artificial Sequence
  derived and/or modified sequence
atgcgaatggaagatgaggattacaatacaagcatatcatacggagacgaatatccagattacctggactcgatcgtggtgcttgaggacttatcacctctggaagctagggtgacaaggatatttcttgtcgtggtatattcaattgtctgctttcttgggatcctgggcaatggtttggtgattatcatagctacgtttaagatgaaaaagactgttaacatggtgtggtttctaaatctggccgtcgcagatttcctgttcaacgtgttcttacccatccacatcacgtatgcagccatggactaccactgggtgtttggaactgcgatgtgtaagatttcaaacttccttctcattcataacatgttcacaagcgtgtttcttctgactatcatatctagtgaccgctgtatctctgtgctgctgcccgtctggtctcagaaccacagaagcgtgagattggcttacatggcatgcatggtgatctgggtactggccttctttttaagctccccatctttagtgttcagagacaccgccaacctgcacggcaagatctcatgtttcaacaatttctctctgagcacgccgggtagctcctcatggcctactcattcccagatggatcccgtgggttacagtcggcacatggtggttaccgtaactcggttcctctgtggcttcttggtaccagttcttataattaccgcctgttacttgactatcgtgtgtaagctgcagagaaatagattggccaaaacgaagaagccctttaaaatcatcgtgacgatcataatcacctttttcctttgctggtgtccatatcatacattgaatctgctcgagctacaccacactgcaatgcccggaagcgtcttcagcctgggcctgcccttggctactgccctagcaattgcaaacagttgcatgaaccccatattgtacgtgtttatggggcaagatttcaagaagttcaaagtggctctgttcagccgactagtgaatgccctatccgaagacaccggtcactccagctaccctagccaccgtagcttcaccaagatgtcctcgatgaatgagagaacttctatgaatgagagggaaacagggatgctatag

SEQ ID NO: 53329 - DNA, 432 bp, Artificial Sequence
  derived and/or modified sequence
atgagaatggaagacgaggattataacacttctatcagttatggcgacgagtaccccgattatctggattccattgtcgttcttgaggatctgagtccgttggaagcccgagtcactaggatattcctcgtcgtggtgtactctattgtatgttttctcgggatcctcgggaacggactggtgatcataatcgccacattcaaaatgaagaagaccgtaaacatggtatggttccttaatcttgcagtggcagacttccttttcaacgtgtttctccctatccacatcacatatgccgctatggattatcactgggtattcggaaccgccatgtgcaagatcagcaacttcctgctgattcacaacatgtttaccagtgtgtttctgctgaccataattagtagcgacagatgtattagtgtgctgctctag

SEQ ID NO: 53330 - DNA, 1122 bp, Artificial Sequence
  derived and/or modified sequence
atgcgcatggaggacgaggactacaacacgtctattagctatggggacgagtatcccgattacctggactctatcgtggttctggaagacctttcacctctagaggccagagtgaccaggatttttctggtggtggtttactcaattgtctgtttcctcggcattctggggaatggcctggtaataatcattgcaacctttaagatgaagaagacagtgaatatggtctggtttctgaatttggcagtcgctgacttcctttttaatgtatttctgcccatacacattacctacgcagcgatggactaccattgggtgttcggaacagcaatgtgcaaaattagcaattttctgcttatccacaatatgttcacatccgtcttcttgctgacgatcatcagtagcgatcgctgcatcagcgtgcttctgcctgtgtggtcacagaatcacagaagcgttcgcctggcctatatggcctgcatggtgatatgggttttggcctttttcctatccagcccctcgttggtgtttagggataccgctaacttgcacgggaaaatttcttgcttcaacaatttctccctgagcacccctgggtcttcgtcctggcccacacacagccagatggaccctgtgggctacagccgtcatatggttgtgaccgtcacccgcttcctgtgtggatttctggtacccgttctgatcatcactgcctgttatcttaccattgtctgcaaattacagcgaaataggctcgcaaagacgaagaagccatttaagatcatcgtcaccatcattatcacatttttcctctgctggtgcccgtaccatacactcaatttgctggaactccaccacaccgctatgcccggaagtgtgttctcccttggtttacccttagccacagccctagccattgctaacagttgtatgaatccaattctgtatgtcttcatggggcaggacttcaaaaaatttaaggtcgcacttttcagtaggttggttaatgctctttctgaagacactggacattcttcttatccttcccaccgctccttcacaaaaatgagcagcatgaatgaaaggaccagcatgaacgagcgcgagaccgggatgttatag

SEQ ID NO: 53331 - DNA, 444 bp, Artificial Sequence
  derived and/or modified sequence
atgcggatggaggatgaagattacaatacttcaattagctacggggacgagtatcccgattatctggacagtattgtcgtgctcgaggacctgagcccgttagaggctagggtaacccgaatttttctggtggtggtctactctattgtatgtttcttgggcattctgggaaacgggcttgtgattatcatcgcgacatttaagatgaagaagactgtaaacatggtctggttcctcaacctggcggtggctgatttcctgttcaatgtatttctgcctatccacatcacatacgccgctatggattatcattgggtattcgggacagctatgtgcaagatctcaaacttcttgttgatccataacatgttcacctcagtgtttctactcaccatcatctcctcagatagatgtatttcagtactgctgcccgtctggtcctag

SEQ ID NO: 53332 - DNA, 5283 bp, Artificial Sequence
  derived and/or modified sequence
agtcccattcagggaagcagccccggcggccagcagggagctcaggacagagcaggctccctgggaagcctccgggtgataggggtgttccagctgcggcgctctgggggttcagagggggatcttgaatgaacaaatgaatgaactgctttctgggcaaacagccacagccagaggagcctgtgattggcagaaagaagccagggtgtgcaagtctccccaacagcctcgagtggcctgcagtcacagggaaccctcaggaagaccttccgggcagagaccagagggaaggtgtttctagctgtgtacagggactgattggctgaggactcacattggagagctgcagacaacataacggtgaatgagaatggaggatgaagattacaacacttccatcagttacggtgatgaataccctgattatttagactccattgtggttttggaggacttatcccccttggaagccagggtgaccaggatcttcctggtggtggtctacagcatcgtctgcttcctcgggattctgggcaatggtctggtgatcatcattgccaccttcaagatgaagaagacagtgaacatggtctggttcctcaacctggcagtggcagatttcctgttcaacgtcttcctcccaatccatatcacctatgccgccatggactaccactgggttttcgggacagccatgtgcaagatcagcaacttccttctcatccacaacatgttcaccagcgtcttcctgctgaccatcatcagctctgaccgctgcatctctgtgctcctccctgtctggtcccagaaccaccgcagcgttcgcctggcttacatggcctgcatggtcatctgggtcctggctttcttcttgagttccccatctctcgtcttccgggacacagccaacctgcatgggaaaatatcctgcttcaacaacttcagcctgtccacacctgggtcttcctcgtggcccactcactcccaaatggaccctgtggggtatagccggcacatggtggtgactgtcacccgcttcctctgtggcttcctggtcccagtcctcatcatcacagcttgctacctcaccatcgtgtgcaaactgcagcgcaaccgcctggccaagaccaagaagcccttcaagattattgtgaccatcatcattaccttcttcctctgctggtgcccctaccacacactcaacctcctagagctccaccacactgccatgcctggctctgtcttcagcctgggtttgcccctggccactgcccttgccattgccaacagctgcatgaaccccattctgtatgttttcatgggtcaggacttcaagaagttcaaggtggccctcttctctcgcctggtcaatgctctaagtgaagatacaggccactcttcctaccccagccatagaagctttaccaagatgtcatcaatgaatgagaggacttctatgaatgagagggagaccggcatgctttgatcctcactgtggaacccctcaatggactctctcaacccagggacacccaaggatatgtcttctgaagatcaaggcaagaacctctttagcatccaccaattttcactgcattttgcatgggatgaacagtgttttatgctgggaatctagggcctggaacccctttcttctagtggacagaacatgctgtgttccatacagccttggactagcaatttatgcttcttgggaggccagccttgactgactcaaagcaaaaaaggaagaattctcaaaagcattgccatgaactgggattggcatagggcggtgggattaagctgcctattgtgtgtgccccagaaatgacactctccaaggtccattcctggtgtgagcagtgagggggtcagagcaaacccagtgtgatgcagatcacacttggcccttgtatatatattatcagtagctggccagaaaaccctaccttcaagtcactgctctgtgttaaagtatgtggaaatgcataggtgatctgggagaggaaggtgacatatcagcccatgaactccataggccatgaatttggctttcggatcagctaggaagacagagaactggtcctgagaggtcctgtgggctctttgcaagggcaagacaagtgagggatgcaacgaggacttgagatttggcaaagaaatgagaaaggagaaaagaacctttaaaggatgcaggcatggagcagctcaccctagaacatcgcaggctgatggtgctttaggctggagctatttggggcgtcagggtggtgccagcccctgatctcaccttgcccctcttacctgggggtggggttgtggcaggcatcttcaccagcagccctcaccccatcacagggatttttttctgcctttcctaatccactcagctctggctggaggtgcttagaataaaacactggtggtggggcttctcattctggttaatttcctcaacgcctttggagacaggtccaaaatgcagctttgggaagcaactccggagagtcccctgggaagaagagtatgtccgaggactcagtcacttgagacagagtctggagctggactccttgaactgtgtttctgagctgcagacaccaaatacctcctggatacaggtgcctggcatggcttttctcatctaatactgacacgtccctgtggccacagagtgtcatagccccatttacaaatgacatagctgaggcccagatggggaaagtaacttgcccagcatcacacagctaatcagtggcagagttaagatctgaacctggctccgtctggctccagaaactctgttcttctatttggaatttatctgtggagattattctagtatattgatagcctacatttatttagcactttttatattatgcactttacatatgttttctcatttaatcattacagcaaccctgagttaggtatggttataacttcccttttacataggaggaatctgaggcttagagaggttaagtaacttgcccaaaggtacccagctagtctctgccggagcttggatttgaacttcagtttgcctggctcaaatgaggctgcagagttgggaaggacttaaaaagtttggagatttttgccataaatattgatttttctgcaaatgaggatgaacatcttaatggcctttaagaaactttgcaaatagttttcaaaaatgatgcaacatggcagagaaaatgcacttggcttccagctccctcaacagccattaacagcctcctaccgtggctcccacctcctatgtctccagagatcaaggcaatggggagggaaagctggcaggaggcagtcccttgtgggcctgaggccctttggctcctaagtgtccacattctgttctcttccaagtcccttcattgttaagctgattctccaacaagatgcaatgaacagatgcaatgtctaccccgcgctgggcgagttcccgaggccatgggctgtttggaatcacacttcattaagagacaaactgttccttcccttattgtgccttaatgcttatgacaaggcagctctgaattgatcccaagctggagcctctgaatgctttaaagagtttgaatatagacggtttgagagcaaaaagggagctttaaatattgctcagtggcccccatctcccctcttcccacatttactgaggcacgagatgggatgggacctgtcccgggtcacagcagcagtcgtcagcgccttggccctcctggcttgtaggatgctgcttttcctgggcttctggcagtccaggccaggatgggggagccaggaattcatgttgtcattggaaaagctgataaacaggagcacaattcaaaccggctgttttcctccttagagtctggcctccctctttctggctgctctgtgggtcttcctgttctgacttaggttcctgtcaagtacttaaatgcagccttaacatcccatacagtcttgtccccacagcttcatgtgaacatctccatgggtcatgcatatatcgtccctgcagtgtgcaaagtgtgctcacctgcactgctgcacaggcaaccaacatacttagtgcccagagccttctctctgggcccaggactcagtgatggggccttacttagccctgcctcctgggtggggtgggggagctgagggatcgtgaggacaagaggtagagggaaaagaaaagaagatggtgtttgaggataggggagggacaggagaggggacagaaaggtcccagagcatgatgatgaaggaaagggatctggcattcatgaagcacctacgatggttcaggcacaaacactgaaacctcaaattggccctggcagaaggggaccatcatagcaaggtggggggggggtgcagaaagtgagtttctgtttcaagaacagacttcactagttcagagttgcacagctagtgaggtatggagctgggctttgaatcaggtcagctgcctgaatgcccaacttcttcagcccttggaaggagagggtggggagaagaagaaggaaaagacaaggaagaaagaaagaagagagaaggggagaggaatggaagtccaaagagtgggaggaatttgatttcagaaccatctccagctgacccttgagccagcaaggacagggagaagggaagagcaagaacacgaagggcctcaagcaccgggatgcctttgccagccttagataattcccagagcgcacagagccctgcaggttcctgggtccttctccagagaagaggcacagagattctggcagcaaggttcagaaggggtgaggaaactgggcactgacaaagggaggggattggctcaaattcgaccccagagtcagctctggtggggttgggagcctggatgggtgggagaagatagaatccaatcgtgaaaaccataagggaccttcaaactcatcttgcccagatgtctcccatttcacagatgagggaactgaggttttgagagcttcccctgaggactctgcaaaacgaggtggtgtctggtttggatgaaagtggtcggtgattcctcaactcctgccctgcctccctctctcgttcctccctaacatgttatgctcttgttggggctgggatgccctaggcccaaggttaccaaatcctgggtttggaaaattgctgctgggggtggtatctaggaccagagaggaatctactatttctactgtgaaataattcagcagggggtcttcttacttcttccctttgaggacaaagtttctctcgaataaagagactgaagcaaga

SEQ ID NO: 53333 - DNA, 5110 bp, Artificial Sequence
  derived and/or modified sequence
aaagtggaacaggtgtctgtgattctgcccacggaaggagacatggaggaggaagaggctgaggggaagatggaagaaggagggaaggaaggagaaatctttgcttttgggtaatcaggtgtttctagctgtgtacagggactgattggctgaggactcacattggagagctgcagacaacataacggtgaatgagaatggaggatgaagattacaacacttccatcagttacggtgatgaataccctgattatttagactccattgtggttttggaggacttatcccccttggaagccagggtgaccaggatcttcctggtggtggtctacagcatcgtctgcttcctcgggattctgggcaatggtctggtgatcatcattgccaccttcaagatgaagaagacagtgaacatggtctggttcctcaacctggcagtggcagatttcctgttcaacgtcttcctcccaatccatatcacctatgccgccatggactaccactgggttttcgggacagccatgtgcaagatcagcaacttccttctcatccacaacatgttcaccagcgtcttcctgctgaccatcatcagctctgaccgctgcatctctgtgctcctccctgtctggtcccagaaccaccgcagcgttcgcctggcttacatggcctgcatggtcatctgggtcctggctttcttcttgagttccccatctctcgtcttccgggacacagccaacctgcatgggaaaatatcctgcttcaacaacttcagcctgtccacacctgggtcttcctcgtggcccactcactcccaaatggaccctgtggggtatagccggcacatggtggtgactgtcacccgcttcctctgtggcttcctggtcccagtcctcatcatcacagcttgctacctcaccatcgtgtgcaaactgcagcgcaaccgcctggccaagaccaagaagcccttcaagattattgtgaccatcatcattaccttcttcctctgctggtgcccctaccacacactcaacctcctagagctccaccacactgccatgcctggctctgtcttcagcctgggtttgcccctggccactgcccttgccattgccaacagctgcatgaaccccattctgtatgttttcatgggtcaggacttcaagaagttcaaggtggccctcttctctcgcctggtcaatgctctaagtgaagatacaggccactcttcctaccccagccatagaagctttaccaagatgtcatcaatgaatgagaggacttctatgaatgagagggagaccggcatgctttgatcctcactgtggaacccctcaatggactctctcaacccagggacacccaaggatatgtcttctgaagatcaaggcaagaacctctttagcatccaccaattttcactgcattttgcatgggatgaacagtgttttatgctgggaatctagggcctggaacccctttcttctagtggacagaacatgctgtgttccatacagccttggactagcaatttatgcttcttgggaggccagccttgactgactcaaagcaaaaaaggaagaattctcaaaagcattgccatgaactgggattggcatagggcggtgggattaagctgcctattgtgtgtgccccagaaatgacactctccaaggtccattcctggtgtgagcagtgagggggtcagagcaaacccagtgtgatgcagatcacacttggcccttgtatatatattatcagtagctggccagaaaaccctaccttcaagtcactgctctgtgttaaagtatgtggaaatgcataggtgatctgggagaggaaggtgacatatcagcccatgaactccataggccatgaatttggctttcggatcagctaggaagacagagaactggtcctgagaggtcctgtgggctctttgcaagggcaagacaagtgagggatgcaacgaggacttgagatttggcaaagaaatgagaaaggagaaaagaacctttaaaggatgcaggcatggagcagctcaccctagaacatcgcaggctgatggtgctttaggctggagctatttggggcgtcagggtggtgccagcccctgatctcaccttgcccctcttacctgggggtggggttgtggcaggcatcttcaccagcagccctcaccccatcacagggatttttttctgcctttcctaatccactcagctctggctggaggtgcttagaataaaacactggtggtggggcttctcattctggttaatttcctcaacgcctttggagacaggtccaaaatgcagctttgggaagcaactccggagagtcccctgggaagaagagtatgtccgaggactcagtcacttgagacagagtctggagctggactccttgaactgtgtttctgagctgcagacaccaaatacctcctggatacaggtgcctggcatggcttttctcatctaatactgacacgtccctgtggccacagagtgtcatagccccatttacaaatgacatagctgaggcccagatggggaaagtaacttgcccagcatcacacagctaatcagtggcagagttaagatctgaacctggctccgtctggctccagaaactctgttcttctatttggaatttatctgtggagattattctagtatattgatagcctacatttatttagcactttttatattatgcactttacatatgttttctcatttaatcattacagcaaccctgagttaggtatggttataacttcccttttacataggaggaatctgaggcttagagaggttaagtaacttgcccaaaggtacccagctagtctctgccggagcttggatttgaacttcagtttgcctggctcaaatgaggctgcagagttgggaaggacttaaaaagtttggagatttttgccataaatattgatttttctgcaaatgaggatgaacatcttaatggcctttaagaaactttgcaaatagttttcaaaaatgatgcaacatggcagagaaaatgcacttggcttccagctccctcaacagccattaacagcctcctaccgtggctcccacctcctatgtctccagagatcaaggcaatggggagggaaagctggcaggaggcagtcccttgtgggcctgaggccctttggctcctaagtgtccacattctgttctcttccaagtcccttcattgttaagctgattctccaacaagatgcaatgaacagatgcaatgtctaccccgcgctgggcgagttcccgaggccatgggctgtttggaatcacacttcattaagagacaaactgttccttcccttattgtgccttaatgcttatgacaaggcagctctgaattgatcccaagctggagcctctgaatgctttaaagagtttgaatatagacggtttgagagcaaaaagggagctttaaatattgctcagtggcccccatctcccctcttcccacatttactgaggcacgagatgggatgggacctgtcccgggtcacagcagcagtcgtcagcgccttggccctcctggcttgtaggatgctgcttttcctgggcttctggcagtccaggccaggatgggggagccaggaattcatgttgtcattggaaaagctgataaacaggagcacaattcaaaccggctgttttcctccttagagtctggcctccctctttctggctgctctgtgggtcttcctgttctgacttaggttcctgtcaagtacttaaatgcagccttaacatcccatacagtcttgtccccacagcttcatgtgaacatctccatgggtcatgcatatatcgtccctgcagtgtgcaaagtgtgctcacctgcactgctgcacaggcaaccaacatacttagtgcccagagccttctctctgggcccaggactcagtgatggggccttacttagccctgcctcctgggtggggtgggggagctgagggatcgtgaggacaagaggtagagggaaaagaaaagaagatggtgtttgaggataggggagggacaggagaggggacagaaaggtcccagagcatgatgatgaaggaaagggatctggcattcatgaagcacctacgatggttcaggcacaaacactgaaacctcaaattggccctggcagaaggggaccatcatagcaaggtggggggggggtgcagaaagtgagtttctgtttcaagaacagacttcactagttcagagttgcacagctagtgaggtatggagctgggctttgaatcaggtcagctgcctgaatgcccaacttcttcagcccttggaaggagagggtggggagaagaagaaggaaaagacaaggaagaaagaaagaagagagaaggggagaggaatggaagtccaaagagtgggaggaatttgatttcagaaccatctccagctgacccttgagccagcaaggacagggagaagggaagagcaagaacacgaagggcctcaagcaccgggatgcctttgccagccttagataattcccagagcgcacagagccctgcaggttcctgggtccttctccagagaagaggcacagagattctggcagcaaggttcagaaggggtgaggaaactgggcactgacaaagggaggggattggctcaaattcgaccccagagtcagctctggtggggttgggagcctggatgggtgggagaagatagaatccaatcgtgaaaaccataagggaccttcaaactcatcttgcccagatgtctcccatttcacagatgagggaactgaggttttgagagcttcccctgaggactctgcaaaacgaggtggtgtctggtttggatgaaagtggtcggtgattcctcaactcctgccctgcctccctctctcgttcctccctaacatgttatgctcttgttggggctgggatgccctaggcccaaggttaccaaatcctgggtttggaaaattgctgctgggggtggtatctaggaccagagaggaatctactatttctactgtgaaataattcagcagggggtcttcttacttcttccctttgaggacaaagtttctctcgaataaagagactgaagcaaga

SEQ ID NO: 53334 - DNA, 555 bp, Artificial Sequence
  derived and/or modified sequence
gtatttctccaaagaaactctggaaggagacatgaggaactaacatagggaggtgtttctagctgtgtacagggactgattggctgaggactcacattggagagctgcagacaacataacggtgaatgagaatggaggatgaagattacaacacttccatcagttacggtgatgaataccctgattatttagactccattgtggttttggaggacttatcccccttggaagccagggtgaccaggatcttcctggtggtggtctacagcatcgtctgcttcctcgggattctgggcaatggtctggtgatcatcattgccaccttcaagatgaagaagacagtgaacatggtctggttcctcaacctggcagtggcagatttcctgttcaacgtcttcctcccaatccatatcacctatgccgccatggactaccactgggttttcgggacagccatgtgcaagatcagcaacttccttctcatccacaacatgttcaccagcgtcttcctgctgaccatcatcagctctgaccgctgcatctctgtgctcctcc

SEQ ID NO: 53335 - DNA, 1893 bp, Artificial Sequence
  derived and/or modified sequence
gtttctctggctgagttctgtcccagtcccattcagggaagcagccccggcggccagcagggagctcaggacagagcaggctccctgggaagcctccgggtgataggggtgttccagctgcggcgctctgggggttcagagggggatcttgaatgaacaaatgaatgaactgctttctgggcaaacagccacagccagaggagcctgtgattggcagaaagaagccagggtgtgcaagtctccccaacagcctcgagtggcctgcagtcacagggaaccctcaggaagaccttccgggcagagaccagagggaagcccatctctccagcagaactgcttggatttttctaccaggaggctcagggctctgcaacaatgatagcagaagctgatggcatctagagatctaggctgggactagcacagcatcacttctaccactttctgttggtcacagcaactcaccatgccagtgcagattcaaggggaggagaaatagagtccacttcttgatgggaggcgtgacatgtgtttctagctgtgtacagggactgattggctgaggactcacattggagagctgcagacaacataacggtgaatgagaatggaggatgaagattacaacacttccatcagttacggtgatgaataccctgattatttagactccattgtggttttggaggacttatcccccttggaagccagggtgaccaggatcttcctggtggtggtctacagcatcgtctgcttcctcgggattctgggcaatggtctggtgatcatcattgccaccttcaagatgaagaagacagtgaacatggtctggttcctcaacctggcagtggcagatttcctgttcaacgtcttcctcccaatccatatcacctatgccgccatggactaccactgggttttcgggacagccatgtgcaagatcagcaacttccttctcatccacaacatgttcaccagcgtcttcctgctgaccatcatcagctctgaccgctgcatctctgtgctcctccctgtctggtcccagaaccaccgcagcgttcgcctggcttacatggcctgcatggtcatctgggtcctggctttcttcttgagttccccatctctcgtcttccgggacacagccaacctgcatgggaaaatatcctgcttcaacaacttcagcctgtccacacctgggtcttcctcgtggcccactcactcccaaatggaccctgtggggtatagccggcacatggtggtgactgtcacccgcttcctctgtggcttcctggtcccagtcctcatcatcacagcttgctacctcaccatcgtgtgcaaactgcagcgcaaccgcctggccaagaccaagaagcccttcaagattattgtgaccatcatcattaccttcttcctctgctggtgcccctaccacacactcaacctcctagagctccaccacactgccatgcctggctctgtcttcagcctgggtttgcccctggccactgcccttgccattgccaacagctgcatgaaccccattctgtatgttttcatgggtcaggacttcaagaagttcaaggtggccctcttctctcgcctggtcaatgctctaagtgaagatacaggccactcttcctaccccagccatagaagctttaccaagatgtcatcaatgaatgagaggacttctatgaatgagagggagaccggcatgctttgatcctcactgtggaacccctcaatggactctctcaacccagggacacccaaggatatgtcttctgaagatcaaggcaagaacctctttagcatccaccaattttcactgcattttgcatgggatgaacagtgttttatgctgggaatctagggcctggaacccctttcttc

SEQ ID NO: 53336 - DNA, 632 bp, Artificial Sequence
  derived and/or modified sequence
aaagtggaacaggtgtctgtgattctgcccacggaaggagacatggaggaggaagaggctgaggggaagatggaagaaggagggaaggaaggagaaatctttgcttttgggtaatcaggtgtttctagctgtgtacagggactgattggctgaggactcacattggagagctgcagacaacataacggtgaatgagaatggaggatgaagattacaacacttccatcagttacggtgatgaataccctgattatttagactccattgtggttttggaggacttatcccccttggaagccagggtgaccaggatcttcctggtggtggtctacagcatcgtctgcttcctcgggattctgggcaatggtctggtgatcatcattgccaccttcaagatgaagaagacagtgaacatggtctggttcctcaacctggcagtggcagatttcctgttcaacgtcttcctcccaatccatatcacctatgccgccatggactaccactgggttttcgggacagccatgtgcaagatcagcaacttccttctcatccacaacatgttcaccagcgtcttcctgctgaccatcatcagctctgaccgctgcatctctgtgctcctccctgtctggtcc

SEQ ID NO: 53337 - DNA, 1890 bp, Artificial Sequence
  derived and/or modified sequence
ccattcagggaagcagccccggcggccagcagggagctcaggacagagcaggctccctgggaagcctccgggtgataggggtgttccagctgcggcgctctgggggttcagagggggatcttgaatgaacaaatgaatgaactgctttctgggcaaacagccacagccagaggagcctgtgattggcagaaagaagccagggtgtgcaagtctccccaacagcctcgagtggcctgcagtcacagggaaccctcaggaagaccttccgggcagagaccagagggaagcccatctctccagcagaactgcttggatttttctaccaggaggctcagggctctgcaacaatgatagcagaagctgatggcatctagagatctaggctgggactagcacagcatcacttctaccactttctgttggtcacagcaactcaccatgccagtgcagattcaaggggaggagaaatagagtccacttcttgatgggaggcgtgacatagaatggaggatgaagattacaacacttccatcagttacggtgatgaataccctgattatttagactccattgtggttttggaggacttatcccccttggaagccagggtgaccaggatcttcctggtggtggtctacagcatcgtctgcttcctcgggattctgggcaatggtctggtgatcatcattgccaccttcaagatgaagaagacagtgaacatggtctggttcctcaacctggcagtggcagatttcctgttcaacgtcttcctcccaatccatatcacctatgccgccatggactaccactgggttttcgggacagccatgtgcaagatcagcaacttccttctcatccacaacatgttcaccagcgtcttcctgctgaccatcatcagctctgaccgctgcatctctgtgctcctccctgtctggtcccagaaccaccgcagcgttcgcctggcttacatggcctgcatggtcatctgggtcctggctttcttcttgagttccccatctctcgtcttccgggacacagccaacctgcatgggaaaatatcctgcttcaacaacttcagcctgtccacacctgggtcttcctcgtggcccactcactcccaaatggaccctgtggggtatagccggcacatggtggtgactgtcacccgcttcctctgtggcttcctggtcccagtcctcatcatcacagcttgctacctcaccatcgtgtgcaaactgcagcgcaaccgcctggccaagaccaagaagcccttcaagattattgtgaccatcatcattaccttcttcctctgctggtgcccctaccacacactcaacctcctagagctccaccacactgccatgcctggctctgtcttcagcctgggtttgcccctggccactgcccttgccattgccaacagctgcatgaaccccattctgtatgttttcatgggtcaggacttcaagaagttcaaggtggccctcttctctcgcctggtcaatgctctaagtgaagatacaggccactcttcctaccccagccatagaagctttaccaagatgtcatcaatgaatgagaggacttctatgaatgagagggagaccggcatgctttgatcctcactgtggaacccctcaatggactctctcaacccagggacacccaaggatatgtcttctgaagatcaaggcaagaacctctttagcatccaccaattttcactgcattttgcatgggatgaacagtgttttatgctgggaatctagggcctggaacccctttcttctagtggacagaacatgctgtgttccatacagccttggactagcaatttatgcttcttgggaggccagccttgactgactcaaagcaaaaaaggaagaattc

SEQ ID NO: 53338 - DNA, 1122 bp, Artificial Sequence
  derived and/or modified sequence
atgagaatggaggacgaggactacaacaccagcatcagctacggcgacgagtaccccgactacctggacagcatcgtggtgctggaggacctgagccccctggaggccagagtgaccagaatcttcctggtggtggtgtacagcatcgtgtgcttcctgggcatcctgggcaacggcctggtgatcatcatcgccaccttcaagatgaagaagaccgtgaacatggtgtggttcctgaacctggccgtggccgacttcctgttcaacgtgttcctgcccatccacatcacctacgccgccatggactaccactgggtgttcggcaccgccatgtgcaagatcagcaacttcctgctgatccacaacatgttcaccagcgtgttcctgctgaccatcatcagcagcgacagatgcatcagcgtgctgctgcccgtgtggagccagaaccacagaagcgtgagactggcctacatggcctgcatggtgatctgggtgctggccttcttcctgagcagccccagcctggtgttcagagacaccgccaacctgcacggcaagatcagctgcttcaacaacttcagcctgagcacccccggcagcagcagctggcccacccacagccagatggaccccgtgggctacagcagacacatggtggtgaccgtgaccagattcctgtgcggcttcctggtgcccgtgctgatcatcaccgcctgctacctgaccatcgtgtgcaagctgcagagaaacagactggccaagaccaagaagcccttcaagatcatcgtgaccatcatcatcaccttcttcctgtgctggtgcccctaccacaccctgaacctgctggagctgcaccacaccgccatgcccggcagcgtgttcagcctgggcctgcccctggccaccgccctggccatcgccaacagctgcatgaaccccatcctgtacgtgttcatgggccaggacttcaagaagttcaaggtggccctgttcagcagactggtgaacgccctgagcgaggacaccggccacagcagctaccccagccacagaagcttcaccaagatgagcagcatgaacgagagaaccagcatgaacgagagagagaccggcatgctgtag

SEQ ID NO: 53339 - DNA, 432 bp, Artificial Sequence
  derived and/or modified sequence
atgagaatggaggacgaggactacaacaccagcatcagctacggcgacgagtaccccgactacctggacagcatcgtggtgctggaggacctgagccccctggaggccagagtgaccagaatcttcctggtggtggtgtacagcatcgtgtgcttcctgggcatcctgggcaacggcctggtgatcatcatcgccaccttcaagatgaagaagaccgtgaacatggtgtggttcctgaacctggccgtggccgacttcctgttcaacgtgttcctgcccatccacatcacctacgccgccatggactaccactgggtgttcggcaccgccatgtgcaagatcagcaacttcctgctgatccacaacatgttcaccagcgtgttcctgctgaccatcatcagcagcgacagatgcatcagcgtgctgctgtag

SEQ ID NO: 53340 - DNA, 444 bp, Artificial Sequence
  derived and/or modified sequence
atgagaatggaggacgaggactacaacaccagcatcagctacggcgacgagtaccccgactacctggacagcatcgtggtgctggaggacctgagccccctggaggccagagtgaccagaatcttcctggtggtggtgtacagcatcgtgtgcttcctgggcatcctgggcaacggcctggtgatcatcatcgccaccttcaagatgaagaagaccgtgaacatggtgtggttcctgaacctggccgtggccgacttcctgttcaacgtgttcctgcccatccacatcacctacgccgccatggactaccactgggtgttcggcaccgccatgtgcaagatcagcaacttcctgctgatccacaacatgttcaccagcgtgttcctgctgaccatcatcagcagcgacagatgcatcagcgtgctgctgcccgtgtggagctag

SEQ ID NO: 53341 - protein, 94 aa, Artificial Sequence
  derived and/or modified sequence
MPGAGDGGKAPARWLGTGLLVEEVDNTVTLIILAVVGGVIGLLILILLIKKLIIFILKKTREKKKECLVSSSGNDNTENGLPGSKAEEKPPSKV

SEQ ID NO: 53342 - DNA, 4177 bp, Artificial Sequence
  derived and/or modified sequence
ctactccttccctcccgccgttgctccagcagccggctcccagcagcgggcgagcgcgcctccccctccgctccctccctccccctcctctcgctctctgcccgctaactttcccgagccccgaccggcggcgcagagctccggggtagctttgtggccgaacgccgacctcgggcggagagcgcggctgtgcccagtatcccatccccgcgacccccgcgcgctccggagagaacaggactatgcccggggctggggacggaggcaaagccccggcgagatggctgggcactgggcttttggtggaagaagtggacaacacagtgacactcatcatcctggctgtcgtgggcggggtcatcgggctcctcatcctcatcctgctgatcaagaaactcatcatcttcatcctgaagaagactcgggagaagaagaaggagtgtctcgtgagctcctcggggaatgacaacacggagaacggcttgcctggctccaaggcagaggagaaaccaccttcaaaagtgtgagccctgcttcgggctgagcagctgcagggagccccctttctgatgatgaaactgatgcttgagccccgaccgtagaacccacgtgcctgagacatctgctgcttggctcaaactgtagtctttccgggcacaagaaaccagagtcctgcccagcctgcccatccccttcccagtcagggctccccagggacaagggatggccaggggagggggtctgtggaagattcaggagaaagaaaggagaggctagggtggtgtggaggggctggtcccctgacacctgggcagatggggtctccttcagtctccctaccctgcacaagcagggccttgattttcctccaggcttctcttcacaagagactgggaggatccgtaagggatgtcctaagagctgcaccctggagatggggtgtaggaagaagtggcttcctttggaggtgggagtgggctggaggcctctggagaagacctggggtgggggctgatgggggcaggcccacagtgagagactgcctctgcttcataggataccagatcccccacagtcttccaagtaggaaacttcctttcccctgccccgggaccctatctgcctatcccctcccctgctcagagtttttaagccctctcaaccagggctggccaccctggtcttgagggttcctggccacctagcctgctcctctgctctctgggttactgaggggctcaggaaggggcccctcgagccttcctggagtacccgagtgctccctatgcctttccaagcatttctacttggggaattgggccacagaggtagtgagccagtgtcctgggcctctgggatgcccgccccattgctgccaatgctggcagcccctcccctggcatggcaggaccatcgccactctgggcactcctgagcccagctctcccctgcttctccccctcctacctgagaggctgcaccctccaacctcccattggctcgctcccccccccccaccgtgccctccatcacgccctgcccccagggtggttcatttcccagccctgggtcaagggcctgccttcgcctcagggactctcttcctttggatgagggggtccttgggtttcccagctgcttcctgctcagctgggccaccccctcccaccctggggttggggaggagcagggagtgggtgcccacagttttcctttgcttctcccagagctggtttgcacagcccttgtgtgtggggctagaatgtgccttagtcctgaatcctagcccttacccccatcctctctagacggtatgtcctgacataacagcagagtctggtgtggtgctggtgagggttcgccagccctcccctccccagggtcatagagggggccatgaggctggaattggccagtgactgaatcttggagatgtcggccaggtgctcccattggggtttctagcctgccctagggggaggtggtgatgttgggagtgggatctcctgagtccttgttgggcagaattggtgaggccagggatggcagggaaaagtggtaacaagcctctctgcccatctacttccaatccctctctcccttactgattttttgatgccctgtcttctgggcccctaggagggatgagagaggagtagccccctttttcagagagtttggggtctacctcagagctctccctgtcaaaaagcagctgcaagcctcgcaagggtggagtggggggagactgaggaccagtagtacctgcagggtgcccgtggctgtggccagtgtcccttagccaacctgctgggctcaccagttccccgtctgatctgcctgtgcgcctcccattcttctctacccagaacctgtcatgggctggggctcagattttcctggctttgggagcagacagaccagagccaccagccattcagaaaacttcttatagctaccttcatgcaaaactgttttcttcttccttctcaatggtgacatttgaagaggcagagcaccttggggctcctccttctgtcttaagagaaagccaaggcacgtagagtagggagaagaagggcaccatcctctctttcctccccagggtctactgctgatttctagatggatcatgcagcttctctcagctcagctctttccatctaccaaatgggtgtaataatacttacctacctcacaggactgttgtgaggcttggcaagttttgtctaaaaacatctttttggcttggaaagggatctgggaagccaggtattaattgcagggatagttccaagtctgtcctgtcttcatctctgtgtcccatctctacaacccacatacagacacacacactctctctctctttctttccatcccaccccccttggaattatttagtctttgcaatattagaaaccttgactctgatgcttaaagcttcttgtccatggcttttgtttgatggttttcaatagaggtgactgagattgtagggggggcatttttggttgcccccatgcgtgggggcactactaagaatgctaaacttagtccccacaacaaagaatcatcctgtcccatgtcaacattatacccatggagaaacactggcatggatttgcactaggatgtatatgggcaaagctatcttccccaagtggaacctcagtgcatgcaaatctctgatggtggcttccagggcttgtgggctagagagagccacttacaaagtcgatcttgagagacctggccacatgcagctgggctgagtgatgtcagcgagactaaagacaaagttctgagctcctcatcaactacaaaatatgaaatcagcattccaggttctgggcttctccccatgtcgtaattgaacagaaggcagcccgaataaacccctgatgttagagaggcctggggagagcagccgatggggctcagactacatatggcaggccgatcagagctcttgtggagcgagggcttgagagcatgcttgtgagatggcaggaggtggggtgtgcttgtgtggagtgtgcgtgtgcaggcagtgtgggtgcatggcagcgtaactgtggagtggatgggctctgcatgtaaggggtgatgcatgatgggcagatgctggacatttgaggagccgtctttcttggcctgagctatgcctgttgaggcatctggagactgagaaagaatcaaaggcagagaagaccagccgtgctcctgcattccgtcactccatgacttcatctcagtgtcacagacagctgccatcagagggctggcagtagggagttccaggagcggggacttctcgggaaaatcctataacttgctttactttactttgtcccaggttggagtccctaccctcccacctcccacctgatatgcagtgcttttgactatcttatgcatggtttattcctctggcttggatgacaacaatacccatagtcaattttcctatgtaactatagatcaaatgatgcaacaacaggccttgggaggcctcaggtgtgcgagtgcctctgggaggcgcagatgcccacacagccagcactgacttgtgttcgagcacagaacggatataatcagtctggcctctacaacaagttttgcattgtagaattgtatttagctttgccttggatgaaataaaaattatgtttaataa

SEQ ID NO: 53343 - DNA, 285 bp, Artificial Sequence
  derived and/or modified sequence
atgcctggggccggcgacgggggcaaagcccctgcaaggtggctgggcacaggtctcttagtcgaggaagtggacaacacggttaccctcattattctcgctgtggtgggcggggtcatcggacttttgatcctcattttgctgatcaagaagctgattatattcatcctcaaaaaaacacgggaaaagaagaaggagtgtctcgtgtcttccagtggcaatgataacacggagaatggattgccggggagcaaggccgaggagaagccaccatccaaagtctag

SEQ ID NO: 53344 - DNA, 285 bp, Artificial Sequence
  derived and/or modified sequence
atgcctggagctggagatggcggcaaggccccagcccgctggctgggcaccggcctgctggtggaggaggtggacaacacagtgaccctcatcatcctggccgtggtgggcggcgtcatcggcctgctgatcctgatcctgctgatcaagaagctgatcatcttcatcctgaagaagacccgggagaagaagaaggagtgcctggtgagcagcagtggaaatgacaacacagaaaatggcctgcccggcagcaaggccgaggagaagccacccagcaaggtgtag

SEQ ID NO: 53345 - DNA, 285 bp, Artificial Sequence
  derived and/or modified sequence
atgcccggcgccggcgacggcggcaaggcccccgcccggtggctgggcacgggcctgcttgttgaggaagtggacaataccgtcaccctgatcatcctcgccgtggtaggaggggttattgggttactgatcctcatccttctgatcaaaaagctgattatttttatcctgaagaaaaccagggagaaaaagaaagagtgcctggtgagttcctcgggcaacgataacaccgaaaacggcctgcctgggtccaaagcagaggaaaaaccaccctccaaggtttag

SEQ ID NO: 53346 - DNA, 285 bp, Artificial Sequence
  derived and/or modified sequence
atgccaggcgctggggacggcggaaaggcacccgcaagatggctcgggaccggtttgctggtggaagaagtggacaacaccgtgacattaattatattggcagttgtaggtggtgtgattggcctccttatactgattctcctgatcaagaagctgatcatttttatcctcaaaaaaacaagagaaaagaaaaaagagtgtctagtctcttcatccggaaatgataatacagaaaatggtctgcctggaagtaaggcagaagagaaacctcccagcaaagtgtag

SEQ ID NO: 53347 - DNA, 566 bp, Artificial Sequence
  derived and/or modified sequence
agcagccggctcccagcagcgggcgagcgcgcctccccctccgctccctccctccccctcctctcgctctctgcccgctaactttcccgagccccgaccggcggcgcagagctccggggtagctttgtggccgaacgccgacctcgggcggagagcgcggctgtgcccagtatcccatccccgcgacccccgcgcgctccggagagaacaggactatgcccggggctggggacggaggcaaagccccggcgagatggctgggcactgggcttttggtggaagaagtggacaacacagtgacactcatcatcctggctgtcgtgggcggggtcatcgggctcctcatcctcatcctgctgatcaagaaactcatcatcttcatcctgaagaagactcgggagaagaagaaggagtgtctcgtgagctcctcggggaatgacaacacggagaacggcttgcctggctccaaggcagaggagaaaccaccttcaaaagtgtgagccctgcttcgggctgagcagctgcagggagccccctttctgatgatgaaactgatgcttgagccc

SEQ ID NO: 53348 - DNA, 285 bp, Artificial Sequence
  derived and/or modified sequence
atgcccggcgccggcgacggcggcaaggcccccgccagatggctgggcaccggcctgctggtggaggaggtggacaacaccgtgaccctgatcatcctggccgtggtgggcggcgtgatcggcctgctgatcctgatcctgctgatcaagaagctgatcatcttcatcctgaagaagaccagagagaagaagaaggagtgcctggtgagcagcagcggcaacgacaacaccgagaacggcctgcccggcagcaaggccgaggagaagccccccagcaaggtgtag

SEQ ID NO: 53349 - protein, 296 aa, Artificial Sequence
  derived and/or modified sequence
MERAVPLAVPLGQTEVFQALQRLHMTIFSQSVSPCGKFLAAGNNYGQIAIFSLSSALSSEAKEESKKPVVTFQAHDGPVYSMVSTDRHLLSAGDGEVKAWLWAEMLKKGCKELWRRQPPYRTSLEVPEINALLLVPKENSLILAGGDCQLHTMDLETGTFTRVLRGHTDYIHCLALRERSPEVLSGGEDGAVRLWDLRTAKEVQTIEVYKHEECSRPHNGRWIGCLATDSDWMVCGGGPALTLWHLRSSTPTTIFPIRAPQKHVTFYQDLVLTAAGNSCRVDVFTNLGYRAFSLSF

SEQ ID NO: 53350 - DNA, 891 bp, Artificial Sequence
  derived and/or modified sequence
atggagcgggctgtccccctggcagtcccactcggccaaacggaggtgtttcaagccctgcagcgcctgcacatgaccatattttctcagagtgtcagcccttgtggtaagtttctggctgcaggcaacaactacgggcagattgcgatattttctctcagctccgctctgagcagtgaggctaaggaggaatcaaaaaaacccgtggtgaccttccaagcccacgacgggcctgtgtattcaatggttagcaccgatcgccatctgttaagtgccggtgacggcgaagtcaaagcctggttgtgggccgaaatgctcaaaaaggggtgcaaggagctgtggcggaggcagccaccatacaggacaagtctcgaggtgcccgagattaatgcacttctcctggtgcccaaggaaaacagcttgattcttgctgggggagactgtcaattacataccatggatctagaaaccggaacattcacaagagtccttagaggacacactgattatattcattgtcttgcactgcgggagaggagcccggaggtcctgtccggaggggaagacggggcagtgaggctctgggatcttcgaacagcaaaggaggtgcagactattgaagtatataaacatgaggagtgttcgcgtccgcataacggcagatggatcggttgcctcgcaaccgattctgactggatggtgtgtgggggaggaccagctcttaccctttggcatctgcggtcttctactcccaccaccatattccccatcagagctccccagaagcacgtgactttctatcaggatttagtactgacagcagccgggaacagctgccgggtcgatgtctttacgaatctcggctacagggcgttttctctcagcttctag

SEQ ID NO: 53351 - DNA, 891 bp, Artificial Sequence
  derived and/or modified sequence
atggagagagctgtgcccctggccgtgcccctgggccagacagaggtgttccaggccctgcagaggctgcacatgaccatcttcagccagagcgtgagcccctgtgggaagttcctggccgccggcaacaactacggccagatcgccatcttcagcctgagcagcgccctgagcagcgaggccaaggaggagagcaagaagcctgtggtgaccttccaggcccatgatggccctgtgtacagcatggtgtccacagacagacacctgctgtctgctggagatggagaggtgaaggcctggctgtgggccgagatgctgaagaagggctgcaaggagctgtggaggcggcagcccccctaccgcaccagcctggaggtgcctgagatcaatgccctgctgctggtgcccaaggagaacagcctcatcctggccggcggggactgccagctgcacaccatggacctggagaccggcaccttcaccagggtgctgcggggccacacagactacatccactgcctggccctgcgggagaggagccctgaggtgctgtctggaggagaagatggagctgtgcggctgtgggacctgaggacagccaaggaggtgcagaccatcgaggtgtacaagcatgaagaatgttcccggccccacaacggccgctggattggctgcctggccacagacagcgactggatggtgtgtggcggcggccctgccctgaccctgtggcacctgcggagcagcacccccaccaccatcttccccatccgggccccccagaagcacgtgaccttctaccaggacctggtgctgacagctgctggcaacagctgccgggtggatgtgttcaccaacctgggctaccgggccttcagcctgtccttctag

SEQ ID NO: 53352 - DNA, 891 bp, Artificial Sequence
  derived and/or modified sequence
atggagcgggccgtgcccctggccgtgcccctgggccagaccgaggtctttcaggctctgcaacgattacacatgactatattctctcaaagtgtcagcccctgtgggaaattcctcgcggccggtaacaactacgggcagatcgccatcttctcactgtcctccgctctgtcttccgaggccaaggaagagtctaaaaagccggtagttacatttcaagcccatgacggacccgtctactccatggtctccaccgacagacatctcctgagtgcaggcgatggagaagtgaaggcttggctgtgggctgagatgctgaaaaaaggctgtaaggagctgtggcgtagacagccgccgtacaggacctcattggaggtgcccgagattaacgctttactgctagtgccaaaggagaatagcctcatcctcgcgggaggagattgccagcttcataccatggacctggaaacaggtacatttacacgcgtgctacgtggacatactgactatatccattgccttgctctccgagagcgctctcctgaagttctctcaggcggtgaggatggcgcagtacgactgtgggacctgcgcaccgctaaagaggtacagactattgaagtctataagcacgaagagtgtagccgacctcacaatggcaggtggatcggctgcctggcgactgactctgattggatggtttgtggcggtggacctgccctcactctttggcatttgcggtcatctacaccaaccactatctttcctatcagggctccccagaaacatgtgacattctatcaagatctcgtactgaccgcagccggtaattcatgcagggtggacgtgtttacaaatttaggatacagggccttctctctatcattctag

SEQ ID NO: 53353 - DNA, 1285 bp, Artificial Sequence
  derived and/or modified sequence
gggcacagccgcgaggttctgcgcgggcgcggaagacgggcggcgcgtggcggaaggcaggcttgctcctcggggtgggggagggtatccggcttaagggggctgcggtggacaccacttcttaatgtcgggggtcttcgcggcgctcacctcggctcctagggttcgggacggtacgcaccagccaccttcgcgccgaaggcggtagggcgccacggagaggaaccgctctaggcacgtaaggcctcgtgaggttgcgtcgcgcgcggagcactctgggacttgtagttctggagatggagcgagctgtgccgctcgcggtgcctctgggtcagacagaggtgttccaggccttgcagcggctccatatgaccatcttctcccagagcgtctcaccatgtgggaagtttctggcggctggcaacaattacgggcagattgccatcttcagcttgtcctctgctttgagctcagaagccaaagaggaaagtaagaagccggtggtgactttccaagcccatgatgggcccgtctatagcatggtttccaccgatcgacatctgcttagtgctggggatggggaggtgaaggcctggctttgggcggagatgctcaagaagggctgtaaggagctgtggcgtcgtcagcctccatacaggaccagcctggaagtgcctgagatcaacgctttgctgctggtccccaaggagaattccctcatcctggctgggggagactgtcagttgcacactatggaccttgaaactgggactttcacgagggtcctccggggccacacagactacatccactgcctggcactgcgggaaaggagcccagaggtgctgtcaggtggcgaggatggagctgttcgactttgggacctgcgcacagccaaggaggtccagacgatcgaggtctataagcacgaggagtgctcgaggccccacaatgggcgctggattggatgtttggcaactgattccgactggatggtctgtggagggggcccagccctcaccctctggcacctccgatcctccacacccaccaccatcttccccatccgggcgccacagaagcacgtcaccttctaccaggacctggtcctgacagctgcaggcaacagctgccgggtggatgtcttcaccaacctgggttaccgagccttctccctgtccttctgatctctgacgacacccccagccagctcagggttttagagtgtttttcattttctttttttttttttttttacaataaagtttcaggcttttttaccatg

SEQ ID NO: 53354 - DNA, 891 bp, Artificial Sequence
  derived and/or modified sequence
atggagcgggcagtgcccctggccgtgcccctaggacagacggaagtattccaggcacttcaacgcctgcatatgacaatctttagtcagagcgtgagtccttgcggaaagttcctagccgcaggaaacaattacggtcagattgccattttttcgctgtcttccgctttgtctagcgaggccaaagaggagtctaagaagcccgtggtgacattccaggctcacgacggcccagtgtactccatggtgtccacagataggcatctgttaagcgctggagacggagaggtcaaagcttggctatgggccgagatgttgaaaaagggctgtaaagaactgtggaggcggcagcctccctatcgcaccagtctcgaggtaccggaaatcaacgcgctgctccttgtgcccaaggagaacagcctcattcttgctggcggagattgccagcttcataccatggacctggaaacgggcacctttaccagagtgttgcgaggacatactgactacatccactgtctggctctgcgggagcgcagtccggaggtcctgagcggtggggaggacggagctgtgaggctgtgggacctgcgcacagccaaggaagtccagactattgaagtttataaacatgaagagtgcagtcgaccgcacaatggcaggtggatcggctgcctcgcaaccgattccgattggatggtgtgtggtggcggacctgccctgaccctgtggcacctccgttcttccaccccaaccacaatctttccaatccgggcaccacagaagcacgttacattctaccaggatctcgtgttgacagctgccggaaatagttgtagggttgacgtttttacgaatttgggataccgggcatttagtctatccttttag

SEQ ID NO: 53355 - DNA, 891 bp, Artificial Sequence
  derived and/or modified sequence
atggagagagccgtgcccctggccgtgcccctgggccagaccgaggtgttccaggccctgcagagactgcacatgaccatcttcagccagagcgtgagcccctgcggcaagttcctggccgccggcaacaactacggccagatcgccatcttcagcctgagcagcgccctgagcagcgaggccaaggaggagagcaagaagcccgtggtgaccttccaggcccacgacggccccgtgtacagcatggtgagcaccgacagacacctgctgagcgccggcgacggcgaggtgaaggcctggctgtgggccgagatgctgaagaagggctgcaaggagctgtggagaagacagcccccctacagaaccagcctggaggtgcccgagatcaacgccctgctgctggtgcccaaggagaacagcctgatcctggccggcggcgactgccagctgcacaccatggacctggagaccggcaccttcaccagagtgctgagaggccacaccgactacatccactgcctggccctgagagagagaagccccgaggtgctgagcggcggcgaggacggcgccgtgagactgtgggacctgagaaccgccaaggaggtgcagaccatcgaggtgtacaagcacgaggagtgcagcagaccccacaacggcagatggatcggctgcctggccaccgacagcgactggatggtgtgcggcggcggccccgccctgaccctgtggcacctgagaagcagcacccccaccaccatcttccccatcagagccccccagaagcacgtgaccttctaccaggacctggtgctgaccgccgccggcaacagctgcagagtggacgtgttcaccaacctgggctacagagccttcagcctgagcttctag

SEQ ID NO: 53356 - protein, 466 aa, Artificial Sequence
  derived and/or modified sequence
MKPHLKQWRQRMLFGIFAWGLLFLLIFIYFTDSNPAEPVPSSLSFLETRRLLPVQGKQRAIMGAAHEPSPPGGLDARQALPRAHPAGSFHAGPGDLQKWAQSQDGFEHKEFFSSQVGRKSQSAFYPEDDDYFFAAGQPGWHSHTQGTLGFPSPGEPGPREGAFPAAQVQRRRVKKRHRRQRRSHVLEEGDDGDRLYSSMSRAFLYRLWKGNVSSKMLNPRLQKAMKDYLTANKHGVRFRGKREAGLSRAQLLCQLRSRARVRTLDGTEAPFSALGWRRLVPAVPLSQLHPRGLRSCAVVMSAGAILNSSLGEEIDSHDAVLRFNSAPTRGYEKDVGNKTTIRIINSQILTNPSHHFIDSSLYKDVILVAWDPAPYSANLNLWYKKPDYNLFTPYIQHRQRNPNQPFYILHPKFIWQLWDIIQENTKEKIQPNPPSSGFIGSFVKIGHIRACSEPRSRDCTPAWTTE

SEQ ID NO: 53357 - DNA, 1401 bp, Artificial Sequence
  derived and/or modified sequence
atgaagccccacctgaagcagtggagacagagaatgctgttcggcatcttcgcctggggcctgctgttcctgctgatcttcatctacttcaccgacagcaaccccgccgagcccgtgcccagcagcctgagcttcctggagaccagaagactgctgcccgtgcagggcaagcagagagccatcatgggcgccgcccacgagcccagcccccccggcggcctggacgccagacaggccctgcccagagcccaccccgccggcagcttccacgccggccccggcgacctgcagaagtgggcccagagccaggacggcttcgagcacaaggagttcttcagcagccaggtgggcagaaagagccagagcgccttctaccccgaggacgacgactacttcttcgccgccggccagcccggctggcacagccacacccagggcaccctgggcttccccagccccggcgagcccggccccagagagggcgccttccccgccgcccaggtgcagagaagaagagtgaagaagagacacagaagacagagaagaagccacgtgctggaggagggcgacgacggcgacagactgtacagcagcatgagcagagccttcctgtacagactgtggaagggcaacgtgagcagcaagatgctgaaccccagactgcagaaggccatgaaggactacctgaccgccaacaagcacggcgtgagattcagaggcaagagagaggccggcctgagcagagcccagctgctgtgccagctgagaagcagagccagagtgagaaccctggacggcaccgaggcccccttcagcgccctgggctggagaagactggtgcccgccgtgcccctgagccagctgcaccccagaggcctgagaagctgcgccgtggtgatgagcgccggcgccatcctgaacagcagcctgggcgaggagatcgacagccacgacgccgtgctgagattcaacagcgcccccaccagaggctacgagaaggacgtgggcaacaagaccaccatcagaatcatcaacagccagatcctgaccaaccccagccaccacttcatcgacagcagcctgtacaaggacgtgatcctggtggcctgggaccccgccccctacagcgccaacctgaacctgtggtacaagaagcccgactacaacctgttcaccccctacatccagcacagacagagaaaccccaaccagcccttctacatcctgcaccccaagttcatctggcagctgtgggacatcatccaggagaacaccaaggagaagatccagcccaacccccccagcagcggcttcatcggcagcttcgtgaagatcggccacatcagagcctgcagcgagcccagaagcagagactgcacccccgcctggaccaccgagtag

SEQ ID NO: 53358 - DNA, 1401 bp, Artificial Sequence
  derived and/or modified sequence
atgaaaccacacttaaagcagtggaggcaaaggatgctcttcggaatcttcgcctggggactgctgttcttactgatctttatctactttaccgattcaaatcccgccgaacccgttccatcctccttatccttcctagaaactcggaggttattgcccgtgcaggggaagcagagagcgattatgggagctgcccacgaaccgtctccccccggagggctggacgctcgacaggcgctgccaagggcccaccccgctgggtctttccacgcaggcccaggtgacttgcaaaagtgggcacagtctcaagacggctttgagcacaaggagtttttttctagtcaagtcggaaggaaaagccagtcagccttttatcctgaggatgacgactatttcttcgccgcgggacagcccggctggcattctcacacacaaggaaccttaggcttcccctctccaggagagcctggcccaagggagggggcgtttcccgccgcccaggtgcagaggcggagggttaagaagaggcaccggagacagcgacggtcccatgtcctggaagaaggagacgacggagataggctctactcttcaatgtctcgcgcattcctgtatcgcctgtggaaaggtaacgtgtcctccaagatgctaaaccccaggttacagaaagcgatgaaggattatctgaccgctaacaaacatggcgttcggtttagaggcaagcgggaggctggactttcacgtgctcagctgctttgtcagctccgttcccgcgccagggtgcgcaccctggatggaacagaggccccgttcagcgctcttggttggaggcgactcgttcccgccgtccccctgtcccagttacacccccggggccttcgcagctgcgccgtggtgatgtccgcaggagcaatcctgaactcttctcttggcgaggagatcgattcacacgacgctgtgcttcggttcaactcagcaccaacacgtggctatgagaaagacgtgggcaacaagactaccataaggattattaattctcagattctcacgaatccttctcatcacttcattgactccagcctgtacaaggatgtgattctagtagcctgggatccggctccttactccgcaaacctgaatctgtggtataagaaacccgattacaacctatttactccctatatacagcacagacagcgcaacccgaatcaacctttctatatcctccacccaaagttcatctggcagctctgggacataatacaagaaaatacgaaggaaaagatccaacccaatccaccctcttcagggttcattgggtcgttcgtgaagatcggccacattagggcatgctccgagcccaggtctagagattgcaccccagcatggacaacagaatag

SEQ ID NO: 53359 - DNA, 1401 bp, Artificial Sequence
  derived and/or modified sequence
atgaagccccacctgaagcagtggaggcagaggatgctgtttggcatctttgcctggggcctgctcttcctgctgatcttcatctacttcacagacagcaacccagctgagcctgtgcccagcagcctgtccttcctggagacccggcggctgctgcctgtgcagggcaagcagagggccatcatgggcgccgcccacgagcccagccccccaggcggcctggatgcccggcaggccctgccccgggcccaccctgctggcagcttccacgccggccctggggacctgcagaagtgggcccagagccaggacggctttgagcacaaggagttcttcagcagccaggtgggcaggaagagccagagcgccttctacccagaagatgatgactacttctttgctgctggccagcccggctggcacagccacacccagggcaccctgggcttccccagccctggagagcccggcccccgggagggcgccttccctgctgcccaggtgcagaggagaagagtgaagaagaggcaccggcggcagaggaggagccacgtgctggaggagggagatgatggagaccggctgtacagctccatgagccgggccttcctgtaccgcctgtggaagggaaatgtgagcagcaagatgctgaacccccggctgcagaaggccatgaaggactacctgacagccaacaagcacggcgtgcgcttccggggcaagcgggaggccggcctgagccgggcccagctgctgtgccagctgcggagccgggcccgggtgaggaccctggatggaacagaggcccccttcagcgccctgggctggaggcggctggtgcctgctgtgcccctgagccagctgcacccccggggcctgcggagctgtgctgtggtgatgtctgctggggccatcctgaacagcagcctgggggaggagattgacagccatgatgctgtgctgcgcttcaacagcgcccccacccggggctatgagaaggatgtgggcaacaagaccaccatccgcatcatcaacagccagatcctgaccaaccccagccaccacttcatcgacagcagcctgtacaaggatgtgatcctggtggcctgggaccctgccccctacagcgccaacctgaacctgtggtacaagaagccagactacaacctcttcaccccctacatccagcaccggcagaggaaccccaaccagcccttctacatcctgcaccccaagttcatctggcagctgtgggacatcatccaggagaacaccaaggagaagatccagcccaacccccccagcagcggcttcatcggcagctttgtgaagattggccacatccgggcctgcagcgagcccaggagccgggactgcaccccagcctggaccacagaatag

SEQ ID NO: 53360 - DNA, 1401 bp, Artificial Sequence
  derived and/or modified sequence
atgaagccccacctgaagcagtggcggcagcggatgctgttcggcatcttcgcctggggcctgctgttcttactcattttcatttatttcactgattccaatccggccgagcccgtaccttcatctttatccttcctcgagacgcgtcgcctccttcctgtgcaggggaaacagcgggcaatcatgggggcggcacacgagccctctcctcccgggggactggatgctcgtcaggctctgccccgggcccacccggctggcagcttccacgctggccctggtgatctacagaaatgggcacagagccaggatggttttgagcacaaagagttctttagttcccaggttgggagaaaatcgcagtcagcattctatcctgaggacgacgactatttcttcgctgccgggcaacctggctggcattcacacacacagggcactctggggttcccttcccctggagagcccggacctcgcgaaggagctttcccggccgcacaagtccaaagacgaagagtgaagaaaagacacaggagacagaggagaagccacgtgttggaagagggggacgatggtgaccgtttatactctagtatgagccgagcctttttgtacaggctatggaagggaaatgtttcttctaaaatgttgaacccacgtctgcagaaggctatgaaagactacctgactgctaataagcacggagtccgattcagggggaagcgggaggccggactgtcccgcgcccagctgttgtgccagcttcgttcacgcgcccgcgtgcgcacactggacggaacagaggctcccttttccgccctggggtggcgtcgactggttcctgcggtgccgctgagccagctgcatcctcgcggtctgcggtcatgtgctgttgtgatgagcgccggcgctatcttaaactcttcattgggtgaagagattgactcccacgacgcagtgctcagatttaacagcgcccctacccgcggttatgagaaagacgtcgggaataagactaccatccgtattattaatagccaaattctaacaaatccatcacatcactttatagattctagcctgtataaggatgtgattctggtggcctgggatccggcaccatatagtgccaacctgaacctttggtataagaaacctgattacaacctttttaccccatatatacaacaccgtcagagaaatcctaaccagccattctacattctccaccctaagtttatctggcagctgtgggacattatccaggaaaacaccaaggaaaagatccagcccaaccctccatcatctggtttcataggctctttcgttaaaattgggcatatcagagcttgttctgagcccaggtcccgtgactgtacccctgcttggaccacggagtag

SEQ ID NO: 53361 - DNA, 1401 bp, Artificial Sequence
  derived and/or modified sequence
atgaaaccacatttaaagcaatggcgtcagaggatgctgttcggcatctttgcctggggattactgttcctgttaatctttatctactttaccgattctaatcctgccgagcccgtgcccagtagcctaagtttcctagaaactcgtcgcttgctccccgtgcagggaaagcaaagggccattatgggagccgcacatgagcctagtccccctggcggactcgatgcaaggcaggccctgccacgagcccatcctgcaggatcctttcatgcagggccaggggacctgcagaagtgggctcagagtcaagacggctttgagcataaggaattcttcagttcacaggtggggcgtaaatctcagagcgctttctaccctgaggacgacgattatttctttgccgctggacaaccaggctggcactctcatacccagggcaccctgggtttcccttctccgggagaacctggtcctcgcgaaggcgctttcccagccgcacaggtccaacggagaagggtaaagaagcggcatcgtagacaaaggagaagtcacgttctggaagagggagacgacggtgatcgactctattcttctatgagccgggctttcctttatagactgtggaaaggaaatgtgtcttccaagatgctgaaccctcggcttcagaaggccatgaaggattatctcacagccaataagcacggtgtgcgctttcggggaaaaagagaggcaggcctttcacgcgctcagctgctatgtcagctccgtagccgagccagggtcagaactctcgatggaacagaggccccattttccgcactaggatggcgtaggctcgtcccagctgtgcctctctcccagttacacccacgcggtctgaggagctgtgcagtggtaatgagcgccggtgccatcctgaactcctcattgggcgaggagattgactcacatgacgccgtgctgaggttcaactctgctcccactcgcggatatgaaaaggacgtgggtaacaaaacaacgatacgcatcatcaattctcagattcttacaaatccatctcaccacttcattgactcctccttgtacaaggacgtgattttggtagcctgggaccccgcaccttattctgcgaatctgaacctctggtacaagaagccagactacaatttgttcacaccctatatccaacaccgccagagaaatcccaatcagcctttttacatccttcatccaaagtttatctggcagctgtgggatattattcaggaaaacacaaaggagaaaatccagccgaacccaccttcctctggcttcatcggctccttcgtaaagattggacacattcgggcatgttccgaaccccgatccagagactgcacacctgcatggacaaccgagtag

SEQ ID NO: 53362 - DNA, 1657 bp, Artificial Sequence
  derived and/or modified sequence
cttccgccggggcaggcgccgggactccctcctggccgcccacagcctgtgcgcattcctgcattcctgccgccgcccgggacccgagtgccccggaggtgtccaggcgcggtgccaggcgggtactgtgcaggttcattctgccacccatctgcattaagacacaaggtgctgaccgcagagacctgccatgaaaccacacttgaagcaatggagacaacgaatgcttttcggaatattcgcttgggggctcctctttttgctgattttcatctacttcaccgacagcaaccccgctgagcctgtacccagctccctctccttcctggagaccaggaggctcctgccggtgcaggggaagcagcgggccatcatgggcgccgcacatgagccctccccgcctgggggcctggacgcacgccaggcgctgccccgcgcccacccagccggttcctttcatgcggggcctggagacctgcagaaatgggcccagtcccaagatgggtttgaacataaagagtttttttcatcccaggtggggagaaaatctcaaagtgctttctacccggaggatgacgactacttttttgctgctggtcagccagggtggcacagccacactcaggggacattgggattcccttcccccggggagccaggcccacgggagggggcttttccggctgcacaggtccagaggaggcgggtgaagaagaggcaccggaggcagagaaggagccacgtgttggaggagggcgacgacggcgacaggctgtactcctccatgtccagggccttcctgtaccggctctggaaggggaacgtctcttccaaaatgctgaacccgcgcctgcagaaggcgatgaaggattacctgaccgccaacaagcacggggtgcgcttccgcgggaagcgggaggccgggctgagcagggcacagctgctgtgccagctgcggagccgcgcgcgcgtgcggacgctggacggcaccgaggcgcccttttctgcgctgggctggcggcgcctggtgcccgccgtgcccctgagccagctgcacccccgcggcctgcgcagctgcgctgtcgtcatgtctgcaggcgcaatcctcaactcttccttgggcgaggaaatagattctcatgatgcggttttgagatttaactctgctcctacacgtggttatgagaaagatgttgggaataaaaccaccatacgcatcattaattcgcagattctgaccaaccccagccatcacttcattgacagttcactgtataaagacgtcattttggtggcctgggaccctgccccatattccgcaaatcttaacctgtggtacaaaaaaccggattacaacctgttcactccatatattcagcatcgtcagagaaacccaaatcagccattttacattcttcatcctaaatttatatggcagctctgggatattatccaggagaacactaaagagaagattcaaccaaacccaccatcttctggtttcattggctcatttgtaaaaattggccatatcagagcttgcagtgagccgagatcacgcgactgcactccagcctggacgacagagtgagactccatctcaaaaaaaaaaaaaaaactggccatataagaaacttaacattcatactgtttaaag

SEQ ID NO: 53363 - protein, 525 aa, Artificial Sequence
  derived and/or modified sequence
MAAPEPARAAPPPPPPPPPPPGADRVVKAVPFPPTHRLTSEEVFDLDGIPRVDVLKNHLVKEGRVDEEIALRIINEGAAILRREKTMIEVEAPITVCGDIHGQFFDLMKLFEVGGSPANTRYLFLGDYVDRGYFSIECVLYLWVLKILYPSTLFLLRGNHECRHLTEYFTFKQECKIKYSERVYEACMEAFDSLPLAALLNQQFLCVHGGLSPEIHTLDDIRRLDRFKEPPAFGPMCDLLWSDPSEDFGNEKSQEHFSHNTVRGCSYFYNYPAVCEFLQNNNLLSIIRAHEAQDAGYRMYRKSQTTGFPSLITIFSAPNYLDVYNNKAAVLKYENNVMNIRQFNCSPHPYWLPNFMDVFTWSLPFVGEKVTEMLVNVLSICSDDELMTEGEDQFDVGSAAARKEIIRNKIRAIGKMARVFSVLREESESVLTLKGLTPTGMLPSGVLAGGRQTLQSATVEAIEAEKAIRGFSPPHRICSFEEAKGLDRINERMPPRKDAVQQDGFNSLNTAHATENHGTGNHTAQ

SEQ ID NO: 53364 - DNA, 1578 bp, Artificial Sequence
  derived and/or modified sequence
atggccgcccccgagcccgccagagccgcccccccccccccccccccccccccccccccccccggcgccgacagagtggtgaaggccgtgcccttcccccccacccacagactgaccagcgaggaggtgttcgacctggacggcatccccagagtggacgtgctgaagaaccacctggtgaaggagggcagagtggacgaggagatcgccctgagaatcatcaacgagggcgccgccatcctgagaagagagaagaccatgatcgaggtggaggcccccatcaccgtgtgcggcgacatccacggccagttcttcgacctgatgaagctgttcgaggtgggcggcagccccgccaacaccagatacctgttcctgggcgactacgtggacagaggctacttcagcatcgagtgcgtgctgtacctgtgggtgctgaagatcctgtaccccagcaccctgttcctgctgagaggcaaccacgagtgcagacacctgaccgagtacttcaccttcaagcaggagtgcaagatcaagtacagcgagagagtgtacgaggcctgcatggaggccttcgacagcctgcccctggccgccctgctgaaccagcagttcctgtgcgtgcacggcggcctgagccccgagatccacaccctggacgacatcagaagactggacagattcaaggagccccccgccttcggccccatgtgcgacctgctgtggagcgaccccagcgaggacttcggcaacgagaagagccaggagcacttcagccacaacaccgtgagaggctgcagctacttctacaactaccccgccgtgtgcgagttcctgcagaacaacaacctgctgagcatcatcagagcccacgaggcccaggacgccggctacagaatgtacagaaagagccagaccaccggcttccccagcctgatcaccatcttcagcgcccccaactacctggacgtgtacaacaacaaggccgccgtgctgaagtacgagaacaacgtgatgaacatcagacagttcaactgcagcccccacccctactggctgcccaacttcatggacgtgttcacctggagcctgcccttcgtgggcgagaaggtgaccgagatgctggtgaacgtgctgagcatctgcagcgacgacgagctgatgaccgagggcgaggaccagttcgacgtgggcagcgccgccgccagaaaggagatcatcagaaacaagatcagagccatcggcaagatggccagagtgttcagcgtgctgagagaggagagcgagagcgtgctgaccctgaagggcctgacccccaccggcatgctgcccagcggcgtgctggccggcggcagacagaccctgcagagcgccaccgtggaggccatcgaggccgagaaggccatcagaggcttcagccccccccacagaatctgcagcttcgaggaggccaagggcctggacagaatcaacgagagaatgccccccagaaaggacgccgtgcagcaggacggcttcaacagcctgaacaccgcccacgccaccgagaaccacggcaccggcaaccacaccgcccagtag

SEQ ID NO: 53365 - DNA, 1578 bp, Artificial Sequence
  derived and/or modified sequence
atggccgctccagaacccgcgcgcgccgcgcccccccctccccccccacctccccctccccccggtgcagatagggtggtaaaagcggtaccctttccgccgacacatcgccttacctcagaggaagtctttgacctcgacggcatccctcgtgtcgacgtactgaaaaaccatttagtgaaggagggaagggtcgatgaagagatagctttacgaattattaacgagggagctgctattctccggagggagaagactatgatcgaggtcgaagctcctattacggtgtgcggcgacatccatgggcagttcttcgaccttatgaagctctttgaggttggcgggtctcctgcaaatacccggtatctattcctcggtgattacgtggacagaggttacttctcgatagaatgcgtcctatacctgtgggtgctgaagatactatacccttcaaccctgttcctgctcaggggaaatcacgagtgcagacacctgaccgaatattttacattcaagcaggaatgcaagatcaaatattctgagcgcgtttacgaggcttgcatggaggctttcgatagcttaccactggccgccctgctgaatcagcagttcttatgcgtgcatggcggcctctctcctgagatccatacattggacgacatccgcaggctggatcggtttaaagagcctcccgcgttcggacctatgtgtgatctgctttggtcagatccatccgaagattttggtaacgagaaaagccaggagcacttctctcataataccgtgcgtggctgctcctatttttacaattatcctgccgtgtgtgaatttttacagaacaacaaccttctttcaatcatccgcgcacatgaagcacaggacgcggggtaccggatgtatagaaaatcacagaccacaggcttcccatcactgataactatattcagtgccccaaactatctggacgtgtacaataataaggccgctgtactgaagtacgaaaataatgtcatgaacatacggcagtttaactgtagtccacatccttactggttgcccaacttcatggacgtatttacgtggagcctgcctttcgtcggcgagaaggtgaccgagatgttagtgaacgttctgagtatatgctctgacgacgaattaatgacagagggtgaagaccagtttgatgtggggtcggccgccgcccgcaaggagattattcggaataaaatcagagctattggcaaaatggccagggtattttccgtgctccgggaggaatccgagtctgtgctcaccctcaagggacttactcctacaggtatgttaccctcaggagtactggctggggggcgacagactctgcagagcgctaccgtggaagccatcgaggcagagaaggctattcgcgggttctctcctccacacagaatatgttcgtttgaggaggccaagggcctggacaggataaacgaacgcatgcctccccgaaaggacgccgtgcagcaggatggattcaatagccttaatacagctcacgcaacagaaaaccatggcaccggcaaccacactgcccaatag

SEQ ID NO: 53366 - DNA, 1578 bp, Artificial Sequence
  derived and/or modified sequence
atggccgcccctgagcccgcccgggccgcccctcctcctcctcctcctcctcctcctcctcctggagctgacagagtggtgaaggctgtgcccttcccccccacccaccggctgaccagcgaggaggtgtttgacctggatggcatcccccgggtggatgtgctgaagaaccacctggtgaaggagggccgggtggatgaggagatcgccctgcgcatcatcaatgaaggagctgccatcctgcggcgggagaagaccatgattgaggtggaggcccccatcaccgtgtgtggggacatccacggccagttctttgacctgatgaagctgtttgaggtgggcggcagccctgccaacacccgctacctgttcctgggggactatgtggaccggggctacttcagcattgaatgtgtgctgtacctgtgggtgctgaagatcctgtaccccagcaccctcttcctgctgcggggcaaccatgaatgtcgccacctgacagagtacttcaccttcaagcaggagtgcaagatcaagtacagcgagcgggtgtatgaggcctgcatggaggcctttgacagcctgcccctggccgccctgctgaaccagcagttcctgtgtgtgcacggcggcctgagccctgagatccacaccctggatgacatccggcggctggaccgcttcaaggagcccccagccttcggccccatgtgtgacctgctgtggagcgaccccagcgaggactttggaaatgagaagagccaggagcacttcagccacaacacagtgcggggctgcagctacttctacaactacccagctgtgtgtgagttcctgcagaacaacaacctgctgagcatcatccgggcccacgaggcccaggatgctggctacaggatgtacaggaagagccagaccaccggcttccccagcctcatcaccatcttcagcgcccccaactacctggatgtgtacaacaacaaggctgctgtgctgaagtatgagaacaacgtgatgaacatccggcagttcaactgcagcccccacccctactggctgcccaacttcatggatgtgttcacctggagcctgccctttgtgggggagaaggtgacagagatgctggtgaatgtgctgagcatctgcagtgatgatgagctgatgacagaaggagaggaccagtttgatgtgggcagcgctgctgccaggaaggagatcatccggaacaagatccgggccatcggcaagatggcccgggtcttctctgtgctgcgggaggagagcgagagcgtgctgaccctgaagggcctgacccccaccggcatgctgcccagcggcgtgctggccggcggccggcagaccctgcagagcgccaccgtggaggccatcgaggccgagaaggccatccggggcttcagccccccccaccgcatctgcagctttgaggaggccaagggcctggaccgcatcaatgaaagaatgccacccaggaaggatgctgtgcagcaggacggcttcaacagcctgaacacagcccacgccacagaaaatcatggaactggaaaccacacagcccagtag

SEQ ID NO: 53367 - DNA, 1578 bp, Artificial Sequence
  derived and/or modified sequence
atggccgcccccgagcccgcccgggccgcccccccccccccccccccgcctccacctccccccggcgcagatcgggtggtgaaagctgttcccttccctcccacacaccgccttacctccgaggaagtatttgacttagatggcatacctcgtgtcgatgttctgaaaaatcacctagttaaggaaggtagagttgacgaggaaattgcactcaggattatcaacgagggagccgccatccttcgccgagagaaaactatgatcgaggtggaggcaccgataacagtctgcggcgacatacacggccaattcttcgacctcatgaagttgttcgaagtcggtggaagccctgcgaacacacggtacctctttctgggggattacgtggaccggggttacttctccattgagtgcgtcctgtatctgtgggttctgaagatcctctatccaagcactcttttcctgctgcgcgggaatcatgaatgtaggcatctgaccgagtacttcacgtttaaacaagagtgcaaaattaagtactccgagagggtttacgaggcatgcatggaggcattcgactccctgcccctggccgccctgctgaaccagcaattcttatgcgtgcacggaggcctcagccctgagattcataccctggacgacattagaagactggacagatttaaagaaccacccgcttttggtcctatgtgcgacttgctctggtcggaccctagtgaggactttggtaatgaaaaatcacaggagcatttttcacacaataccgtacgcggttgctcctatttttacaattatcccgcagtgtgtgaattccttcagaataacaacctcctctctattatcagggcacatgaagctcaagatgcggggtacagaatgtatagaaagagccaaactaccggcttcccctcactgatcactatttttagcgcaccgaactacttagacgtctacaataataaggccgctgtccttaaatatgagaataatgttatgaatattcgtcagttcaattgttctccacatccctactggctgcctaactttatggatgtgttcacctggtctctcccattcgtaggagagaaagtgaccgagatgcttgtcaatgtgttgtctatctgtagtgacgatgaactcatgaccgagggtgaagatcagttcgatgtcgggtctgcagccgcaaggaaggaaatcattagaaacaagattcgcgcaatcggtaaaatggccagagtgttctctgttctgagagaagagagcgaaagcgtgttaaccctaaaaggccttaccccaacaggaatgctcccatcaggggtgctagcaggcggcaggcagactcttcagtcagctaccgtggaggccatcgaagctgagaaggccatccgcggcttttcccccccacatcgaatatgtagtttcgaggaggctaagggcctggataggattaacgaacggatgcccccccgcaaggacgctgtgcagcaggatgggttcaatagcttgaatacagctcacgcgacggagaatcacgggacaggcaaccacaccgctcagtag

SEQ ID NO: 53368 - DNA, 1578 bp, Artificial Sequence
  derived and/or modified sequence
atggccgctcctgaaccagcgagagcagcacctccccctccgcctcctccgcctccaccacccggtgcagaccgtgtcgtgaaggctgttcctttccctcctacacaccgcctgacaagcgaagaggtgttcgatctcgacgggattccgagagtggatgtgctgaaaaatcatctggtcaaagagggaagagtcgacgaggagattgccttgaggataataaacgagggggctgccatcttgcgccgtgaaaagaccatgattgaagtcgaagcgcctatcacggtttgtggcgatattcacgggcagttcttcgatctcatgaagctctttgaggtcggcggatcccccgctaacacccgctatctgtttttaggggactacgtggatcggggttacttttccatcgagtgtgtgctctacctgtgggttctcaagatcctctaccccagtacgctattcctactgaggggaaatcacgagtgtaggcacttaactgaatatttcacattcaaacaggaatgtaaaataaagtatagcgagcgtgtctatgaagcctgcatggaggcctttgacagtctccctctggcagccctgcttaatcagcagtttctctgcgttcatggcggtctatcccccgagatacatactctcgacgatattcgcaggctcgacagattcaaggagccccctgctttcggacccatgtgtgacttgctgtggtccgacccaagcgaagattttggcaatgagaagtctcaggagcacttttcccacaatactgtgcggggttgtagctacttttacaattacccagccgtttgcgaattccttcagaacaacaatctcttgtccatcattagagcccacgaagctcaagatgctggatatagaatgtaccgcaagtcacagactacagggtttccctcacttattaccatcttcagtgcccctaattatttagacgtatataacaataaagctgctgtgctgaaatatgagaataacgtcatgaacatacgccagttcaactgctcgcctcacccctattggttgccaaattttatggacgtctttacctggtccctgcctttcgtcggggaaaaggtcacagagatgctggtgaatgtgcttagtatctgttctgacgacgaactgatgaccgagggagaggaccaatttgacgtgggatcagccgcagctcggaaagagattatcaggaataagattagagccatcggaaagatggcaagagtcttttcagttctcagagaggaaagcgagtccgttctgaccctgaagggacttaccccaacgggtatgctaccatctggtgtgttggctgggggaagacagaccctccagtctgctacggtggaggccatagaagctgagaaagccatacggggattctctccacctcacagaatctgttctttcgaggaggccaagggtctggatcgcattaacgagaggatgcctccgagaaaagacgctgtccagcaggatggttttaacagcctaaacaccgcacatgccacggagaatcatggcacagggaaccacacagctcagtag

SEQ ID NO: 53369 - DNA, 3149 bp, Artificial Sequence
  derived and/or modified sequence
atgccggtcttagcccctctgtagggaaagagggtccgccatgttccccggcggcgccgccgcttggctctggtagccgccgcccccgcccccaaccccgcccggcccagagcctagccgagccccgggcccagcatggccgccccggagccggcccgggctgcaccgcccccacccccgcccccgccgccccctcccggggctgaccgcgtcgtcaaagctgtccctttccccccaacacatcgcttgacatctgaagaagtatttgatttggatgggatacccagggttgatgttctgaagaaccacttggtgaaagaaggtcgagtagatgaagaaattgcgcttagaattatcaatgagggtgctgccatccttcggagagagaaaaccatgatagaagtagaagctccaatcacagtgtgtggtgacatccatggccaattttttgatctgatgaaactttttgaagtaggaggatcacctgctaatacacgatacctttttcttggcgattatgtggacagaggttattttagtatagagtgtgtcttatatttatgggttctgaagattctatacccaagcacattatttcttctgagaggcaaccatgaatgcagacaccttactgaatattttacctttaagcaggaatgtaaaattaagtattcggaaagagtctatgaagcttgtatggaagcttttgatagtttgcctcttgctgcacttttaaaccaacagtttctttgtgttcatggtggactttcaccagaaatacacacactggatgatattaggagattagatagattcaaagagccacctgcatttggaccaatgtgtgacttgttatggtccgatccttctgaagattttggaaatgaaaaatcacaggaacattttagtcacaatacagttcgaggatgttcttatttttataactatccagcagtgtgtgaatttttgcaaaacaataatttgttatcgattattagagctcatgaagctcaagatgcaggctatagaatgtacagaaaaagtcaaactacagggttcccttcattaataacaattttttcggcacctaattacttagatgtctacaataataaagctgctgtattaaagtatgaaaataatgtgatgaatattcgacagtttaactgttctccacatccttactggttgcctaattttatggatgtcttcacgtggtctttaccgtttgttggagaaaaagtgacagaaatgttggtaaatgttctgagtatttgctctgatgatgaactaatgactgaaggtgaagaccagtttgatgtaggttcagctgcagcccggaaagaaatcataagaaacaaaattcgagcaattggcaagatggcaagagtcttctctgttctcagggaggagagtgaaagtgtgctgacactcaagggcctgactcccacagggatgttgcctagtggagtgttagctggaggacggcagaccctgcaaagtgccacagttgaggctattgaggctgaaaaagcaatacgaggattctctccaccacatagaatctgcagttttgaagaggcaaagggtttggataggatcaatgagagaatgccacctcggaaagatgctgtacagcaagatggtttcaattctctgaacaccgcacatgccactgagaaccacgggacgggcaaccatactgcccagtgacccactacttcccagggactctcacatctcgggccccaaatggacagatcacccgaggagctggaggggtcggccaagctgactgtaaatttcacagtctctctgaagaaaccattgtgcttctgagaccctagcccccttcctggatggaggcttgagggccctgggacatgtgctatctgataagattgggtcatcgctgccaaggtggagagcagtgagcaaggggcttggggcaatttccagtggagggcatccacacctccattttatgcttgtggttcacacatttaagtttacaaatcagatttcttttccccttcagtagaattagattttgtttttcaatcatgatttcaaatgcaatcctaagagctaatgtggacttttctttttccatgaaatgtctttaaaggatgaattagcatggtcttaaaatacatttctgaggttactagctgtattttgaattgtgagcaaaatgccgagaaacccagttggcatttatacaaaatgttgacctcaggtctatagttcttaaatgtggctaattctgtaacatagtcttggtattttttaattatgaatgcatatcctatttccaggcaggctctcttacttgaacacaaatccaaaaactaatttagagtcttttttgcccagatcttttaagacttacaccccagagatttaagaagaaaacctctaaatttcaaaattatgaagaattacagaattactcatttaaggtactttaaaagaagtttgtacattgtcaaagtaaattttaattcaaatcatgtctgtaaaacttgacgtattttgtgtatgcatgttttcattttgcaaatatttaatatatagacctatgatgtacaggtacgacatgtataggttacctagatgttatgagaaattttagtttattgtgagtactcaagttgcttagagagccaccagggtgatttgctgctggctttctatcatttttatgttttaatgcaaaggaaattttaaaatgttctggaagtgtttttgattaagcaatgcagcctagaagcaatggttctgttcaatcattcagatgttagtggaagcataaaagtcaagactgcatgttgaaacctttcttttgatagttactgaactgcttggttaaactaaatggaaccatgtgctaatttttcacaattattgacctgtattgattgccactgtagtttggtatttccctttactttggtggcctgcttccctcatgccctggaatacaactcagagctccaggcagcggaaccatctattgttttgtttgccagaaagtgcaccctgtatggtctcctgtctaagttggaaatattatgcatgtgcaggactattcgagtattttataaacagtagcacacaataaattccatgcatgggccgctgctcct

SEQ ID NO: 53370 - protein, 515 aa, Artificial Sequence
  derived and/or modified sequence
MAAPEPARAAPPPPPPPPPPPGADRVVKAVPFPPTHRLTSEEVFDLDGIPRVDVLKNHLVKEGRVDEEIALRIINEGAAILRREKTMIEVEAPITVCGDIHGQFFDLMKLFEVGGSPANTRYLFLGDYVDRGYFSIECVLYLWVLKILYPSTLFLLRGNHECRHLTEYFTFKQECKIKYSERVYEACMEAFDSLPLAALLNQQFLCVHGGLSPEIHTLDDIRRLDRFKEPPAFGPMCDLLWSDPSEDFGNEKSQEHFSHNTVRGCSYFYNYPAVCEFLQNNNLLSIIRAHEAQDAGYRMYRKSQTTGFPSLITIFSAPNYLDVYNNKAAVLKYENNVMNIRQFNCSPHPYWLPNFMDVFTWSLPFVGEKVTEMLVNVLSICSDDELMTEGEDQFDVGSAAARKEIIRNKIRAIGKMARVFSVLREESESVLTLKGLTPTGMLPSGVLAGGRQTLQSAIRGFSPPHRICSFEEAKGLDRINERMPPRKDAVQQDGFNSLNTAHATENHGTGNHTAQ

SEQ ID NO: 53371 - DNA, 1548 bp, Artificial Sequence
  derived and/or modified sequence
atggccgcccccgagcccgccagagccgcccccccccccccccccccccccccccccccccccggcgccgacagagtggtgaaggccgtgcccttcccccccacccacagactgaccagcgaggaggtgttcgacctggacggcatccccagagtggacgtgctgaagaaccacctggtgaaggagggcagagtggacgaggagatcgccctgagaatcatcaacgagggcgccgccatcctgagaagagagaagaccatgatcgaggtggaggcccccatcaccgtgtgcggcgacatccacggccagttcttcgacctgatgaagctgttcgaggtgggcggcagccccgccaacaccagatacctgttcctgggcgactacgtggacagaggctacttcagcatcgagtgcgtgctgtacctgtgggtgctgaagatcctgtaccccagcaccctgttcctgctgagaggcaaccacgagtgcagacacctgaccgagtacttcaccttcaagcaggagtgcaagatcaagtacagcgagagagtgtacgaggcctgcatggaggccttcgacagcctgcccctggccgccctgctgaaccagcagttcctgtgcgtgcacggcggcctgagccccgagatccacaccctggacgacatcagaagactggacagattcaaggagccccccgccttcggccccatgtgcgacctgctgtggagcgaccccagcgaggacttcggcaacgagaagagccaggagcacttcagccacaacaccgtgagaggctgcagctacttctacaactaccccgccgtgtgcgagttcctgcagaacaacaacctgctgagcatcatcagagcccacgaggcccaggacgccggctacagaatgtacagaaagagccagaccaccggcttccccagcctgatcaccatcttcagcgcccccaactacctggacgtgtacaacaacaaggccgccgtgctgaagtacgagaacaacgtgatgaacatcagacagttcaactgcagcccccacccctactggctgcccaacttcatggacgtgttcacctggagcctgcccttcgtgggcgagaaggtgaccgagatgctggtgaacgtgctgagcatctgcagcgacgacgagctgatgaccgagggcgaggaccagttcgacgtgggcagcgccgccgccagaaaggagatcatcagaaacaagatcagagccatcggcaagatggccagagtgttcagcgtgctgagagaggagagcgagagcgtgctgaccctgaagggcctgacccccaccggcatgctgcccagcggcgtgctggccggcggcagacagaccctgcagagcgccatcagaggcttcagccccccccacagaatctgcagcttcgaggaggccaagggcctggacagaatcaacgagagaatgccccccagaaaggacgccgtgcagcaggacggcttcaacagcctgaacaccgcccacgccaccgagaaccacggcaccggcaaccacaccgcccagtag

SEQ ID NO: 53372 - DNA, 1548 bp, Artificial Sequence
  derived and/or modified sequence
atggctgcgcccgagccagccagagctgctccccctccaccgcccccaccccctccgcctcccggtgctgacagagtcgtgaaagcagtcccatttcctcctacccatcggctcacttcagaagaagtgttcgacctggatggcattcctcgggtcgatgtgctcaagaaccacctcgtgaaggagggcagggtagatgaagagatagctctacggatcattaatgagggtgccgcaatattacgtagagaaaaaacgatgatcgaggtcgaggcacctatcacagtctgtggcgacatccacggccaattttttgatctgatgaaactttttgaagttggcggatctcccgctaacaccaggtatctgttcctgggggactacgttgaccgcggatactttagtattgagtgcgtgttgtacctgtgggtcctgaagatcctgtacccaagtactttgtttttgcttcgcggcaatcacgagtgtcgccacttgaccgaatacttcacctttaagcaggagtgcaagattaagtactctgagcgcgtttacgaggcatgtatggaggccttcgattcactacctctggccgcgctattgaatcaacagttcctatgtgtccacgggggcctgtcaccggagattcacaccctggacgatatcaggcgcctggaccggttcaaagaacccccagctttcggacccatgtgtgatctactgtggtcagacccctcagaagactttgggaatgagaagagccaggagcacttcagccataacaccgttaggggatgctcatatttctacaattatcctgccgtatgcgagttcctccagaataacaatctgctgtcaatcatcagggctcacgaagctcaagatgccgggtacaggatgtatcgcaagtcgcagacaacaggttttccaagtctgattactatcttctcagcgcccaattatctcgacgtttataacaataaggctgccgttctaaaatatgaaaacaatgtgatgaacatcagacagtttaactgcagtccccatccatattggctgccaaactttatggacgtctttacctggagcttgccattcgtgggcgagaaggtgaccgaaatgcttgtgaatgtgcttagcatctgcagtgatgatgagctaatgaccgaaggtgaagatcaattcgatgtggggtctgcagccgctcgcaaggagattatcaggaataaaattcgcgcaatcggaaagatggcccgggtgtttagcgtactgcgtgaagaatccgagagcgttcttacactgaaagggctgacacccaccggaatgttgccaagcggcgtgttggccggtggaaggcagaccctgcagagtgccatccggggcttcagcccaccccataggatctgttcattcgaagaagcaaaaggcctcgaccggatcaacgagcggatgccccccagaaaagacgcagtgcaacaagacggcttcaactctctgaatacagctcacgccactgagaaccacggcacgggtaatcacaccgcccaatag

SEQ ID NO: 53373 - DNA, 1548 bp, Artificial Sequence
  derived and/or modified sequence
atggccgcccctgagcccgcccgggccgcccctcctcctcctcctcctcctcctcctcctcctggagctgacagagtggtgaaggctgtgcccttcccccccacccaccggctgaccagcgaggaggtgtttgacctggatggcatcccccgggtggatgtgctgaagaaccacctggtgaaggagggccgggtggatgaggagatcgccctgcgcatcatcaatgaaggagctgccatcctgcggcgggagaagaccatgattgaggtggaggcccccatcaccgtgtgtggggacatccacggccagttctttgacctgatgaagctgtttgaggtgggcggcagccctgccaacacccgctacctgttcctgggggactatgtggaccggggctacttcagcattgaatgtgtgctgtacctgtgggtgctgaagatcctgtaccccagcaccctcttcctgctgcggggcaaccatgaatgtcgccacctgacagagtacttcaccttcaagcaggagtgcaagatcaagtacagcgagcgggtgtatgaggcctgcatggaggcctttgacagcctgcccctggccgccctgctgaaccagcagttcctgtgtgtgcacggcggcctgagccctgagatccacaccctggatgacatccggcggctggaccgcttcaaggagcccccagccttcggccccatgtgtgacctgctgtggagcgaccccagcgaggactttggaaatgagaagagccaggagcacttcagccacaacacagtgcggggctgcagctacttctacaactacccagctgtgtgtgagttcctgcagaacaacaacctgctgagcatcatccgggcccacgaggcccaggatgctggctacaggatgtacaggaagagccagaccaccggcttccccagcctcatcaccatcttcagcgcccccaactacctggatgtgtacaacaacaaggctgctgtgctgaagtatgagaacaacgtgatgaacatccggcagttcaactgcagcccccacccctactggctgcccaacttcatggatgtgttcacctggagcctgccctttgtgggggagaaggtgacagagatgctggtgaatgtgctgagcatctgcagtgatgatgagctgatgacagaaggagaggaccagtttgatgtgggcagcgctgctgccaggaaggagatcatccggaacaagatccgggccatcggcaagatggcccgggtcttctctgtgctgcgggaggagagcgagagcgtgctgaccctgaagggcctgacccccaccggcatgctgcccagcggcgtgctggccggcggccggcagaccctgcagagcgccatccggggcttcagccccccccaccgcatctgcagctttgaggaggccaagggcctggaccgcatcaatgaaagaatgccacccaggaaggatgctgtgcagcaggacggcttcaacagcctgaacacagcccacgccacagaaaatcatggaactggaaaccacacagcccagtag

SEQ ID NO: 53374 - DNA, 1548 bp, Artificial Sequence
  derived and/or modified sequence
atggccgcccccgagcccgcccgggccgccccccccccccccccccctcctcccccaccacctggcgcagacagggtcgttaaagccgtgcctttccccccaacccataggctcacctcggaggaagtgttcgacttagacggcatcccccgagtggacgtcctgaaaaatcacctggtgaaagaaggccgggtggacgaagaaatcgcgttaagaattattaacgagggggctgcgatcttgagacgcgagaaaacaatgatcgaagtcgaagcccccataactgtttgcggcgatattcacgggcagtttttcgacctcatgaaattatttgaggtcgggggaagccccgccaatacaagatacctgttcctcggagactacgttgatcgcgggtatttttcgatagaatgtgtgctctacctctgggtgctgaagattctgtaccctagcactttgttcctgcttcgagggaaccacgagtgccggcatctgaccgaatattttaccttcaaacaggaatgcaaaattaaatactccgaacgggtctatgaggcttgcatggaagccttcgattcacttcctctagccgctctactgaatcaacaattcctgtgtgtacatggcggcttgagtcctgaaattcatacattggacgacattaggaggctagaccggttcaaagaaccccccgcattcggacctatgtgcgacctgctgtggtccgatccctccgaggactttggcaatgagaagagccaggagcacttctctcataataccgtgagagggtgttcgtacttctataattaccccgccgtgtgtgaatttctgcaaaacaataacctcctgagcataataagggctcatgaagcgcaagacgctggctatcgcatgtataggaagagccaaactacaggcttcccatccctgattactattttttcagcaccaaattatctggacgtctacaataacaaagccgccgtgctgaagtacgagaacaacgtgatgaatatccgacaattcaattgctcaccccatccatactggcttcccaactttatggatgtgtttacgtggtctctgccgttcgtcggagaaaaagttaccgaaatgcttgtgaatgtcctgagtatctgttccgacgatgagctgatgaccgagggggaggaccaattcgacgtcgggtccgctgccgcccgcaaggagattatcagaaataagattagagcgatcgggaaaatggccagggtgtttagtgttctgcgcgaggaatcagaaagcgtgctgaccttgaagggattaacaccaaccgggatgctgccgagcggcgtgttagcaggcggtcgtcagacactgcagtcggctatccgaggcttttcacctccacataggatctgttcatttgaagaggctaaggggctggatcggattaacgagcgaatgcccccaagaaaggacgcggtgcagcaggatggatttaattctctgaatacggcacatgcgactgagaaccacggcaccggaaaccataccgcacagtag

SEQ ID NO: 53375 - DNA, 1548 bp, Artificial Sequence
  derived and/or modified sequence
atggccgcaccggaaccagctcgggctgctccccctccacctccacctcctcctccaccgcctggcgctgaccgcgtggttaaagcggtgcctttcccccctacacatcgcctgacctcagaggaggtgtttgacctggatggcattcccagggtcgatgttttaaagaaccacctggtaaaagaggggagagtagatgaggaaattgccttacgaattattaatgagggcgctgcaatacttcggagagagaagaccatgattgaggtggaagctcctattacggtgtgcggcgacattcacggacaatttttcgacctgatgaaattgttcgaggtgggcggaagtccggctaatacgcggtacctgttcctgggtgattatgtggacagagggtactttagcatagagtgcgtgctctatctgtgggttctcaagatcctatacccaagcacactgttcctcctgagaggcaatcacgagtgtcgacatttaactgaatattttaccttcaaacaggagtgtaaaattaaatacagtgagcgggtctacgaagcatgtatggaagccttcgatagcctgccactggctgcactgttaaaccagcaatttttgtgcgtgcacgggggactgagtccggagatccacactctggacgatattcgaagactggatcggttcaaggaaccgcctgcattcggcccaatgtgtgatttgctgtggagcgatcccagtgaagactttgggaacgaaaaaagccaggaacatttttctcataacacggtgcggggttgtagctatttctataattacccagcggtttgtgagttcctccaaaataataatctgttatccatcattcgagcacatgaggctcaggatgctggttatcggatgtacaggaaaagtcagaccacgggattccctagtctgatcaccatcttctcagctcccaactaccttgatgtgtataacaataaggctgcagtcctgaaatacgaaaacaatgtgatgaacatcaggcaatttaactgttcccctcatccttactggctgcctaatttcatggacgttttcacgtggtccttaccattcgtaggcgagaaagttaccgaaatgctcgtcaatgtattgtctatttgctccgatgatgaactcatgacagaaggagaagaccagtttgacgttggaagtgcagccgcaaggaaagagattattcgaaataaaatccgggcaatcggaaaaatggcccgagtcttcagtgtcctgcgcgaagagagtgaatcagttctgacacttaagggcttgactccaaccggaatgttgccctctggagttctcgctgggggaagacagaccctgcagtccgccatccgaggtttttcaccccctcaccgaatctgcagtttcgaggaggccaaaggcctggataggattaatgaaagaatgccaccaagaaaagacgcagtgcaacaagacggatttaactccctgaatactgcgcatgctacagagaaccacggcactggtaatcacactgcacagtag

SEQ ID NO: 53376 - DNA, 3119 bp, Artificial Sequence
  derived and/or modified sequence
atgccggtcttagcccctctgtagggaaagagggtccgccatgttccccggcggcgccgccgcttggctctggtagccgccgcccccgcccccaaccccgcccggcccagagcctagccgagccccgggcccagcatggccgccccggagccggcccgggctgcaccgcccccacccccgcccccgccgccccctcccggggctgaccgcgtcgtcaaagctgtccctttccccccaacacatcgcttgacatctgaagaagtatttgatttggatgggatacccagggttgatgttctgaagaaccacttggtgaaagaaggtcgagtagatgaagaaattgcgcttagaattatcaatgagggtgctgccatccttcggagagagaaaaccatgatagaagtagaagctccaatcacagtgtgtggtgacatccatggccaattttttgatctgatgaaactttttgaagtaggaggatcacctgctaatacacgatacctttttcttggcgattatgtggacagaggttattttagtatagagtgtgtcttatatttatgggttctgaagattctatacccaagcacattatttcttctgagaggcaaccatgaatgcagacaccttactgaatattttacctttaagcaggaatgtaaaattaagtattcggaaagagtctatgaagcttgtatggaagcttttgatagtttgcctcttgctgcacttttaaaccaacagtttctttgtgttcatggtggactttcaccagaaatacacacactggatgatattaggagattagatagattcaaagagccacctgcatttggaccaatgtgtgacttgttatggtccgatccttctgaagattttggaaatgaaaaatcacaggaacattttagtcacaatacagttcgaggatgttcttatttttataactatccagcagtgtgtgaatttttgcaaaacaataatttgttatcgattattagagctcatgaagctcaagatgcaggctatagaatgtacagaaaaagtcaaactacagggttcccttcattaataacaattttttcggcacctaattacttagatgtctacaataataaagctgctgtattaaagtatgaaaataatgtgatgaatattcgacagtttaactgttctccacatccttactggttgcctaattttatggatgtcttcacgtggtctttaccgtttgttggagaaaaagtgacagaaatgttggtaaatgttctgagtatttgctctgatgatgaactaatgactgaaggtgaagaccagtttgatgtaggttcagctgcagcccggaaagaaatcataagaaacaaaattcgagcaattggcaagatggcaagagtcttctctgttctcagggaggagagtgaaagtgtgctgacactcaagggcctgactcccacagggatgttgcctagtggagtgttagctggaggacggcagaccctgcaaagtgcaatacgaggattctctccaccacatagaatctgcagttttgaagaggcaaagggtttggataggatcaatgagagaatgccacctcggaaagatgctgtacagcaagatggtttcaattctctgaacaccgcacatgccactgagaaccacgggacgggcaaccatactgcccagtgacccactacttcccagggactctcacatctcgggccccaaatggacagatcacccgaggagctggaggggtcggccaagctgactgtaaatttcacagtctctctgaagaaaccattgtgcttctgagaccctagcccccttcctggatggaggcttgagggccctgggacatgtgctatctgataagattgggtcatcgctgccaaggtggagagcagtgagcaaggggcttggggcaatttccagtggagggcatccacacctccattttatgcttgtggttcacacatttaagtttacaaatcagatttcttttccccttcagtagaattagattttgtttttcaatcatgatttcaaatgcaatcctaagagctaatgtggacttttctttttccatgaaatgtctttaaaggatgaattagcatggtcttaaaatacatttctgaggttactagctgtattttgaattgtgagcaaaatgccgagaaacccagttggcatttatacaaaatgttgacctcaggtctatagttcttaaatgtggctaattctgtaacatagtcttggtattttttaattatgaatgcatatcctatttccaggcaggctctcttacttgaacacaaatccaaaaactaatttagagtcttttttgcccagatcttttaagacttacaccccagagatttaagaagaaaacctctaaatttcaaaattatgaagaattacagaattactcatttaaggtactttaaaagaagtttgtacattgtcaaagtaaattttaattcaaatcatgtctgtaaaacttgacgtattttgtgtatgcatgttttcattttgcaaatatttaatatatagacctatgatgtacaggtacgacatgtataggttacctagatgttatgagaaattttagtttattgtgagtactcaagttgcttagagagccaccagggtgatttgctgctggctttctatcatttttatgttttaatgcaaaggaaattttaaaatgttctggaagtgtttttgattaagcaatgcagcctagaagcaatggttctgttcaatcattcagatgttagtggaagcataaaagtcaagactgcatgttgaaacctttcttttgatagttactgaactgcttggttaaactaaatggaaccatgtgctaatttttcacaattattgacctgtattgattgccactgtagtttggtatttccctttactttggtggcctgcttccctcatgccctggaatacaactcagagctccaggcagcggaaccatctattgttttgtttgccagaaagtgcaccctgtatggtctcctgtctaagttggaaatattatgcatgtgcaggactattcgagtattttataaacagtagcacacaataaattccatgcatgggccgctgctcct

SEQ ID NO: 53377 - protein, 209 aa, Artificial Sequence
  derived and/or modified sequence
MDLKALLSSLNDFASLSFAESWDNVGLLVEPSPPHTVNTLFLTNDLTEEVMEEVLQKKADLILSYHPPIFRPMKRITWNTWKERLVIRALENRVGIYSPHTAYDAAPQGVNNWLAKGLGACTSRPIHPSKAPNYPTEGNHRVEFNVNYTQDLDKVMSAVKGIDGVSVTSFSARTGNEEQTRINLNCTQKALMQVVDFLSRNKQLYQKTE

SEQ ID NO: 53378 - DNA, 1053 bp, Artificial Sequence
  derived and/or modified sequence
atggacttgaaagcactgctgtcttcgctcaatgactttgccagcctgtctttcgctgagagttgggacaacgtcggcctcctggtcgaaccttctcccccacacacagtaaatacattgtttcttactaatgatctgacagaggaagtgatggaggaggtgcttcagaagaaggcagacttgatcctgtcttaccatcctccaatttttcggccgatgaagcgcattacctggaacacctggaaagagaggttggttataagggccttggaaaaccgagtggggatctacagtccacatactgcttacgacgcagccccccaaggggtgaacaattggctcgccaaaggcttgggggcctgcacctcaagacccatccacccctctaaggcgcccaattacccaacagagggaaatcaccgagtggaattcaacgtgaactacactcaagatctggacaaggtgatgtcagctgtcaagggaattgatggggtaagcgtcacttcattttccgctcggacaggcaacgaggaacaaacccgtattaacctaaactgcacacaaaaggcactgatgcaagtcgtagattttctttcaaggaataagcaactgtaccagaagactgagattctctctctcgagaaacccctccttttacataccgggatggggcgcctctgtaccctggacgagtcagttagcctcgcaactatgattgaccgtatcaaacgccatctgaagctgagccatattaggcttgccctcggcgtgggtcgcacccttgagtctcaagtgaaggtggtcgctttgtgcgcaggttccggtagttcagtcctgcagggagtggaggccgacctttaccttaccggtgaaatgtctcaccacgacacactggacgcagcatcccaaggaattaatgtaatcttatgtgaacactctaataccgagcgaggattcctgtcagatctgcgggatatgcttgattcccatctggagaacaagattaacattattctctcggaaaccgaccgcgatcctctacaggtcgtgtag

SEQ ID NO: 53379 - DNA, 1053 bp, Artificial Sequence
  derived and/or modified sequence
atggacctgaaggccctgctgagcagcctgaatgactttgccagcctgagctttgctgagagctgggacaacgtgggcctgctggtggagcccagccccccccacacagtgaacaccctcttcctgaccaatgacctgacagaggaggtgatggaggaggtgctgcagaagaaggctgacctgatcctgagctaccacccccccatcttccggcccatgaagaggatcacctggaacacctggaaggagcggctggtgatccgggccctggagaacagagtgggcatctacagcccccacacagcctatgatgctgccccccagggcgtgaacaactggctggccaagggcctgggcgcctgcaccagccggcccatccaccccagcaaggcccccaactaccccacagagggcaaccaccgggtggagttcaacgtgaactacacccaggacctggacaaggtgatgtctgctgtgaagggcattgatggagtgtctgtgaccagcttcagcgccaggactggaaatgaggagcagacccgcatcaacctgaactgcacccagaaggccctgatgcaggtggtggacttcctgagcaggaacaagcagctgtaccagaagacagagatcctgagcctggagaagcccctgctgctgcacacaggcatgggccgcctgtgcaccctggatgagagcgtgtccctggccaccatgattgaccgcatcaagaggcacctgaagctgagccacatccggctggccctgggcgtgggccgcaccctggagagccaggtgaaggtggtggccctgtgtgccggcagcggcagctctgtgctgcagggcgtggaggccgacctgtacctgactggagagatgagccaccacgacaccctggatgctgccagccagggcatcaacgtcatcctgtgtgagcacagcaacacagagcggggcttcctgagtgacctgcgggacatgctggacagccacctggagaacaagatcaacatcatcctgtctgaaacagaccgggaccccctgcaggtggtgtag

SEQ ID NO: 53380 - DNA, 1053 bp, Artificial Sequence
  derived and/or modified sequence
atggacctgaaggccctgctgagcagcctgaacgacttcgccagcctttccttcgccgaatcgtgggacaacgttggtctgttggtggaacctagtcctccacacactgtgaacactctctttctgaccaacgatttgaccgaggaagttatggaagaggtcctccagaagaaggcggatttgatcctgtcttaccatccgcccatttttagacccatgaagaggattacctggaacacttggaaggagagattagtaatccgagctttagagaaccgggttggtatttacagtccccacacggcctatgacgccgcccctcagggggtgaataactggctggcgaaaggcctgggcgcatgtacgtcacggccgattcatcccagcaaggcccccaactaccccaccgaaggaaatcaccgggttgaattcaatgttaattacactcaggatctggataaggtgatgagcgctgtcaagggcatcgatggagtgtcagtgactagttttagcgccaggacgggcaatgaagaacagacgcgaattaatctcaattgcacgcagaaagcgctcatgcaggtggtcgattttctcagtaggaataaacaattgtatcaaaagacagagattctcagtcttgagaagcccctgctgctgcacacaggcatgggccgattatgtacattagacgaaagtgtctcgctcgccacaatgattgacaggatcaaaaggcatttgaaactctcacacatcagactcgcactgggtgtggggcgaactctggagagtcaggttaaggtggtagccttgtgcgcaggctccggcagcagcgtgttgcagggagttgaagccgatctgtacctgaccggagaaatgtctcaccacgatacgctggacgctgcttcccagggtatcaatgtgatcctctgtgagcatagcaatacagagagaggttttctatccgaccttcgcgacatgctggactctcatcttgaaaataaaatcaatattatccttagtgaaaccgatagagatcccctgcaggtagtttag

SEQ ID NO: 53381 - DNA, 1053 bp, Artificial Sequence
  derived and/or modified sequence
atggacctgaaagcactgctttcatctctgaacgattttgcctcattgtccttcgcggagtcgtgggataacgttggtctgctggttgaaccctccccgccacacaccgtgaatactctgtttttaactaacgatctgacggaggaggtcatggaagaggtgttgcaaaaaaaggcggacctgattctgtcgtaccatccgccaattttccgacccatgaaacgtatcacatggaacacctggaaggaaaggctggtgatcagggccctcgagaatagagttggcatttactctcctcacaccgcttacgatgccgcaccccagggcgtgaataactggttagccaagggcctgggcgcatgcacgtctcggccaattcacccaagcaaggctcctaattatcctaccgagggtaatcaccgggtggaattcaatgtgaattacactcaggatttggacaaagttatgtcagctgtcaagggcatcgacggagtgtctgttacatcgttttctgctaggacaggtaacgaagagcaaacaagaatcaatctgaattgcacacagaaagctctgatgcaagtcgtcgatttcctgtcaagaaataagcagctgtaccagaaaactgaaattttgtcacttgagaaacctctgctcctgcacacggggatgggaagattgtgcacgctcgatgaatcggtgtccctagcgacaatgatagataggataaaacggcacctcaagttgtcccacatccgtctggcccttggcgtcgggaggaccctagagtcccaggtgaaggtcgtcgccctgtgcgccggaagtggttcaagcgttctacagggagtggaggccgatctgtaccttacgggcgagatgagccaccacgatacgctggacgctgcatcccaggggatcaacgtgattctgtgtgaacattccaatacagaacgaggatttctctcagatttacgtgacatgctcgattcccatctggaaaataaaattaacattatattgtcggagacggacagagatcctttgcaggtcgtctag

SEQ ID NO: 53382 - DNA, 1053 bp, Artificial Sequence
  derived and/or modified sequence
atggacctgaaggccctgctgagcagcctgaacgacttcgccagcctgagcttcgccgagagctgggacaacgtgggcctgctggtggagcccagccccccccacaccgtgaacaccctgttcctgaccaacgacctgaccgaggaggtgatggaggaggtgctgcagaagaaggccgacctgatcctgagctaccacccccccatcttcagacccatgaagagaatcacctggaacacctggaaggagagactggtgatcagagccctggagaacagagtgggcatctacagcccccacaccgcctacgacgccgccccccagggcgtgaacaactggctggccaagggcctgggcgcctgcaccagcagacccatccaccccagcaaggcccccaactaccccaccgagggcaaccacagagtggagttcaacgtgaactacacccaggacctggacaaggtgatgagcgccgtgaagggcatcgacggcgtgagcgtgaccagcttcagcgccagaaccggcaacgaggagcagaccagaatcaacctgaactgcacccagaaggccctgatgcaggtggtggacttcctgagcagaaacaagcagctgtaccagaagaccgagatcctgagcctggagaagcccctgctgctgcacaccggcatgggcagactgtgcaccctggacgagagcgtgagcctggccaccatgatcgacagaatcaagagacacctgaagctgagccacatcagactggccctgggcgtgggcagaaccctggagagccaggtgaaggtggtggccctgtgcgccggcagcggcagcagcgtgctgcagggcgtggaggccgacctgtacctgaccggcgagatgagccaccacgacaccctggacgccgccagccagggcatcaacgtgatcctgtgcgagcacagcaacaccgagagaggcttcctgagcgacctgagagacatgctggacagccacctggagaacaagatcaacatcatcctgagcgagaccgacagagaccccctgcaggtggtgtag

SEQ ID NO: 53383 - protein, 285 aa, Artificial Sequence
  derived and/or modified sequence
MLSSCVRPVPTTVRFVDSLICNSSRSFMDLKALLSSLNDFASLSFAESWDNVGLLVEPSPPHTVNTLFLTNDLTEEVMEEVLQKKADLILSYHPPIFRPMKRITWNTWKERLVIRALENRVGIYSPHTAYDAAPQGVNNWLAKGLGACTSRPIHPSKAPNYPTEGNHRVEFNVNYTQDLDKVMSAVKGIDGVSVTSFSARTGNEEQTRINLNCTQKALMQVVDFLSRNKQLYQKTEILSLEKSLKSKSWPCVLVLGAAFCRVLRLTFTSQVRCPIMILWMLLPKE

SEQ ID NO: 53384 - DNA, 759 bp, Artificial Sequence
  derived and/or modified sequence
atgctctcctcatgtgttcgtccagtaccaaccacagtcagattcgtggatagtttaatctgtaatagcagtagatcatttatggatctaaaggccttgctcagcagcctgaacgattttgccagcttgtccttcgccgagtcttgggataacgttggcttactggtggagcccagtccaccccacactgtgaacaccctttttttaactaatgatctcaccgaggaggttatggaagaggtgctgcagaagaaagcggacctgatcttatcttaccaccctccgatttttaggcctatgaagcggattacttggaatacctggaaagagaggcttgtgattagagctctggagaacagagttggaatctattcacctcatacagcctatgatgcagcaccgcagggggtgaacaactggctcgcaaagggtctcggggcctgcacctcccggccaatccacccctctaaagcccctaactatcctaccgagggcaatcatcgggtggaattcaacgtgaactatacacaagacctggacaaagtaatgtcagctgtaaaggggatcgacggggtaagtgttacctcttttagcgccaggaccggcaacgaagagcagacaaggatcaatctgaactgcacccagaaagcgctgatgcaggtggtggatttcctttcgcgcaataaacagctgtatcagaagcatcaggacaacaccttctataaatccgccgggtgtcagcttaaatttgtgacatag

SEQ ID NO: 53385 - DNA, 489 bp, Artificial Sequence
  derived and/or modified sequence
atggacctgaaggcactcctatcttctctgaacgacttcgcatccctgtcctttgccgaatcctgggataatgttggactgctagtagaaccaagcccgccccacaccgtgaataccctgtttctgacaaatgatctgacagaggaggttatggaagaggtcctacagaaaaaggctgatctgattctgagttaccacccccccatcttccgtcctatgaagaggatcacgtggaatacctggaaggagcgtctggttattcgggccttggagaatcgagtgggtatatactcccctcatacagcctatgacgctgcaccgcagggcgtgaacaattggttggccaaaggactgggagcttgcaccagtagacctatccatccctcaaaggcacctaattacccaaccgagggaaaccatcgcgtagagttcaacgtgaactacacccaggacttagacaaagtcatgtctgccgttaaaggaatctag

SEQ ID NO: 53386 - DNA, 858 bp, Artificial Sequence
  derived and/or modified sequence
atgctctcctcttgtgtcagacctgtgccgactacagtgcgattcgttgacagtctcatttgtaactcatccagatcctttatggaccttaaggccctgctctcgtccctgaatgactttgcatcactttcatttgcagagtcttgggataatgtcggcctgctggtcgagccctctccgcctcacacagtaaacacgctgtttctaacaaacgatctcaccgaagaagttatggaagaggtcctacagaaaaaggcagatcttattctatcctaccacccccccatctttaggcctatgaaaaggattacctggaacacatggaaggagagattggttattcgcgcactcgagaatcgggtaggcatttatagcccccataccgcctacgatgcagccccccaaggagtcaacaattggctggctaaaggtcttggagcatgcactagcagacccatccacccttccaaggctccaaattaccctacagaggggaatcatagggtagaatttaatgtgaattacacgcaagacctcgacaaggtgatgagtgcagtgaaaggcattgatggtgtgagcgtaacaagtttcagcgcgcggacaggtaatgaggagcagactcgcatcaatctgaactgcactcaaaaagccctgatgcaagtcgtggatttcctatccaggaataagcagctataccagaaaacagagatcctgtctctcgaaaagagcttgaagagcaagtcttggccttgtgtgctcgtgctcggcgcagccttttgccgcgttcttcggcttactttcacatctcaagtccgctgccccatcatgatcctgtggatgttactcccaaaagagtag

SEQ ID NO: 53387 - DNA, 630 bp, Artificial Sequence
  derived and/or modified sequence
atggaccttaaggcattacttagtagtttgaacgacttcgcttcactgtctttcgcagagagctgggacaatgttggcctgctggtagagccctctccaccccatacagtcaacactctgttcctgaccaacgatctgacggaggaggtgatggaagaagtactccagaaaaaagcagacctcatcttatcctaccaccctcccatcttccgtcctatgaagaggattacctggaatacctggaaagagaggttagttataagggcattagagaatagagtggggatttatagcccacatacagcttatgatgcagcacctcagggtgttaacaactggctggctaagggcctgggcgcctgtacttcacgacctatccatccttcaaaggcacccaactacccaacagagggaaaccacagggtggaattcaacgtaaactacacccaagacctagataaggttatgtcggcggttaagggcattgatggagtatctgtcacctccttcagtgccagaactggcaacgaagaacagaccagaatcaaccttaactgtacccaaaaggccttaatgcaagttgtggactttctcagcagaaataagcaactgtaccagaaaaccgaatag

SEQ ID NO: 53388 - DNA, 492 bp, Artificial Sequence
  derived and/or modified sequence
atgctgtcttcttgcgtgcgcccagtgccaacaactgttaggttcgttgacagtcttatctgcaattcatctcgatcctttatggatctcaaagctttattgtcatccctgaacgacttcgcgtctctgtctttcgcagaaagctgggataacgtgggcttactcgtcgagccaagtcctcctcacactgtaaacaccctgttcttgaccaatgacctcaccgaagaggttatggaggaggtgctccagaaaaaggctgacttgatcttgtcctaccatccccctatctttcggccgatgaagcgtattacttggaacacatggaaagaaaggttggtgatacgcgcacttgagaatcgagtgggaatttatagcccacacaccgcatatgacgcagcccctcagggcgtgaataactggctcgccaaaggcctaggtgcctgtactagccggcccatacacccaagcaaagctcccaactaccccacgtag

SEQ ID NO: 53389 - DNA, 759 bp, Artificial Sequence
  derived and/or modified sequence
atgctgagcagctgtgtgcggcctgtgcccaccaccgtgcgctttgtggacagcctcatctgcaacagcagccgctccttcatggacctgaaggccctgctgagcagcctgaatgactttgccagcctgagctttgctgagagctgggacaacgtgggcctgctggtggagcccagccccccccacacagtgaacaccctcttcctgaccaatgacctgacagaggaggtgatggaggaggtgctgcagaagaaggctgacctgatcctgagctaccacccccccatcttccggcccatgaagaggatcacctggaacacctggaaggagcggctggtgatccgggccctggagaacagagtgggcatctacagcccccacacagcctatgatgctgccccccagggcgtgaacaactggctggccaagggcctgggcgcctgcaccagccggcccatccaccccagcaaggcccccaactaccccacagagggcaaccaccgggtggagttcaacgtgaactacacccaggacctggacaaggtgatgtctgctgtgaagggcattgatggagtgtctgtgaccagcttcagcgccaggactggaaatgaggagcagacccgcatcaacctgaactgcacccagaaggccctgatgcaggtggtggacttcctgagcaggaacaagcagctgtaccagaagcaccaggacaacaccttctacaagtctgctggctgccagctgaagtttgtgacctag

SEQ ID NO: 53390 - DNA, 489 bp, Artificial Sequence
  derived and/or modified sequence
atggacctgaaggccctgctgagcagcctgaatgactttgccagcctgagctttgctgagagctgggacaacgtgggcctgctggtggagcccagccccccccacacagtgaacaccctcttcctgaccaatgacctgacagaggaggtgatggaggaggtgctgcagaagaaggctgacctgatcctgagctaccacccccccatcttccggcccatgaagaggatcacctggaacacctggaaggagcggctggtgatccgggccctggagaacagagtgggcatctacagcccccacacagcctatgatgctgccccccagggcgtgaacaactggctggccaagggcctgggcgcctgcaccagccggcccatccaccccagcaaggcccccaactaccccacagagggcaaccaccgggtggagttcaacgtgaactacacccaggacctggacaaggtgatgtctgctgtgaagggcatctag

SEQ ID NO: 53391 - DNA, 858 bp, Artificial Sequence
  derived and/or modified sequence
atgctgagcagctgtgtgcggcctgtgcccaccaccgtgcgctttgtggacagcctcatctgcaacagcagccgctccttcatggacctgaaggccctgctgagcagcctgaatgactttgccagcctgagctttgctgagagctgggacaacgtgggcctgctggtggagcccagccccccccacacagtgaacaccctcttcctgaccaatgacctgacagaggaggtgatggaggaggtgctgcagaagaaggctgacctgatcctgagctaccacccccccatcttccggcccatgaagaggatcacctggaacacctggaaggagcggctggtgatccgggccctggagaacagagtgggcatctacagcccccacacagcctatgatgctgccccccagggcgtgaacaactggctggccaagggcctgggcgcctgcaccagccggcccatccaccccagcaaggcccccaactaccccacagagggcaaccaccgggtggagttcaacgtgaactacacccaggacctggacaaggtgatgtctgctgtgaagggcattgatggagtgtctgtgaccagcttcagcgccaggactggaaatgaggagcagacccgcatcaacctgaactgcacccagaaggccctgatgcaggtggtggacttcctgagcaggaacaagcagctgtaccagaagacagagatcctgagcctggagaagagcctgaagagcaagtcctggccctgtgtgctggtgctgggcgccgccttctgccgggtgctgcggctgaccttcaccagccaggtgcgctgccccatcatgatcctgtggatgctgctgcccaaggagtag

SEQ ID NO: 53392 - DNA, 630 bp, Artificial Sequence
  derived and/or modified sequence
atggacctgaaggccctgctgagcagcctgaatgactttgccagcctgagctttgctgagagctgggacaacgtgggcctgctggtggagcccagccccccccacacagtgaacaccctcttcctgaccaatgacctgacagaggaggtgatggaggaggtgctgcagaagaaggctgacctgatcctgagctaccacccccccatcttccggcccatgaagaggatcacctggaacacctggaaggagcggctggtgatccgggccctggagaacagagtgggcatctacagcccccacacagcctatgatgctgccccccagggcgtgaacaactggctggccaagggcctgggcgcctgcaccagccggcccatccaccccagcaaggcccccaactaccccacagagggcaaccaccgggtggagttcaacgtgaactacacccaggacctggacaaggtgatgtctgctgtgaagggcattgatggagtgtctgtgaccagcttcagcgccaggactggaaatgaggagcagacccgcatcaacctgaactgcacccagaaggccctgatgcaggtggtggacttcctgagcaggaacaagcagctgtaccagaagacagaatag

SEQ ID NO: 53393 - DNA, 492 bp, Artificial Sequence
  derived and/or modified sequence
atgctgagcagctgtgtgcggcctgtgcccaccaccgtgcgctttgtggacagcctcatctgcaacagcagccgctccttcatggacctgaaggccctgctgagcagcctgaatgactttgccagcctgagctttgctgagagctgggacaacgtgggcctgctggtggagcccagccccccccacacagtgaacaccctcttcctgaccaatgacctgacagaggaggtgatggaggaggtgctgcagaagaaggctgacctgatcctgagctaccacccccccatcttccggcccatgaagaggatcacctggaacacctggaaggagcggctggtgatccgggccctggagaacagagtgggcatctacagcccccacacagcctatgatgctgccccccagggcgtgaacaactggctggccaagggcctgggcgcctgcaccagccggcccatccaccccagcaaggcccccaactaccccacctag

SEQ ID NO: 53394 - DNA, 759 bp, Artificial Sequence
  derived and/or modified sequence
atgctgagcagctgcgtgcggcccgtgcccaccaccgtgcggttcgtcgactccctgatttgtaactcctcccggagctttatggatctgaaggccctgctgtcctcgttaaacgacttcgctagcctgtcttttgctgagtcctgggataatgtcggtctactggtagagccttctcctccgcacacagtgaacacgcttttcttgaccaatgacttgacggaggaggtgatggaggaagtgcttcaaaaaaaggccgacctgattctgagctaccacccgccaatattccgaccaatgaaacgcataacttggaacacctggaaggagcgtcttgtgattagagccctggagaatagagtgggcatatactccccccacactgcctatgacgcggcaccacagggagttaataattggcttgccaagggcctgggagcatgtacctccagaccaattcaccccagtaaagcccctaactatccgactgaggggaatcatcgcgttgagtttaacgtaaactacacacaggacctggataaagtaatgagtgcagtgaaaggtatcgacggggtgtcggtcacttccttttccgctcggacaggaaacgaggaacagacgagaattaatctcaactgtacacaaaaagccctaatgcaggtggtcgatttcctgagcaggaacaaacagctgtaccaaaagcaccaagacaacaccttttacaagagcgctggatgtcagctcaaattcgtgacctag

SEQ ID NO: 53395 - DNA, 489 bp, Artificial Sequence
  derived and/or modified sequence
atggacctgaaggccctgctgagcagcctgaacgacttcgccagcttgtcatttgcagagagctgggataatgttggactgctcgtggaaccctccccccctcacacggtgaacaccctttttctgacaaacgatttgaccgaggaggtgatggaggaagtactccagaagaaggccgatttaatcctctcgtaccatcccccaatttttaggccaatgaagcgcattacgtggaatacctggaaagagcgactcgtcatccgggccctggagaaccgagtcggaatctactcaccacacacagcgtacgatgccgcacctcaaggggttaacaattggctggctaagggactgggtgcctgcaccagccgccccatccacccatccaaggctcctaactaccccacggaaggaaaccatagggtggaatttaatgtgaattacactcaggacctggataaggtgatgagcgcggttaagggaatttag

SEQ ID NO: 53396 - DNA, 858 bp, Artificial Sequence
  derived and/or modified sequence
atgctgagcagctgcgtgcggcccgtgcccaccaccgtgcggttcgtggattctctcatttgtaatagttcaagatcttttatggatttaaaagccctgctgtcttccctcaacgatttcgccagcctgtcattcgccgaatcctgggataatgtggggttgctcgtagagcctagcccccctcacacagtgaacacactgtttttgaccaacgacctcacggaagaagtgatggaagaggtgttgcagaaaaaagcagacctaatattatcttatcacccccccattttccgaccgatgaaacggattacctggaatacatggaaggaaagactagtcattagggctctggagaaccgcgtcgggatctacagtcctcacacggcgtacgatgctgctcctcaaggagtgaataactggctggcaaaagggttgggcgcttgcacatcacgtccaatccacccatctaaggccccaaactatccaaccgaagggaatcaccgggtggaattcaacgtgaattatacccaggatctggataaagtgatgagtgcagttaagggcatcgatggagtgtccgtaacctctttctcagcccgtaccggcaacgaggagcagacccggatcaatctcaattgcacccagaaggctttgatgcaggtggtcgattttctgtcacggaataagcagttataccagaaaacggagatactctcactcgagaagtccctgaagagcaaatcctggccatgcgtgctggtgctgggcgccgctttctgtagagtcttacgactaacattcacctcacaagttaggtgtcccatcatgattctgtggatgctgctgccaaaggagtag

SEQ ID NO: 53397 - DNA, 630 bp, Artificial Sequence
  derived and/or modified sequence
atggacctgaaggccctgctgagcagcctgaacgacttcgccagcctcagtttcgcggaatcctgggataacgtgggcttactggtggagccgtcccccccccataccgttaacacactgttcctgaccaatgatttaacagaggaagtgatggaagaagtgctccaaaagaaggccgatctgatcctgagctatcatcctcctatcttccggccaatgaaaagaattacctggaacacctggaaagagcgcctcgtgattagagccctggagaaccgggtgggcatatactctccgcatacagcttatgatgctgcccctcagggagtgaataattggctggctaagggcttgggggcgtgcacatcacggcccatccacccatccaaagctccgaactatccgaccgaagggaaccatcgcgtggagtttaatgtgaattacacacaggatttagacaaagtcatgtctgctgtaaaaggaattgacggggtgtcagtcacaagtttcagcgcgcgtacaggtaacgaggaacagacaaggatcaatttgaactgtacgcagaaggcgctcatgcaagtggtcgatttcctaagccggaataaacagctgtatcaaaagacagagtag

SEQ ID NO: 53398 - DNA, 492 bp, Artificial Sequence
  derived and/or modified sequence
atgctgagcagctgcgtgcggcccgtgcccaccaccgtgcggttcgtcgactctctaatttgcaacagctccaggagttttatggaccttaaagcgctcctatcctcattaaacgattttgcctctttgtctttcgccgagtcctgggataatgtgggattgctggtggagccatcccccccacacacagtcaatactctttttctgacaaacgatttgacagaagaagtgatggaagaggttttgcagaagaaagcggacttgattctcagctatcacccacccatcttcaggccaatgaaaagaatcacttggaacacctggaaggagaggctggtgatccgcgccctcgagaacagagtgggtatctattcaccacatactgcctatgatgctgccccccagggggttaacaactggctcgctaagggcttaggtgcttgtacatcaaggccgatccacccttccaaagcgcctaattatcccacttag

SEQ ID NO: 53399 - DNA, 967 bp, Artificial Sequence
  derived and/or modified sequence
cagaaacttgaactttacctgatttctgtatgttgtcatcttgcgtacgcccagtccccacgacagtccggtttgtagattccctgatctgcaattcttcccgttccttcatggatttgaaggctctcctttcttccttgaatgactttgcatccctctcgtttgctgagagttgggacaatgttggattactggtggaaccaagcccaccacatactgtaaatacactcttcctgaccaatgacctgactgaggaagtgatggaggaggtgctgcaaaagaaggcagacctcattctctcctaccatccgcctatcttccgacccatgaagcgcataacctggaacacatggaaggagcgcctggtgatccgggctctggagaacagagtcggtatctactctcctcatacagcctatgatgctgcgccccagggcgtcaacaactggttggctaaagggcttggagcttgtacctccaggcccatacatccttccaaagctcccaactaccctacagagggaaaccaccgagtagaattcaacgttaactacacccaagacctggacaaagtcatgtctgcagtgaaaggaattgacggtgtttctgtcacttctttttctgctaggactggtaatgaggaacaaacacggattaatctgaattgtactcagaaggctttgatgcaggtggtagattttctttcccggaacaaacaactttatcagaaacatcaggataacacattctacaaatcagctggatgccaacttaaatttgtaacatgagtcagtgggactggtgtgcttccagagagtgtcttcgagggtatcatcatttccggtttgttaatcttattcaccaaatgttctatcgctcgtaaggtaaaactgtaatataactaccatattaaataacaaatgttcattataaactctaggaaagattgaataaaatctgtttactt

SEQ ID NO: 53400 - DNA, 813 bp, Artificial Sequence
  derived and/or modified sequence
tgccggttggggccggctgtgattgttatcttggtgctgcagaggacagcagaagaggagattgggtcagaaaactgccctgccgcaccagagcacagcgcactagtgggacaggggtcctgactcagacttaactggctgtgtctcgtggtttttcactgtcctggaaaaggcctgaagtggcactgaaatgaggcatagatgagttggctatgctttcttattgtgcatactatgaaatgtttttcttcaaaaagtgtttataagtgtccccacgacagtccggtttgtagattccctgatctgcaattcttcccgttccttcatggatttgaaggctctcctttcttccttgaatgactttgcatccctctcgtttgctgagagttgggacaatgttggattactggtggaaccaagcccaccacatactgtaaatacactcttcctgaccaatgacctgactgaggaagtgatggaggaggtgctgcaaaagaaggcagacctcattctctcctaccatccgcctatcttccgacccatgaagcgcataacctggaacacatggaaggagcgcctggtgatccgggctctggagaacagagtcggtatctactctcctcatacagcctatgatgctgcgccccagggcgtcaacaactggttggctaaagggcttggagcttgtacctccaggcccatacatccttccaaagctcccaactaccctacagagggaaaccaccgagtagaattcaacgttaactacacccaagacctggacaaagtcatgtctgcagtgaaaggaattga

SEQ ID NO: 53401 - DNA, 1269 bp, Artificial Sequence
  derived and/or modified sequence
gaaacttgaactttacctgatttctgtatgttgtcatcttgcgtacgcccagtccccacgacagtccggtttgtagattccctgatctgcaattcttcccgttccttcatggatttgaaggctctcctttcttccttgaatgactttgcatccctctcgtttgctgagagttgggacaatgttggattactggtggaaccaagcccaccacatactgtaaatacactcttcctgaccaatgacctgactgaggaagtgatggaggaggtgctgcaaaagaaggcagacctcattctctcctaccatccgcctatcttccgacccatgaagcgcataacctggaacacatggaaggagcgcctggtgatccgggctctggagaacagagtcggtatctactctcctcatacagcctatgatgctgcgccccagggcgtcaacaactggttggctaaagggcttggagcttgtacctccaggcccatacatccttccaaagctcccaactaccctacagagggaaaccaccgagtagaattcaacgttaactacacccaagacctggacaaagtcatgtctgcagtgaaaggaattgacggtgtttctgtcacttctttttctgctaggactggtaatgaggaacaaacacggattaatctgaattgtactcagaaggctttgatgcaggtggtagattttctttcccggaacaaacaactttatcagaagacggaaattctgtcactggagaagagtctcaagtcaaagtcgtggccctgtgtgctggttctgggagcagcgttctgcagggtgttgaggctgacctttacctcacaggtgagatgtcccatcatgatactttggatgctgcttcccaaggaataaatgtcatcctctgtgaacacagcaacactgaacgaggctttctttctgaccttcgagatatgctggattctcacttggagaataagataaatattatcctatcagagactgacagggaccctcttcaggtggtataattgcagaaacatcaggataacacattctacaaatcagctggatgccaacttaaatttgtaacatgagtcagtgggactggtgtgcttccagagagtgtcttcgagggtatcatcatttccggtttgttaatcttattcaccaaatgttctatcgctcgtaaggtaaaactgtaatataactaccatattaaataacaaatgttcattataaactctaggaaagattgaataaaatctgtttacttaa

SEQ ID NO: 53402 - DNA, 749 bp, Artificial Sequence
  derived and/or modified sequence
aagtgccacagcatccggagcgccgacgcgggaccggaagtgacgcagagaagtttccgggactgtccccacgacagtccggtttgtagattccctgatctgcaattcttcccgttccttcatggatttgaaggctctcctttcttccttgaatgactttgcatccctctcgtttgctgagagttgggacaatgttggattactggtggaaccaagcccaccacatactgtaaatacactcttcctgaccaatgacctgactgaggaagtgatggaggaggtgctgcaaaagaaggcagacctcattctctcctaccatccgcctatcttccgacccatgaagcgcataacctggaacacatggaaggagcgcctggtgatccgggctctggagaacagagtcggtatctactctcctcatacagcctatgatgctgcgccccagggcgtcaacaactggttggctaaagggcttggagcttgtacctccaggcccatacatccttccaaagctcccaactaccctacagagggaaaccaccgagtagaattcaacgttaactacacccaagacctggacaaagtcatgtctgcagtgaaaggaattgacggtgtttctgtcacttctttttctgctaggactggtaatgaggaacaaacacggattaatctgaattgtactcagaaggctttgatgcaggtggtagattttctttcccggaacaaacaactttatcagaagacggaaa

SEQ ID NO: 53403 - DNA, 719 bp, Artificial Sequence
  derived and/or modified sequence
acgcagagaagtttccgggactggtgagaaaacaagattggagaggttaaatggcttacctaagttacagtgtgctggtaagtggcagagccactatttgaacccagatctctatgacgacagctcttttgcccatatgttttgatgcctcaaagatccaggcctaaagtatacctgtgtaccattttctttgttttgacatcagaaacttgaactttacctgatttctgtatgttgtcatcttgcgtacgcccagtccccacgacagtccggtttgtagattccctgatctgcaattcttcccgttccttcatggatttgaaggctctcctttcttccttgaatgactttgcatccctctcgtttgctgagagttgggacaatgttggattactggtggaaccaagcccaccacatactgtaaatacactcttcctgaccaatgacctgactgaggaagtgatggaggaggtgctgcaaaagaaggcagacctcattctctcctaccatccgcctatcttccgacccatgaagcgcataacctggaacacatggaaggagcgcctggtgatccgggctctggagaacagagtcggtatctactctcctcatacagcctatgatgctgcgccccagggcgtcaacaactggttggctaaagggcttggagcttgtacctccaggcccatacatccttccaaagctcccaactaccctac

SEQ ID NO: 53404 - DNA, 759 bp, Artificial Sequence
  derived and/or modified sequence
atgctgagtagctgcgtccgccctgtcccaactaccgtgcgttttgtggactctctgatatgcaatagctctaggagttttatggatctgaaagccttactgtcttcactgaacgactttgctagtctgagttttgccgagagctgggataacgtggggttgctggtggagccgtctcccccacatacagttaatactctgttcctaaccaacgatttaaccgaggaggtaatggaagaggtgctccagaaaaaggctgacctgattctgtcatatcatccaccaatctttcggcctatgaaacgtatcacctggaatacatggaaagagagattggtcatccgtgctctggaaaaccgtgtcggcatctacagcccccacactgcctacgacgccgcaccccaaggtgtgaacaactggctggctaaaggactgggtgcatgcacgagccggcctatccatccctccaaggctccaaactacccaaccgagggaaaccacagagtggagttcaacgtcaattacacccaggacctggataaggtgatgagcgctgtgaagggtatagatggcgtgagcgtgacatccttcagcgctcggaccggaaatgaggaacaaactcgaataaacttaaactgcacacaaaaggccctgatgcaggtggtggacttcttgagccgcaacaagcagctctatcagaagcatcaggataataccttctataagtccgccggatgccagctcaagtttgtaacgtag

SEQ ID NO: 53405 - DNA, 489 bp, Artificial Sequence
  derived and/or modified sequence
atggatctcaaggcactgctaagttctctgaatgattttgcatccctgagtttcgctgagtcgtgggataacgtaggacttctggtggaaccatctcctcctcacacagtgaatacgctttttctcaccaatgacctcaccgaggaggtgatggaggaggtactccagaagaaggctgatttgatcctgtcctatcaccctcccatctttcggcctatgaagcgcattacttggaatacatggaaagagcgattggtcatccgagctctggaaaatcgcgtgggtatttattcaccccacactgcatacgatgctgccccacaaggggtgaacaactggctcgccaaaggccttggtgcctgcaccagtcgccctattcacccctctaaagctcctaactaccccactgagggcaaccaccgagtcgagttcaacgtgaactacacccaggacctggacaaggttatgtccgctgtgaaaggaatctag

SEQ ID NO: 53406 - DNA, 858 bp, Artificial Sequence
  derived and/or modified sequence
atgctgtcctcttgtgtccgaccggtgccgacaacagtgagatttgtggattccctgatctgtaattcgtcaagatcatttatggatctcaaggccctgctgagctctttgaacgactttgctagcctatcctttgctgagtcctgggacaatgttggactgctggtcgagccatctccaccacacacagtgaacacactcttcctcaccaacgatctcaccgaggaagtgatggaggaggtcctgcagaaaaaggcagacttaatcttatcctaccacccacccattttccggcctatgaaaagaattacatggaatacctggaaggaaaggctggtgatccgcgcactagagaatcgcgtgggtatatacagtcctcacacggcctatgatgcggcacctcagggggtaaataactggttggcaaagggtctgggagcatgcacctcaagaccaattcacccgtcaaaggcacccaactaccctaccgagggaaatcatcgggttgagttcaacgtgaattacacacaggacctggataaggttatgtccgccgtaaagggaattgatggggtgagcgtgaccagcttttcagcacggaccggcaacgaggagcagacccggatcaacctgaactgtactcagaaggctctgatgcaagtcgtggactttctaagtcgcaacaaacagctctaccagaagaccgagatactgtcccttgagaagtcactcaagtcaaagagctggccatgtgttttggtcttaggggcagctttctgcagggtgctgcgtcttacattcacatcccaggtgcggtgtcctatcatgattttgtggatgctcctgccgaaagagtag

SEQ ID NO: 53407 - DNA, 630 bp, Artificial Sequence
  derived and/or modified sequence
atggatctcaaggccctgctgtcctctctgaatgatttcgcctccttatccttcgccgagagctgggataatgtggggctgttagtggagccatcacctcctcacactgtaaacaccctttttctaactaatgatctgactgaagaagtgatggaggaggtgcttcagaagaaagcagatctgattctgtcataccaccctcccattttcagacctatgaaaaggatcacgtggaacacatggaaagaacggctggtgatccgtgccctcgaaaaccgcgtcggaatctactccccgcacaccgcttatgatgcggcaccgcaaggggtgaacaactggctcgccaagggcctgggtgcttgtacgtcaaggccaattcacccctctaaagcgccaaattatcctacggagggtaaccatcgagttgaatttaatgtcaactacacccaggacctggataaggtcatgagcgccgtgaagggtatcgacggagtgtctgtcacttcattctctgcaagaaccggtaatgaggagcagacccgcatcaatctgaattgtacccaaaaagcactaatgcaggtagtggatttcctatcgcggaataagcagttgtatcagaaaacagaatag

SEQ ID NO: 53408 - DNA, 492 bp, Artificial Sequence
  derived and/or modified sequence
atgctgagcagttgcgttaggcccgttcctaccactgtccgctttgtggactccctgatttgcaacagtagcaggagcttcatggatttaaaagctttgctatcctcactgaacgattttgcatccctgtcgtttgcagaatcctgggataatgtagggctgctggtcgagccttctcccccacacaccgtgaatactctttttttgaccaacgatctaaccgaggaagtgatggaggaggtccttcagaagaaggcagatttgatcctatcataccacccgcctattttcaggcctatgaaacgtattacgtggaacacctggaaggagcgactcgttattagagcgctggaaaacagagtaggaatctactccccccacactgcgtacgacgcagcgccacaaggagtcaacaactggctggcaaaagggctgggtgcttgcaccagccgccctattcatccctctaaagccccaaactacccaacctag

SEQ ID NO: 53409 - DNA, 759 bp, Artificial Sequence
  derived and/or modified sequence
atgctgagcagctgcgtgagacccgtgcccaccaccgtgagattcgtggacagcctgatctgcaacagcagcagaagcttcatggacctgaaggccctgctgagcagcctgaacgacttcgccagcctgagcttcgccgagagctgggacaacgtgggcctgctggtggagcccagccccccccacaccgtgaacaccctgttcctgaccaacgacctgaccgaggaggtgatggaggaggtgctgcagaagaaggccgacctgatcctgagctaccacccccccatcttcagacccatgaagagaatcacctggaacacctggaaggagagactggtgatcagagccctggagaacagagtgggcatctacagcccccacaccgcctacgacgccgccccccagggcgtgaacaactggctggccaagggcctgggcgcctgcaccagcagacccatccaccccagcaaggcccccaactaccccaccgagggcaaccacagagtggagttcaacgtgaactacacccaggacctggacaaggtgatgagcgccgtgaagggcatcgacggcgtgagcgtgaccagcttcagcgccagaaccggcaacgaggagcagaccagaatcaacctgaactgcacccagaaggccctgatgcaggtggtggacttcctgagcagaaacaagcagctgtaccagaagcaccaggacaacaccttctacaagagcgccggctgccagctgaagttcgtgacctag

SEQ ID NO: 53410 - DNA, 489 bp, Artificial Sequence
  derived and/or modified sequence
atggacctgaaggccctgctgagcagcctgaacgacttcgccagcctgagcttcgccgagagctgggacaacgtgggcctgctggtggagcccagccccccccacaccgtgaacaccctgttcctgaccaacgacctgaccgaggaggtgatggaggaggtgctgcagaagaaggccgacctgatcctgagctaccacccccccatcttcagacccatgaagagaatcacctggaacacctggaaggagagactggtgatcagagccctggagaacagagtgggcatctacagcccccacaccgcctacgacgccgccccccagggcgtgaacaactggctggccaagggcctgggcgcctgcaccagcagacccatccaccccagcaaggcccccaactaccccaccgagggcaaccacagagtggagttcaacgtgaactacacccaggacctggacaaggtgatgagcgccgtgaagggcatctag

SEQ ID NO: 53411 - DNA, 858 bp, Artificial Sequence
  derived and/or modified sequence
atgctgagcagctgcgtgagacccgtgcccaccaccgtgagattcgtggacagcctgatctgcaacagcagcagaagcttcatggacctgaaggccctgctgagcagcctgaacgacttcgccagcctgagcttcgccgagagctgggacaacgtgggcctgctggtggagcccagccccccccacaccgtgaacaccctgttcctgaccaacgacctgaccgaggaggtgatggaggaggtgctgcagaagaaggccgacctgatcctgagctaccacccccccatcttcagacccatgaagagaatcacctggaacacctggaaggagagactggtgatcagagccctggagaacagagtgggcatctacagcccccacaccgcctacgacgccgccccccagggcgtgaacaactggctggccaagggcctgggcgcctgcaccagcagacccatccaccccagcaaggcccccaactaccccaccgagggcaaccacagagtggagttcaacgtgaactacacccaggacctggacaaggtgatgagcgccgtgaagggcatcgacggcgtgagcgtgaccagcttcagcgccagaaccggcaacgaggagcagaccagaatcaacctgaactgcacccagaaggccctgatgcaggtggtggacttcctgagcagaaacaagcagctgtaccagaagaccgagatcctgagcctggagaagagcctgaagagcaagagctggccctgcgtgctggtgctgggcgccgccttctgcagagtgctgagactgaccttcaccagccaggtgagatgccccatcatgatcctgtggatgctgctgcccaaggagtag

SEQ ID NO: 53412 - DNA, 630 bp, Artificial Sequence
  derived and/or modified sequence
atggacctgaaggccctgctgagcagcctgaacgacttcgccagcctgagcttcgccgagagctgggacaacgtgggcctgctggtggagcccagccccccccacaccgtgaacaccctgttcctgaccaacgacctgaccgaggaggtgatggaggaggtgctgcagaagaaggccgacctgatcctgagctaccacccccccatcttcagacccatgaagagaatcacctggaacacctggaaggagagactggtgatcagagccctggagaacagagtgggcatctacagcccccacaccgcctacgacgccgccccccagggcgtgaacaactggctggccaagggcctgggcgcctgcaccagcagacccatccaccccagcaaggcccccaactaccccaccgagggcaaccacagagtggagttcaacgtgaactacacccaggacctggacaaggtgatgagcgccgtgaagggcatcgacggcgtgagcgtgaccagcttcagcgccagaaccggcaacgaggagcagaccagaatcaacctgaactgcacccagaaggccctgatgcaggtggtggacttcctgagcagaaacaagcagctgtaccagaagaccgagtag

SEQ ID NO: 53413 - DNA, 492 bp, Artificial Sequence
  derived and/or modified sequence
atgctgagcagctgcgtgagacccgtgcccaccaccgtgagattcgtggacagcctgatctgcaacagcagcagaagcttcatggacctgaaggccctgctgagcagcctgaacgacttcgccagcctgagcttcgccgagagctgggacaacgtgggcctgctggtggagcccagccccccccacaccgtgaacaccctgttcctgaccaacgacctgaccgaggaggtgatggaggaggtgctgcagaagaaggccgacctgatcctgagctaccacccccccatcttcagacccatgaagagaatcacctggaacacctggaaggagagactggtgatcagagccctggagaacagagtgggcatctacagcccccacaccgcctacgacgccgccccccagggcgtgaacaactggctggccaagggcctgggcgcctgcaccagcagacccatccaccccagcaaggcccccaactaccccacctag

SEQ ID NO: 53414 - DNA, 1062 bp, Artificial Sequence
  derived and/or modified sequence
atgagtcgctcacttgattctgcgcgcagctttctggaaagactggaggctcgcggcggcagagaaggggccgtactagcaggtgagtttagtaaaaggtgcgaaaggtattgggcccaggaacaggagcctctgcagactggtcttttctgtatcactctgattaaggagaaatggctgaacgaagatattatgctgagaacgcttaaggttaccttccagaaagagagccgttccgtctatcagttgcagtatatgtcttggcctgatcggggcgtgccatcttcacctgaccatatgctcgcaatggtggaggaagctcgcaggttacaggggagtggtcctgagcccctttgtgtccactgcagcgctgggtgcgggcggactggtgttttatgcacggttgattacgtcagacaactgctgctgacacagatgattccgcctgacttcagcctgttcgatgtagttctcaagatgcgaaaacaaaggccagcagccgttcagaccgaagagcagtacaggttcctgtatcataccgtggcccagatgttctgttccacgcttcagaacgcgagcccacattaccaaaacatcaaagagaactgcgcacctctgtacgacgatgctctgttcctccgtaccccccaagctctgctagccatacccagaccacctggaggggtcctgcggagcatcagtgtccccggcagtccaggccatgcaatggccgatacatatgctgtggtgcaaaagcgaggcgcgccggcgggtgctggctccggcacccagacgggaaccggcactggcactggggcaaggtcagccgaagaagcccctctgtacagtaaggtgacaccacgggcccagcggcccggggcccacgccgaagacgctagaggcactctccccggaagggttcctgccgaccaaagcccagctggctccggcgcctacgaggatgtagcgggcggagctcaaactggtggcctcggatttaatctgaggatcggccgtccaaagggaccaagagacccacccgccgaatggacacgcgtatag

SEQ ID NO: 53415 - DNA, 1062 bp, Artificial Sequence
  derived and/or modified sequence
atgagccgcagcctggacagcgcccggagcttcctggagcggctggaggcccggggcggccgggagggcgctgtgctggccggggagttcagcaagagatgtgagcgctactgggcccaggagcaggagcccctgcagacaggcctcttctgcatcaccctcatcaaggagaagtggctgaatgaagacatcatgctgcggaccctgaaggtgaccttccagaaggagagccgctctgtgtaccagctgcagtacatgtcctggccagaccggggcgtgcccagcagcccagaccacatgctggccatggtggaggaggcccggcggctgcagggcagcggccctgagcccctgtgtgtgcactgcagcgctggctgcggccgcactggagtgctgtgcaccgtggactatgtgcggcagctgctgctgacccagatgatccccccagacttcagcctgtttgatgtggtgctgaagatgaggaagcagaggcctgctgctgtgcagacagaggagcagtaccgcttcctgtaccacacagtggcccagatgttctgcagcaccctgcagaatgccagcccccactaccagaacatcaaggagaactgtgcccccctgtatgatgatgccctcttcctgcggaccccccaggccctgctggccatccccaggcctcctgggggcgtgctgcggagcatctctgtgcccggcagccctggccacgccatggctgacacctatgctgtggtgcagaagagaggagccccagctggagctggcagcggcacccagacaggaactggaactggaactggagcccggtctgctgaggaggcccccctgtacagcaaggtgaccccccgggcccagaggcctggggcccacgcagaagatgcccggggcaccctgcccggccgggtgcctgctgaccagagccctgctggcagcggggcctatgaagatgtggccggcggggcccagacaggaggcctgggcttcaacctgagaattggccggcccaagggcccccgggaccccccagctgagtggaccagggtgtag

SEQ ID NO: 53416 - DNA, 1062 bp, Artificial Sequence
  derived and/or modified sequence
atgagccggagcctggacagcgcccggagcttcctggagcggctggaagctaggggtggtcgggagggggccgtacttgccggagagttcagcaagcggtgcgagcgctactgggcccaggagcaagaaccattgcagacaggactgttctgcattaccctgatcaaagaaaaatggttgaatgaggacataatgctccggacccttaaggttacatttcagaaagagtctagatctgtttaccaactgcagtacatgagctggcctgaccgtggagttccaagctctcctgaccacatgctggcgatggtcgaggaggcaagacgactgcagggcagcggccctgaacccctttgtgtacattgcagcgctggatgtggacggacaggcgtcttatgcactgtcgattatgtcaggcagttgctgttaacacagatgattccacccgactttagcttgtttgacgtggtgcttaagatgcggaagcagcggcccgccgccgtgcagactgaggagcagtacaggtttctctaccacaccgtcgcacagatgttttgctctaccctgcagaacgccagcccccattatcagaacatcaaagagaactgcgctcctctatatgacgacgcattgtttctgcgcaccccccaggcccttcttgccatcccacgcccaccaggcggggtgctgcgctcgatctccgtgcctggcagcccagggcacgctatggctgatacgtacgccgttgtacaaaagcggggcgccccagccggagctgggagcggtacgcagacaggaacagggacaggcactggcgccaggtcagctgaagaggccccgctgtattcgaaggtaacaccccgcgcccaacggcccggagcccacgctgaagatgccaggggaacccttcccgggcgggttcccgcagatcagtctccggctgggtccggagcctatgaggacgtcgctggtggcgcacagaccgggggactgggcttcaacctccggattgggagaccaaaagggccccgcgaccccccagccgagtggacacgggtgtag

SEQ ID NO: 53417 - DNA, 1062 bp, Artificial Sequence
  derived and/or modified sequence
atgtctagatctctggattctgccagatcctttctcgagcgcctggaagcgcgaggaggacgcgagggagccgtgctggcaggcgagttttcaaagcgctgcgaaagatattgggcccaggagcaggagccattacagacaggactcttctgcataacactaatcaaagagaaatggcttaatgaagacattatgctgcggaccttgaaagtgaccttccaaaaggaaagccgctcggtgtatcagcttcagtatatgtcttggcctgacaggggcgtgcccagcagcccagatcatatgctggctatggtcgaagaagcccgtagactacagggaagcggacctgagcccctgtgtgtgcactgctccgcaggctgcggaagaactggggtgctgtgcactgtggactacgtgaggcagctattattgactcagatgatacctcccgatttcagtctgttcgacgtggtgctcaaaatgcggaaacagcgccctgcagcagttcaaacagaggaacagtatcggtttttgtatcataccgtggcccagatgttttgctcaaccctccaaaatgcatcaccccattatcagaacatcaaggaaaattgtgctcctctgtatgacgacgcactgttcttaagaacaccgcaggccttactggccatccctagaccacctggtggcgtgctgcgctctatatcggtcccaggctcccctgggcacgctatggctgacacatacgcagtagtccagaagagaggggctcctgccggagcaggatctggaacacagacagggaccgggacaggcactggggctaggtcagcagaggaggctccactgtactcgaaagtcaccccacgcgctcagcgccctggggctcacgcagaggatgctcgtggcacccttcctggccgtgttccagccgatcagtcacccgctggatccggcgcatacgaggacgttgcaggaggggcacaaactggtggattggggttcaacctgcggattggaagaccgaagggcccacgagaccccccagccgagtggactcgcgtgtag

SEQ ID NO: 53418 - DNA, 2472 bp, Artificial Sequence
  derived and/or modified sequence
ccgcggcgtccacactcgccgcgcgcgcggcggccgggctggaccttgctggcccgcggcgccatgagccgcagcctggactcggcgcggagcttcctggagcggctggaagcgcggggcggccgggagggggcagtcctcgccggcgagttcagcaaaaggtgtgagcggtactgggcccaggagcaggagccactgcagactgggcttttctgcatcactctgataaaggagaagtggctgaatgaggacatcatgctcaggaccctcaaggtcacattccagaaggagtcccgttctgtgtaccagctacagtatatgtcctggccagaccgtggggtccccagcagtcctgaccacatgctcgccatggtggaggaagcccgtcgcctccagggatctggccctgaacccctctgtgtccactgcagtgcgggttgtgggcgaacaggcgtcctgtgcaccgtggattatgtgaggcagctgctcctgacccagatgatcccacctgacttcagtctctttgatgtggtccttaagatgaggaagcagcggcctgcggccgtgcagacagaggagcagtacaggttcctgtaccacacggtggctcagatgttctgctccacactccagaatgccagcccccactaccagaacatcaaagagaattgtgccccactctacgacgatgccctcttcctccggactccccaggcacttctcgccataccccgcccaccaggaggggtcctcaggagcatctctgtgcccgggtccccgggccacgccatggctgacacctacgcggtggtgcagaagcgcggggctccagcgggcgccgggagtgggacgcagacggggacggggacggggacgggggcgcgcagcgcggaggaggcgccgctctacagcaaggtgacgccgcgcgcccagcgacccggggcgcacgcggaggacgcgagggggacgctgcctggccgcgttcctgctgaccaaagtcctgccggatctggcgcctacgaggacgtggcgggtggagctcagaccggtgggctaggtttcaacctgcgcattgggaggccgaagggtccccgggacccgcctgctgagtggacccgggtgtaagtctaacgccagttcctgcctgttgcctcttgtgagctcggactgctgatgccccggtgctgctgagcgccgtgcgcagaatggaaacagtgggcctggatcaaagttaaagtttctcagggtgggaaatgtgggggctttgccccaatgactgtagcattcaaggcttgaggctggaggaggtagctagggtatagtggctggtgaggctgcacagagcagattcaagaaagaagatcaggaaggggcatgacccctgagttatgaaggggagaagggacagatgagcttccggagactgctctcctcaccacacagcactagtccatcctcagcacctgagcctccctcacttggacactcaggggaccacacagagaagtggatggacacttcgccatccaggcagaactaagccaggcataaccacagccaagcagattaaccccaggcagaccgataaaaagacctccagataggcagacagacagatggaccaccaacctggacagacagccaaagcttcagagatacagtccacaggtggacaaagggatccccagccagagagagagagaccagccaacagcttgatagaccagtgcagccagagagaccaccaaacagagcccccaaaagacagacatctctgctagctggacagccaggtggaccccctaagttagattactagacagatataaacagatcccctgctgaacagatacacagagttctcagaccccacccccaccctcaggtgggctggctggctgacagaccttctggccagacagactcctaaccaaccagatggactgccagacaggcagacatcagccacatggaatcctgacatcccagccagccggccagactctcatcttgatgtcttgatggatggaccccagctagtcagacatgatcctccagattgacagacaagtcccccaaatgagtacacatctccagctattcagacagatggacccccagcaaatcaggacctatctaggcagaccccagccagacccccgccagacagactcccaaccagactgaccccttactattcacacagcctgccgagtagctgggactacaggtctaattttttttttttttaagaaatgagtttttgccatgttgcccagactggtcttgaactcccaacctcaagcaatcctcctgcctcagcctcccaaagtgctgagattacaggtgtgagccaccaggctcagccccctaagatttgaaacactttaaatggcccatggtagggttcctgctaggataaaacattaagcggctgttaaaagaaataaaaggaggacacgtctctgtgca

SEQ ID NO: 53419 - DNA, 1062 bp, Artificial Sequence
  derived and/or modified sequence
atgagcagaagcctggacagcgccagaagcttcctggagagactggaggccagaggcggcagagagggcgccgtgctggccggcgagttcagcaagagatgcgagagatactgggcccaggagcaggagcccctgcagaccggcctgttctgcatcaccctgatcaaggagaagtggctgaacgaggacatcatgctgagaaccctgaaggtgaccttccagaaggagagcagaagcgtgtaccagctgcagtacatgagctggcccgacagaggcgtgcccagcagccccgaccacatgctggccatggtggaggaggccagaagactgcagggcagcggccccgagcccctgtgcgtgcactgcagcgccggctgcggcagaaccggcgtgctgtgcaccgtggactacgtgagacagctgctgctgacccagatgatcccccccgacttcagcctgttcgacgtggtgctgaagatgagaaagcagagacccgccgccgtgcagaccgaggagcagtacagattcctgtaccacaccgtggcccagatgttctgcagcaccctgcagaacgccagcccccactaccagaacatcaaggagaactgcgcccccctgtacgacgacgccctgttcctgagaaccccccaggccctgctggccatccccagaccccccggcggcgtgctgagaagcatcagcgtgcccggcagccccggccacgccatggccgacacctacgccgtggtgcagaagagaggcgcccccgccggcgccggcagcggcacccagaccggcaccggcaccggcaccggcgccagaagcgccgaggaggcccccctgtacagcaaggtgacccccagagcccagagacccggcgcccacgccgaggacgccagaggcaccctgcccggcagagtgcccgccgaccagagccccgccggcagcggcgcctacgaggacgtggccggcggcgcccagaccggcggcctgggcttcaacctgagaatcggcagacccaagggccccagagacccccccgccgagtggaccagagtgtag

SEQ ID NO: 53420 - protein, 415 aa, Artificial Sequence
  derived and/or modified sequence
MRLFRWLLKQPVPKQIERYSRFSPSPLSIKQFLDFGRDNACEKTSYMFLRKELPVRLANTMREVNLLPDNLLNRPSVGLVQSWYMQSFLELLEYENKSPEDPQVLDNFLQVLIKVRNRHNDVVPTMAQGVIEYKEKFGFDPFISTNIQYFLDRFYTNRISFRMLINQHTLLFGGDTNPVHPKHIGSIDPTCNVADVVKDAYETAKMLCEQYYLVAPELEVEEFNAKAPDKPIQVVYVPSHLFHMLFELFKNSMRATVELYEDRKEGYPAVKTLVTLGKEDLSIKISDLGGGVPLRKIDRLFNYMYSTAPRPSLEPTRAAPLAGFGYGLPISRLYARYFQGDLKLYSMEGVGTDAVIYLKALSSESFERLPVFNKSAWRHYKTTPEADDWSNPSSEPRDASKYKAKQDKIKTNRTF

SEQ ID NO: 53421 - DNA, 1248 bp, Artificial Sequence
  derived and/or modified sequence
atgagactgttcagatggctgctgaagcagcccgtgcccaagcagatcgagagatacagcagattcagccccagccccctgagcatcaagcagttcctggacttcggcagagacaacgcctgcgagaagaccagctacatgttcctgagaaaggagctgcccgtgagactggccaacaccatgagagaggtgaacctgctgcccgacaacctgctgaacagacccagcgtgggcctggtgcagagctggtacatgcagagcttcctggagctgctggagtacgagaacaagagccccgaggacccccaggtgctggacaacttcctgcaggtgctgatcaaggtgagaaacagacacaacgacgtggtgcccaccatggcccagggcgtgatcgagtacaaggagaagttcggcttcgaccccttcatcagcaccaacatccagtacttcctggacagattctacaccaacagaatcagcttcagaatgctgatcaaccagcacaccctgctgttcggcggcgacaccaaccccgtgcaccccaagcacatcggcagcatcgaccccacctgcaacgtggccgacgtggtgaaggacgcctacgagaccgccaagatgctgtgcgagcagtactacctggtggcccccgagctggaggtggaggagttcaacgccaaggcccccgacaagcccatccaggtggtgtacgtgcccagccacctgttccacatgctgttcgagctgttcaagaacagcatgagagccaccgtggagctgtacgaggacagaaaggagggctaccccgccgtgaagaccctggtgaccctgggcaaggaggacctgagcatcaagatcagcgacctgggcggcggcgtgcccctgagaaagatcgacagactgttcaactacatgtacagcaccgcccccagacccagcctggagcccaccagagccgcccccctggccggcttcggctacggcctgcccatcagcagactgtacgccagatacttccagggcgacctgaagctgtacagcatggagggcgtgggcaccgacgccgtgatctacctgaaggccctgagcagcgagagcttcgagagactgcccgtgttcaacaagagcgcctggagacactacaagaccacccccgaggccgacgactggagcaaccccagcagcgagcccagagacgccagcaagtacaaggccaagcaggacaagatcaagaccaacagaaccttctag

SEQ ID NO: 53422 - DNA, 1248 bp, Artificial Sequence
  derived and/or modified sequence
atgcgattattccgatggctcctcaagcagccagtcccaaaacagatcgagaggtacagccgtttctccccctcgccattgagcatcaagcaattcctggacttcggacgagacaatgcatgtgaaaagacctcttacatgttcctaagaaaagaattacctgtcaggctggcaaatactatgcgagaagttaacttactcccagacaacctgctgaacaggccctccgttggtctggtccagtcatggtacatgcagtccttcctggagcttctggagtacgagaacaaaagcccagaggatccacaggttctggataatttccttcaagtgcttattaaagtgaggaatcggcataacgacgtggtcccgacaatggcccagggcgtcatagagtataaagagaagttcgggtttgacccgttcattagtactaacatccagtattttctggaccgattttatacaaatcggatttcatttcggatgctgatcaatcaacacaccctgctatttgggggcgacactaatcccgttcacccgaaacacatcggctccattgatccaacttgcaatgtcgcggacgtggtaaaggatgcttatgagactgcaaagatgctgtgtgaacagtactacctggttgcccccgaacttgaagtggaggaattcaatgctaaggcccctgataaacctattcaggttgtttacgtgccaagccacctgtttcacatgctgtttgaattgttcaaaaactcaatgcgagccacagtagaattatatgaagatcggaaagaaggatatcccgcagtgaaaacactggtcactctcgggaaggaggatctgtctataaaaatctctgatcttggcgggggagtcccattacgtaaaatcgatagactgtttaattatatgtattctacagcacctcgaccaagccttgagcctactagagcagcaccgctcgctggtttcggctacgggctgcctatctcgaggctttatgccaggtacttccaaggcgatctgaaactgtattccatggaaggggtgggaactgatgctgtgatatacttgaaggcgctgtctagtgagtcgttcgagcgcttacctgtgttcaacaagtccgcatggagacactataaaacaactcctgaagctgacgactggagtaaccccagctccgagcccagggatgcaagcaaatacaaagccaaacaagataagataaagaccaatagaaccttctag

SEQ ID NO: 53423 - DNA, 1248 bp, Artificial Sequence
  derived and/or modified sequence
atgaggctcttccgctggctgctgaagcagcctgtgcccaagcagatcgagcgctacagccgcttcagccccagccccctgagcatcaagcagttcctggactttggccgggacaatgcctgtgagaagaccagctacatgttcctgaggaaggagctgcctgtgcggctggccaacaccatgagggaggtgaacctgctgcctgacaacctgctgaaccggcccagcgtgggcctggtgcagagctggtacatgcagagcttcctggagctgctggagtatgagaacaagagccctgaggacccccaggtgctggacaacttcctgcaggtgctgatcaaggtgaggaacagacacaatgatgtggtgcccaccatggcccagggcgtgattgagtacaaggagaagtttggatttgaccccttcatcagcaccaacatccagtacttcctggaccgcttctacaccaaccgcatctccttcaggatgctgatcaaccagcacaccctgctgtttggaggagacaccaaccctgtgcaccccaagcacatcggcagcattgaccccacctgcaatgtggctgatgtggtgaaggatgcctatgaaacagccaagatgctgtgtgagcagtactacctggtggcccctgagctggaggtggaggagttcaatgccaaggccccagacaagcccatccaggtggtgtatgtgcccagccacctgttccacatgctgtttgagctgttcaagaacagcatgagggccaccgtggagctgtatgaggacaggaaggagggctacccagctgtgaagaccctggtgaccctgggcaaggaggacctgagcatcaagatcagtgacctgggcggcggcgtgcccctgaggaagattgacaggctcttcaactacatgtacagcacagccccccggcccagcctggagcccacccgggccgcccccctggccggcttcggctacggcctgcccatcagccggctgtatgcccgctacttccagggcgacctgaagctgtacagcatggagggcgtgggcacagatgctgtgatctacctgaaggccctgagcagcgagagctttgagcggctgcccgtcttcaacaagagcgcctggaggcactacaagaccaccccagaggctgatgactggagcaaccccagcagcgagcccagagatgccagcaagtacaaggccaagcaggacaagatcaagaccaacagaaccttctag

SEQ ID NO: 53424 - DNA, 1248 bp, Artificial Sequence
  derived and/or modified sequence
atgcggctgttccggtggctgctgaagcagcccgtgcccaagcagatcgagcgatatagccggttcagcccaagcccgctgagtattaaacagttccttgacttcggccgtgacaatgcatgtgaaaagactagttatatgttcctgcgtaaagaattgccagttagactggctaacacgatgcgagaagtgaatctcctgccggacaacctgttgaatcgtccttccgtgggattggttcaatcatggtacatgcagtctttcttggaactgcttgaatacgaaaataagtcacctgaagacccccaggtgctggataacttcctccaggtcttgattaaggtgaggaaccgacacaacgatgtggtacctaccatggctcagggggtgattgaatacaaggaaaaatttggattcgacccgtttatatcgactaatattcagtacttcttagaccggttttacaccaatcgtatctcatttcggatgttgatcaaccagcatactctgctgttcggaggggacaccaaccctgttcatccgaaacacatcggtagtattgatcctacgtgcaacgtggccgatgttgtcaaggacgcatatgaaaccgcaaaaatgctgtgtgaacagtattacctggtggctccagaactggaggtggaggaatttaacgctaaagctcctgacaagcctatccaggtggtttacgtcccctcacatttgttccatatgttgttcgaattgttcaaaaacagcatgcgggccacggtcgagctctacgaggaccgtaaagagggttaccccgcagttaagacattagtgacattgggcaaagaagacctgtccatcaagattagcgatctgggaggcggcgtccccctcaggaagatcgaccggctgtttaactacatgtactccacagccccaaggccatcacttgagccaactcgcgcagcgccactggcgggtttcggctacgggctgcctatcagtcgcctctacgcacgctactttcagggcgaccttaaactatatagcatggaaggcgtaggaaccgatgccgtgatctaccttaaggccctgtcttccgagtccttcgagcgcctgccagtgtttaataagtctgcttggaggcactataaaactacccctgaggcggacgactggtcaaacccgtctagtgagccgcgagacgctagcaagtacaaagctaagcaggacaaaattaagacaaaccggacattctag

SEQ ID NO: 53425 - DNA, 1248 bp, Artificial Sequence
  derived and/or modified sequence
atgagactgttcagatggttgcttaaacaaccagtcccaaagcagatcgaacgctattctcggttttccccctcgccactgagtattaagcagttcctggactttggtagagataatgcctgcgagaaaacttcctacatgtttcttcgcaaggagctcccagtgcggctggcaaacaccatgagagaagtgaatctgctgccagacaacctgctcaaccgcccaagtgtgggcctggttcagagctggtatatgcagtctttcctggaattgctggaatatgagaataaaagccccgaagatcctcaggtcctggataatttcctccaagtcctgataaaggttagaaatcgacataacgatgtagttccaacaatggcgcagggcgtgatagagtataaagagaagttcggctttgatccctttatcagtaccaacatccagtactttctcgaccgattctacacgaaccgtatcagtttccgaatgctgatcaaccaacataccctgctgttcggcggagacactaatcccgtgcatccaaagcacatagggagcatcgaccccacatgcaacgtggccgatgttgtgaaagatgcgtacgagaccgcaaaaatgctgtgtgagcaatactatttggtcgcccctgaactggaagtggaggaattcaacgcgaaagctcccgacaaacccatacaggtggtgtatgtcccttcacatctattccatatgctctttgagctgtttaagaacagtatgcgcgcaaccgtggaactgtacgaagataggaaggaagggtatccagccgtcaagaccctggtgacgcttggaaaagaagatttgagcatcaagatttccgatctgggtggtggggtgcccctccgtaaaatcgaccggctttttaactatatgtactcaacggctccacgcccaagtttggaacctacccgcgctgcccctcttgccggatttggatatggattaccaatctctcgcctctacgccaggtactttcaaggggacctaaaattatattccatggagggagtcggaacggacgcagtaatctatctgaaggccttgtctagcgaatcttttgagcgactgcccgtgttcaacaagtccgcctggagacactataaaacaacaccggaggccgatgactggagtaacccctcctcagaacctagggatgcctctaagtataaggccaagcaggacaagataaagactaatcgcaccttctag

SEQ ID NO: 53426 - DNA, 1921 bp, Artificial Sequence
  derived and/or modified sequence
atgcggctgttccggtggctgctgaagcagccggtgcccaagcagatcgagcgctactcgcgcttttcgccgtcgccgctctccatcaaacaattcctggacttcgggagagataatgcatgtgagaaaacttcatatatgtttctacgaaaggaacttcctgtgcggctggctaacacaatgagagaagttaatcttctgccggataatttacttaaccgcccttcagtgggattggttcagagttggtatatgcagagttttcttgaacttttagaatatgaaaataagagccctgaggatccacaggtcttggataactttctacaagttctgattaaagtcagaaatagacacaatgatgtggttcctacaatggcacaaggagtgattgaatacaaggagaagtttgggtttgatcctttcattagcactaacatccaatattttctggatcggttttataccaaccgcatctctttccgcatgcttattaatcagcacacacttctgtttgggggtgacactaatcctgttcatcctaaacacataggaagtatcgatcccacctgtaacgtggcggatgtggtgaaagatgcatatgaaacagccaagatgctgtgtgaacagtattacctggtagctccagagctggaagttgaagaattcaatgccaaagcgccagacaaacctattcaggtggtttatgtgccctcacatctgtttcatatgctatttgagttgttcaagaactcaatgagagcgacagttgaactctatgaagacagaaaagagggctaccctgctgttaaaaccctcgttactttgggtaaagaagacttatccattaagatcagtgacctaggtggtggtgtcccacttcgaaaaatagatcgtctttttaactacatgtattctactgctcctagacccagcctggagcctaccagagctgcccctttggctggatttggttatggtttgccaatttcccgtctgtatgctagatattttcaaggagatctgaaactgtattccatggaaggagtgggtactgatgctgtcatttatttgaaggctctttcaagtgagtcatttgagagacttccagtttttaataagtccgcatggcgccattacaagaccacgcctgaagccgatgattggagcaatcccagcagtgaacccagggatgcttcaaaatacaaagcaaaacaagacaagatcaagactaatagaactttctagaggactgaatgctgtggtcctctctgtgaagaaagattgccttctgcaagtcaaacagagagaactgctttctcccacctgctctgagcgtggcatcacagttattcctagtgcttaaatgtgtattttctctctaccacctggactttcccaaagagtttttcctgtagctactccagatcttccactaaagtagtaactttttaatgacatcttgctgtggtgtgattgatgcctgtcaccgaagagcacagagcctccttacagctcttgtgccctcgtactctccatcttgttatcatagcatctgatgtcttcagtccttccaggattctgtgcgcctttcccattccagatacagcagatcgtactgttgctccttgtgaccaaataccatatttgtcccaaacctccacctagggccctgggaccctgaaagtggaagacatcaggtggccatgccctgatgatttagtcccagagccctccgtctctcccgtgcctccctccgccactctatgatttagacttttgccttcttccatctgatcggattctcattgtgagatgtggtgactttcatgttagatcttcttcattgatgccttggttttattttaaaattcatttgtatatgtctgttgattaaagcattcgaaatgttatcttagaa

SEQ ID NO: 53427 - protein, 32 aa, Artificial Sequence
  derived and/or modified sequence
MWTRNLMARALYDNVPECAEELAFRKGDILTV

SEQ ID NO: 53428 - protein, 834 aa, Artificial Sequence
  derived and/or modified sequence
MWTRNLMARALYDNVPECAEELAFRKGDILTVIEQNTGGLEGWWLCSLHGRQGIVPGNRVKLLIGPMQETASSHEQPASGLMQQTFGQQKLYQVPNPQAAPRDTIYQVPPSYQNQGIYQVPTGHGTQEQEVYQVPPSVQRSIGGTSGPHVGKKVITPVRTGHGYVYEYPSRYQKDVYDIPPSHTTQGVYDIPPSSAKGPVFSVPVGEIKPQGVYDIPPTKGVYAIPPSACRDEAGLREKDYDFPPPMRQAGRPDLRPEGVYDIPPTCTKPAGKDLHVKYNCDIPGAAEPVARRHQSLSPNHPPPQLGQSVGSQNDAYDVPRGVQFLEPPAETSEKANPQERDGVYDVPLHNPPDAKGSRDLVDGINRLSFSSTGSTRSNMSTSSTSSKESSLSASPAQDKRLFLDPDTAIERLQRLQQALEMGVSSLMALVTTDWRCYGYMERHINEIRTAVDKVELFLKEYLHFVKGAVANAACLPELILHNKMKRELQRVEDSHQILSQTSHDLNECSWSLNILAINKPQNKCDDLDRFVMVAKTVPDDAKQLTTTINTNAEALFRPGPGSLHLKNGPESIMNSTEYPHGGSQGQLLHPGDHKAQAHNKALPPGLSKEQAPDCSSSDGSERSWMDDYDYVHLQGKEEFERQQKELLEKENIMKQNKMQLEHHQLSQFQLLEQEITKPVENDISKWKPSQSLPTTNSGVSAQDRQLLCFYYDQCETHFISLLNAIDALFSCVSSAQPPRIFVAHSKFVILSAHKLVFIGDTLTRQVTAQDIRNKVMNSSNQLCEQLKTIVMATKMAALHYPSTTALQEMVHQVTDLSRNAQLFKRSLLEMATF

SEQ ID NO: 53429 - DNA, 99 bp, Artificial Sequence
  derived and/or modified sequence
atgtggacaaggaacctgatggcccgcgcactgtatgataacgtcccggagtgcgcagaagaattggctttccgaaagggagatatccttactgtatag

SEQ ID NO: 53430 - DNA, 2505 bp, Artificial Sequence
  derived and/or modified sequence
atgtggacacgcaatttgatggccagagcactctacgacaacgtgcccgagtgcgcagaagagctagcgtttaggaaaggggacatcctgaccgttattgaacagaacaccgggggactggagggatggtggctgtgctctctgcatggtagacagggtattgtgccgggcaatagggtcaaactgttaataggccctatgcaggaaactgcttcatcgcacgaacagccagcctccggtctcatgcagcagacattcggtcaacaaaagctgtaccaggtgcctaatccccaagctgcgccacgggacaccatctaccaagtgcctccctcgtaccagaatcagggaatctatcaggtgcctacgggtcatgggacccaggagcaggaagtctatcaggtgccaccctcagtgcagaggtcaatcgggggcacaagcgggcctcacgtaggaaagaaagtgatcactccagtgcggactggacacgggtatgtatacgagtatccctcgaggtatcagaaggatgtgtatgacatcccaccctcgcacaccacacagggagtttacgatattcctccatcatcagcgaaaggacccgtttttagcgtgccggttggcgagattaagccccagggcgtgtacgatatccctcctacgaagggcgtgtacgctatccctccctcagcctgtcgggatgaggccgggctgcgggagaaagattatgattttcccccgccaatgaggcaagcaggtagacctgatctacgacccgagggagtgtatgacataccacccacatgtactaagcctgctggcaaagatttgcacgtaaaatacaactgtgacattcccggggctgctgagcccgtagcccggcgtcaccaatccctgtcacctaaccatccacctccgcagctcggacagtccgtgggctctcaaaatgacgcttacgatgttcctagaggagtacagtttctcgaaccgcctgccgagacatcagaaaaggctaatccccaggaacgggacggcgtgtatgacgtgcccttgcacaacccccccgacgctaagggtagtcgcgacctagttgacggaataaatcgcttgagcttttcgagcacgggaagcacccgcagcaacatgtccacctcgtctactagcagtaaggaaagtagcctttctgcctcacccgcccaggacaaacgactattcctagaccctgacacggctatcgagcgactccaacgtctgcagcaagcactggagatgggagttagttcgctgatggctctggtgaccactgactggcggtgttacggctacatggaacggcacatcaacgaaatccgaacggccgtggacaaggttgagttgttcctgaaggagtacctgcactttgtaaaaggcgctgtggccaatgccgcttgcctccctgagctcattctgcataataagatgaaacgagagctgcaacgcgtggaggacagtcatcagatccttagtcagacaagccacgatctgaacgagtgttcatggtcccttaatatactcgcaattaacaaaccacagaataaatgtgacgacctcgataggttcgttatggtggccaagactgttcctgatgacgccaagcagctcaccacaacgatcaataccaacgccgaagccctgttccgccccggacctgggtccctgcatctcaaaaacggaccagagagtatcatgaacagcacagagtatccccacggcggttcccagggacagcttctgcatccaggcgaccacaaggcccaagcccataataaggcgcttccgcccggattaagcaaagagcaagctcctgattgtagcagctctgatgggtccgagcgcagttggatggacgactacgattacgtgcatcttcagggcaaagaggagttcgagcgccagcagaaggagctcctggagaaagagaacataatgaaacaaaataaaatgcagctggagcatcaccaactgtctcaattccaacttctagagcaggagattaccaagccagttgagaacgacatctccaaatggaaacctagtcagtccctgccaacaactaactctggagtctctgcccaggataggcagctgctttgtttttattatgatcaatgcgagacacactttatatcccttttgaatgccatcgacgcactatttagctgcgtttcaagcgcccaaccaccccgcatctttgtggctcactccaagtttgtgatactgtccgctcataagctagtttttataggcgataccttaacgaggcaggtcaccgcacaggatatcaggaataaggtgatgaattcctccaaccagctatgtgagcaactgaagactattgtaatggccaccaaaatggccgcactgcattacccatcaaccacggctctccaggagatggtacaccaggtgacagatctcagtagaaatgctcaattatttaaaaggagtttactagaaatggccaccttttag

SEQ ID NO: 53431 - DNA, 99 bp, Artificial Sequence
  derived and/or modified sequence
atgtggaccaggaacctgatggcccgggccctgtatgacaacgtgcctgaatgtgccgaggagctggccttcaggaagggggacatcctgactgtgtag

SEQ ID NO: 53432 - DNA, 2505 bp, Artificial Sequence
  derived and/or modified sequence
atgtggaccaggaacctgatggcccgggccctgtatgacaacgtgcctgaatgtgccgaggagctggccttcaggaagggggacatcctgactgtgattgagcagaacacaggaggcctggagggctggtggctgtgcagcctgcacggccggcagggcatcgtgcccggcaacagagtgaagctgctgattggccccatgcaggagacagccagcagccatgagcagcctgccagcggcctgatgcagcagaccttcggccagcagaagctgtaccaggtgcccaacccccaggccgccccccgggacaccatctaccaggtgcccccatcctaccagaaccagggcatctaccaggtgcccaccggccacggcacccaggagcaggaggtgtaccaggtgcccccatctgtgcagaggagcatcggcggcaccagcggcccccacgtgggcaagaaggtgatcacccctgtgaggacaggccacggctacgtgtatgagtaccccagccgctaccagaaggatgtgtatgacatcccccccagccacaccacccagggcgtgtatgacatcccccccagcagcgccaagggccctgtgttttctgtgcctgtgggggagatcaagccccagggcgtgtatgacatcccccccaccaagggcgtgtatgccatcccccccagcgcctgcagagatgaggccggcctgcgggagaaggactatgacttccccccacccatgaggcaggccggccgcccagacctgcggcctgagggcgtgtatgacatcccccccacctgcaccaagccagctgggaaggacctgcacgtgaagtacaactgtgacatccctggagctgctgagcctgtggcccggcggcaccagagcctgagccccaaccaccccccaccccagctgggccagagcgtgggcagccagaatgatgcctatgatgtgccccggggcgtgcagttcctggagcccccagctgagaccagcgagaaggccaacccccaggagagagatggagtgtatgatgtgcccctgcacaaccccccagatgccaagggcagccgggacctggtggatggcatcaaccggctgtccttcagcagcacaggcagcaccaggagcaacatgagcaccagcagcaccagcagcaaggagagcagcctgagcgccagccctgcccaggacaagaggctcttcctggaccctgacacagccatcgagcggctgcagaggctgcagcaggccctggagatgggcgtgagcagcctgatggccctggtgaccacagactggcgctgctacggctacatggagcggcacatcaatgagatcagaacagctgtggacaaggtggagctgttcctgaaggagtacctgcactttgtgaagggagctgtggccaatgctgcctgcctgcctgagctgatcctgcacaacaagatgaagcgggagctgcagagggtggaggacagccaccagatcctgagccagaccagccatgacctgaatgaatgttcctggagcctgaacatcctggccatcaacaagccccagaacaagtgtgatgacctggacagatttgtgatggtggccaagacagtgcctgatgatgccaagcagctgaccaccaccatcaacaccaatgctgaggccctcttccggcccggccctggcagcctgcacctgaagaatggacctgagagcatcatgaacagcacagagtacccccatggaggcagccagggccagctgctgcaccctggggaccacaaggcccaggcccacaacaaggccctgcccccaggcctgagcaaggagcaggccccagactgcagcagcagtgatggcagcgagaggtcctggatggatgattatgactatgtgcacctgcagggcaaggaggagtttgagcggcagcagaaggagctgctggagaaggagaacatcatgaagcagaacaagatgcagctggagcaccaccagctgagccagttccagctgctggagcaggagatcaccaagcctgtggagaatgacatcagcaagtggaagcccagccagagcctgcccaccaccaacagcggcgtgtctgcccaggaccggcagctgctgtgcttctactatgaccagtgtgagacccacttcatcagcctgctgaatgccattgatgccctcttcagctgtgtgtcctctgcccagcccccacgcatctttgtggcccacagcaagtttgtgatcctgagcgcccacaagctggtgttcatcggggacaccctgacccggcaggtgacagcccaggacatccggaacaaggtgatgaacagcagcaaccagctgtgtgagcagctgaagaccatcgtgatggccaccaagatggccgccctgcactaccccagcaccacagccctgcaggagatggtgcaccaggtgacagacctgagcagaaatgcccagctgttcaagaggagcctgctggagatggccaccttctag

SEQ ID NO: 53433 - DNA, 99 bp, Artificial Sequence
  derived and/or modified sequence
atgtggacccggaacctgatggcccgggccctgtacgacaacgtgcccgagtgtgctgaagaacttgcatttagaaaaggtgatatcctcaccgtgtag

SEQ ID NO: 53434 - DNA, 2505 bp, Artificial Sequence
  derived and/or modified sequence
atgtggacccggaacctgatggcccgggccctgtacgacaacgtgcccgagtgcgctgaggagcttgcatttcgcaagggcgacattctaaccgtcattgagcaaaacacagggggtctggaggggtggtggttgtgctcacttcacggacgccagggcattgtaccaggcaatagagtcaagctcctaatcggacccatgcaggaaacagcctcctcgcacgaacagcctgcctcgggtctgatgcagcagacctttggccagcagaagctctatcaggtgccgaacccacaggccgcccctagggatactatttaccaagtccctccatcttaccaaaatcaaggaatatatcaggttcccactggtcacggaacccaggagcaggaggtataccaagttccccctagtgtgcaacggagcatcggcggaaccagcggtccacacgtgggaaagaaggtgatcacacctgtgaggacaggacatgggtacgtttatgagtacccgagtcgctatcagaaggatgtgtatgacattccccccagtcacactacacagggagtttatgatatccctccatccagcgctaaaggtccagtgttcagtgtgcccgtcggggaaattaaacctcaaggcgtctatgacattcctcccacaaaaggcgtctacgctatacccccaagcgcgtgtcgtgatgaagctggtctgagagaaaaagattatgatttccccccgcctatgcgccaggccggtaggcccgatctgcgcccagaaggcgtatacgatataccaccgacttgtacgaagcccgccggtaaagatctgcacgtgaaatataattgtgacatccccggggccgcagaacctgtggccagacggcaccagagcctctcacccaaccaccccccacctcaactgggccaaagcgtcgggagccagaacgacgcctacgatgtacccagaggagtacaattcctggaacccccagcagagacctccgaaaaagcaaatccccaggaaagagatggggtctatgacgtgcccctacataatcccccggacgcgaaaggcagtagagacctggttgacggtatcaacagactgtctttcagtagcaccggaagcacaaggtctaatatgtccaccagcagtacctcatctaaggagagttctttaagcgcttcacccgcccaggataaaagactgtttctagacccagacactgccattgaacgacttcagaggctgcagcaggccctggaaatgggtgtctccagcctgatggcactggtgacaaccgattggcgatgttacgggtacatggaaaggcacattaatgaaatacggacggcggttgataaggtcgaactgtttcttaaagagtatcttcatttcgtcaagggggcagtggcaaatgcagcctgtctgccagagctcatcttacataataaaatgaagcgcgagttacagcgcgtagaggactctcatcaaattctgtctcagacgagccacgatctcaacgaatgcagttggagcctaaacattctcgcaattaataagcctcagaacaagtgcgatgacctggacagattcgtgatggtggctaaaaccgttcctgacgatgccaagcagcttaccacaacaattaacacaaatgcagaagcgttattccgacccggaccggggagtctgcacctcaaaaacgggcccgaatctattatgaacagtactgaatatccccatggagggagccagggccagctgttgcaccccggtgaccataaggctcaggcacacaataaggccctgccaccgggcttaagcaaggagcaagccccagattgctccagcagtgatggatctgagcggtcatggatggacgattatgattacgtacacctacaaggcaaagaagagttcgaacgccagcaaaaagagttactggaaaaagaaaacattatgaagcagaacaagatgcaactggagcatcaccagctcagccagttccagcttttagaacaggaaatcaccaagcccgtggagaacgatataagcaaatggaaaccttcgcagtccctgccgaccaccaatagcggcgtttccgcccaggaccgtcagctactgtgcttctactacgaccagtgtgagacacatttcattagtctgctgaatgctatagacgcactcttttcctgtgtgtcgagtgcccagccccccaggatctttgtcgcccactccaagttcgtcatcctgtctgcgcacaaactcgtgtttattggcgataccctcaccaggcaggtcacagcccaggacataagaaacaaggtcatgaacagcagtaaccagctgtgcgagcagctgaagactatagtgatggcaaccaaaatggcggcactgcattacccatcgacaaccgccctgcaggagatggtccaccaagtgaccgatctttcaaggaatgcgcaacttttcaagcggagtctcttggaaatggccacattctag

SEQ ID NO: 53435 - DNA, 470 bp, Artificial Sequence
  derived and/or modified sequence
aaatgcttacagctgcctctagaagcaagtccgctcgctgcatggagagggaaacatgagcatgcagcaggactagctgtcacctcccgcccgcctgcccagagagggccagagcgtcggggaggcaagatgatccaccagcggttccatcctacacttggagagaatgaataatggggaaagaaactgaagagaaagtaacaggcaaggagatatttgcagattcagtaagctgtgaggtccgtaatgtcagacactggcaaacatcatatgttcttcaagtagagttatgaaaacgaagaaactggtcagaagagtaaaacgccggaattgtcctttccaacatccagagctgcatcattccttggggcaaaatgtggacaaggaatcttatggcaagggccttatatgacaatgtcccagagtgtgccgaggaactggcctttcgcaagggagacatcctgaccgtc

SEQ ID NO: 53436 - DNA, 3211 bp, Artificial Sequence
  derived and/or modified sequence
acacatacatatgccactcacatccgacgtgtgtggttgctcagtagggaaatgcttacagctgcctctagaagcaagtccgctcgctgcatggagagggaaacatgagcatgcagcaggactagctgtcacctcccgcccgcctgcccagagagggccagagcgtcggggaggcaagatgatccaccagcggttccatcctacacttggattcagtaagctgtgaggtccgtaatgtcagacactggcaaacatcatatgttcttcaagtagagttatgaaaacgaagaaactggtcagaagagtaaaacgccggaattgtcctttccaacatccagagctgcatcattccttggggcaaaatgtggacaaggaatcttatggcaagggccttatatgacaatgtcccagagtgtgccgaggaactggcctttcgcaagggagacatcctgaccgtcatagagcagaacacagggggactggaaggatggtggctgtgctcattacacggtcggcaaggcattgtcccaggcaaccgggtgaagcttctgattggtcccatgcaggagactgcctccagtcacgagcagcctgcctctggactgatgcagcagacctttggccaacagaagctctatcaagtgccaaacccacaggctgctccccgagacaccatctaccaagtgccaccttcctaccaaaatcagggaatttaccaagtccccactggccacggcacccaagaacaagaggtatatcaggtgccaccatcagtgcagagaagcattgggggaaccagtgggccccacgtgggtaaaaaggtgataacccccgtgaggacaggccatggctacgtatacgagtacccatccagataccaaaaggacgtctatgatatccctccttctcataccactcaaggggtatacgacatccctccctcatcagcaaaaggccctgtgttttcagttccagtgggagagataaaacctcaaggggtgtatgacatcccgcctacaaaaggggtatatgccattccgccctctgcttgccgggatgaagcagggcttagggaaaaagactatgacttcccccctcccatgagacaagctggaaggccggacctcagaccggagggggtttatgacattcctccaacctgcaccaagccagcagggaaggaccttcatgtaaaatacaactgtgacattccaggagctgcagaaccggtggctcgaaggcaccagagcctgtccccgaatcacccacccccgcaactcggacagtcagtgggctctcagaacgacgcatatgatgtcccccgaggcgttcagtttcttgagccaccagcagaaaccagtgagaaagcaaacccccaggaaagggatggtgtttatgatgtccctctgcataacccgccagatgctaaaggctctcgggacttggtggatgggatcaaccgattgtctttctccagtacaggcagcacccggagtaacatgtccacgtcttccacctcctccaaggagtcctcactgtcagcctccccagctcaggacaaaaggctcttcctggatccagacacagctattgagagacttcagcggctccagcaggcccttgagatgggtgtctccagcctaatggcactggtcactaccgactggcggtgttacggatatatggaaagacacatcaatgaaatacgcacagcagtggacaaggtggagctgttcctgaaggagtacctccactttgtcaagggagctgttgcaaatgctgcctgcctcccggaactcatcctccacaacaagatgaagcgggagctgcaacgagttgaagactcccaccagatcctgagtcaaaccagccatgacttaaatgagtgcagctggtccctgaatatcttggccatcaacaagccccagaacaagtgtgacgatctggaccggtttgtgatggtggcaaagacggtgcccgatgacgccaagcagctcaccacaaccatcaacaccaacgcagaggccctcttcagacccggccctggcagcttgcatctgaagaatgggccggagagcatcatgaactcaacggagtacccacacggtggctcccagggacagctgctgcatcctggtgaccacaaggcccaggcccacaacaaggcactgcccccaggcctgagcaaggagcaggcccctgactgtagcagcagtgatggttctgagaggagctggatggatgactacgattacgtccacctacagggtaaggaggagtttgagaggcaacagaaagagctattggaaaaagagaatatcatgaaacagaacaagatgcagctggaacatcatcagctgagccagttccagctgttggaacaagagattacaaagcccgtggagaatgacatctcgaagtggaagccctctcagagcctacccaccacaaacagtggcgtgagtgctcaggatcggcagttgctgtgcttctactatgaccaatgtgagacccatttcatttcccttctcaacgccattgacgcactcttcagttgtgtcagctcagcccagcccccgcgaatcttcgtggcacacagcaagtttgtcatcctcagtgcacacaaactggtgttcattggagacacgctgacacggcaggtgactgcccaggacattcgcaacaaagtcatgaactccagcaaccagctctgcgagcagctcaagaccatagtcatggcaaccaagatggccgccctccattaccccagcaccacggccctgcaggaaatggtgcaccaagtgacagacctttctagaaatgcccagctgttcaagcgctctttgctggagatggcaacgttctgagaagaaaaaaaagaggaaggggactgcgttaacggttactaaggaaaactggaaatactgtctggtttttgtaaatgttatctatttttgtagatattttatataaaaatgaaatattttaacattttatgggtcagtcaactttcagaaattcagggagctggagagggaaatctttttttttccccctgagtggttcttatgtatacatagaagtatctgagacataaactgtacagaaaacttgtccacgtgcttttgtatgcccatgtattcatgtttgtttgtagatgtttgtctgatgcatttcattaaaaaaaaaaccatgaattacgaagcacctt

SEQ ID NO: 53437 - DNA, 99 bp, Artificial Sequence
  derived and/or modified sequence
atgtggaccagaaacttgatggcgagggcactctacgataatgtgccagaatgtgcagaggagctcgcctttaggaagggtgacattcttacagtctag

SEQ ID NO: 53438 - DNA, 2505 bp, Artificial Sequence
  derived and/or modified sequence
atgtggacccgcaatttgatggcacgagccttatatgacaatgttcccgagtgcgctgaagagcttgcttttcgcaagggtgacattctgaccgtgatagagcagaatactggcggtctggagggctggtggctctgctcactccacggcagacagggaatagtgcctggtaaccgtgtgaaactccttatcggaccaatgcaggaaaccgcttcttcccacgagcagccggcttcagggctgatgcagcagacgtttggacagcaaaagctctaccaggtgcctaacccccaggccgcaccccgtgatacaatttaccaggtgccacccagttatcaaaaccagggaatctatcaggtacctaccggacacggcacccaggagcaagaggtgtatcaggtgcccccatcagttcaaagatctataggaggaactagcgggcctcatgtgggtaagaaagtgattacccctgtgagaactggccatggctacgtctatgaatatcccagccgctatcaaaaagatgtgtacgatattcccccatcgcatactactcagggggtctatgatatacccccaagtagcgctaaagggcctgtgttcagcgtgccggtgggagaaatcaaaccgcagggggtgtacgatatccctccaaccaagggcgtgtatgcgattcccccttcagcctgtcgcgacgaagcgggtcttcgtgagaaagattatgattttcccccacccatgcggcaagcaggtcgccctgatctgaggcccgagggtgtttacgacataccaccgacttgcactaaaccagccggtaaggatctccacgtgaaatacaactgtgatattcctggagccgcagaacccgtcgcacggagacaccaatcactatcaccaaaccatccccctccacagctgggccagtcagtgggaagccagaatgatgcatacgacgtcccccgtggagtccagtttcttgagccccctgctgagacctcagagaaagcaaatccacaagagagggatggagtttacgatgtgccactgcataatcccccagatgccaaaggctccagagacctggtggatgggatcaatagattgagcttcagttccaccgggtcaactcgatcaaacatgagtacctcttccacatctagcaaagagtcctctctgagcgcaagcccagcccaggataagcggctgttcctggatccagatacagccattgagaggctgcagcggctacagcaggccctagaaatgggcgtgagctctctgatggcgctagtgaccacggattggcgctgctacggttatatggaacgtcacatcaacgagattcgtaccgctgtcgacaaggtggagttattcctgaaggagtacttacatttcgttaagggagccgttgctaatgccgcttgccttccagaactgatcctacacaataagatgaaaagggagctgcagcgggtggaagatagtcaccagatattaagtcagacttcccatgatctaaatgaatgcagctggtcattaaatatccttgcaataaacaagccgcagaacaagtgcgatgatttagacaggttcgtgatggtggccaaaactgtgccagatgatgcaaaacagctcaccaccacaatcaatacaaacgccgaagccttgtttaggcccggaccgggaagcctgcacctcaagaacggcccagaatcgatcatgaacagcacagagtatccccatggtggatctcagggccagttgcttcaccccggtgatcataaggcgcaggctcataataaagcactccccccaggcttgagcaaggagcaggcccctgattgtagctcctccgacggtagcgaacggtcatggatggacgattacgactacgtccatctccagggcaaggaagaatttgagagacagcagaaggaacttctggagaaggaaaacatcatgaaacagaacaagatgcagctagagcaccatcagctgagtcagtttcagttactagaacaggaaatcaccaagcccgtggagaatgatatctccaaatggaaaccatcacaaagtctgccaacgactaactccggtgtgagtgcacaggatcgccagctcctatgtttctactacgatcagtgcgagactcacttcattagcctcctgaacgctattgatgccctgtttagctgcgtaagtagtgcacagcctcctcgcattttcgtggcccatagcaagtttgtaatcctatctgcacacaaattagtattcatcggagacaccttgacacgccaggtgacagctcaggacatccgcaacaaggtgatgaacagcagtaatcagctatgtgagcagttaaagactattgtgatggcaactaagatggccgcactgcactacccctctactacagccctgcaggaaatggtacaccaggttacagatctctcgcggaacgctcaactctttaaacgtagtttgttagaaatggccacattctag

SEQ ID NO: 53439 - DNA, 99 bp, Artificial Sequence
  derived and/or modified sequence
atgtggaccagaaacctgatggccagagccctgtacgacaacgtgcccgagtgcgccgaggagctggccttcagaaagggcgacatcctgaccgtgtag

SEQ ID NO: 53440 - DNA, 2505 bp, Artificial Sequence
  derived and/or modified sequence
atgtggaccagaaacctgatggccagagccctgtacgacaacgtgcccgagtgcgccgaggagctggccttcagaaagggcgacatcctgaccgtgatcgagcagaacaccggcggcctggagggctggtggctgtgcagcctgcacggcagacagggcatcgtgcccggcaacagagtgaagctgctgatcggccccatgcaggagaccgccagcagccacgagcagcccgccagcggcctgatgcagcagaccttcggccagcagaagctgtaccaggtgcccaacccccaggccgcccccagagacaccatctaccaggtgccccccagctaccagaaccagggcatctaccaggtgcccaccggccacggcacccaggagcaggaggtgtaccaggtgccccccagcgtgcagagaagcatcggcggcaccagcggcccccacgtgggcaagaaggtgatcacccccgtgagaaccggccacggctacgtgtacgagtaccccagcagataccagaaggacgtgtacgacatcccccccagccacaccacccagggcgtgtacgacatcccccccagcagcgccaagggccccgtgttcagcgtgcccgtgggcgagatcaagccccagggcgtgtacgacatcccccccaccaagggcgtgtacgccatcccccccagcgcctgcagagacgaggccggcctgagagagaaggactacgacttccccccccccatgagacaggccggcagacccgacctgagacccgagggcgtgtacgacatcccccccacctgcaccaagcccgccggcaaggacctgcacgtgaagtacaactgcgacatccccggcgccgccgagcccgtggccagaagacaccagagcctgagccccaaccacccccccccccagctgggccagagcgtgggcagccagaacgacgcctacgacgtgcccagaggcgtgcagttcctggagccccccgccgagaccagcgagaaggccaacccccaggagagagacggcgtgtacgacgtgcccctgcacaacccccccgacgccaagggcagcagagacctggtggacggcatcaacagactgagcttcagcagcaccggcagcaccagaagcaacatgagcaccagcagcaccagcagcaaggagagcagcctgagcgccagccccgcccaggacaagagactgttcctggaccccgacaccgccatcgagagactgcagagactgcagcaggccctggagatgggcgtgagcagcctgatggccctggtgaccaccgactggagatgctacggctacatggagagacacatcaacgagatcagaaccgccgtggacaaggtggagctgttcctgaaggagtacctgcacttcgtgaagggcgccgtggccaacgccgcctgcctgcccgagctgatcctgcacaacaagatgaagagagagctgcagagagtggaggacagccaccagatcctgagccagaccagccacgacctgaacgagtgcagctggagcctgaacatcctggccatcaacaagccccagaacaagtgcgacgacctggacagattcgtgatggtggccaagaccgtgcccgacgacgccaagcagctgaccaccaccatcaacaccaacgccgaggccctgttcagacccggccccggcagcctgcacctgaagaacggccccgagagcatcatgaacagcaccgagtacccccacggcggcagccagggccagctgctgcaccccggcgaccacaaggcccaggcccacaacaaggccctgccccccggcctgagcaaggagcaggcccccgactgcagcagcagcgacggcagcgagagaagctggatggacgactacgactacgtgcacctgcagggcaaggaggagttcgagagacagcagaaggagctgctggagaaggagaacatcatgaagcagaacaagatgcagctggagcaccaccagctgagccagttccagctgctggagcaggagatcaccaagcccgtggagaacgacatcagcaagtggaagcccagccagagcctgcccaccaccaacagcggcgtgagcgcccaggacagacagctgctgtgcttctactacgaccagtgcgagacccacttcatcagcctgctgaacgccatcgacgccctgttcagctgcgtgagcagcgcccagccccccagaatcttcgtggcccacagcaagttcgtgatcctgagcgcccacaagctggtgttcatcggcgacaccctgaccagacaggtgaccgcccaggacatcagaaacaaggtgatgaacagcagcaaccagctgtgcgagcagctgaagaccatcgtgatggccaccaagatggccgccctgcactaccccagcaccaccgccctgcaggagatggtgcaccaggtgaccgacctgagcagaaacgcccagctgttcaagagaagcctgctggagatggccaccttctag

SEQ ID NO: 53441 - protein, 600 aa, Artificial Sequence
  derived and/or modified sequence
MENSSAASASSEAGSSRSQEIEELERFIDSYVLEYQVQGLLADKTEGDGESERTQSHISQWTADCSEPLDSSCSFSRGRAPPQQNGSKDNSLDMLGTDIWAANTFDSFSGATWDLQPEKLDFTQFHRKVRHTPKQPLPHIDREGCGKGKLEDGDGINLNDIEKVLPAWQGYHPMPHEVEIAHTKKLFRRRRNDRRRQQRPPGGNKPQQHGDHQPGSAKHNRDHQKSYQGGSAPHPSGRPTHHGYSQNRRWHHGNMKHPPGDKGEAGAHRNAKETMTIENPKLEDTAGDTGHSSLEAPRSPDTLAPVASERLPPQQSGGPEVETKRKDSILPERIGERPKITLLQSSKDRLRRRLKEKVPDEVAVETTTPQQNKMDKLIEILNSMRNNSSDVDTKLTTFMEEAQNSTNSEEMLGEIVRTIYQKAVSDRSFAFTAAKLCDKMALFMVEGTKFRSLLLNMLQKDFTVREELQQQDVERWLGFITFLCEVFGTMRSSTGEPFRVLVCPIYTCLRELLQSQDVKEDAVLCCSMELQSTGRLLEEQLPEMMTELLASARDKMLCPSESMLTRSLLLEVIELHANSWNPLTPPITQYYNRTIQKLTA

SEQ ID NO: 53442 - DNA, 1803 bp, Artificial Sequence
  derived and/or modified sequence
atggagaattcaagcgcagcctctgcgtcctccgaagccggcagtagcaggagtcaagaaattgaggaactcgagcgcttcatcgattcttatgttctcgagtaccaggtgcaggggctcttagcggataaaacagagggagacggcgaatcggagcgcacacagtcccacatctcgcagtggacagccgattgttctgaacctctggactcttcatgctccttttcaagaggtagagcaccccctcagcagaatggcagtaaggacaactctctcgacatgctggggacagatatttgggccgcaaatacttttgactccttttcgggagctacttgggatctgcagcctgaaaaactggactttactcagtttcaccggaaggtccgccacacaccgaaacaacccctgcctcatattgacagagaaggctgcggcaaaggcaaactcgaggacggagatggcattaacttaaatgacattgaaaaggtgctgcctgcttggcagggctaccatcccatgccccatgaggtcgaaatcgcacacaccaaaaagctgttcagacgccgcagaaatgatagacgccggcaacagaggccacccgggggtaacaagccgcaacagcatggcgaccaccaacctggaagcgctaagcacaaccgggaccatcagaaatcttaccaaggtggttctgcaccacatccttctggtcggcctactcatcacggatacagtcagaaccgtcggtggcaccatggcaatatgaagcacccgcccggagacaagggcgaggcaggggcacaccgaaacgctaaggagactatgactatagagaaccctaagctagaagacacagcgggcgacacaggccactcatccctggaggctccgagatctcccgatacgctcgcccctgtagcctcagagaggctgccaccacagcaatcgggagggcctgaggtcgagaccaaacggaaggattctattctgccagagcgaattggtgagagaccaaagatcacattgctgcagtcctctaaggacagactgaggcggagacttaaagaaaaagtgcccgatgaggttgccgtcgagacaactacaccacagcagaataagatggataagcttatcgagatattaaacagtatgcgcaacaattctagtgatgttgacactaaactgaccacctttatggaagaagctcagaactcgaccaactctgaggaaatgctgggagagatcgtgcgcacgatctatcaaaaagctgtaagcgatagatcttttgcgttcacagcggcgaaattatgcgacaaaatggcccttttcatggtagagggtaccaagtttagatctttactcttgaacatgctgcagaaagattttactgtgagggaggagttgcagcagcaggatgttgaacggtggctgggcttcattacctttctctgtgaggtgttcggcaccatgcgtagctccaccggagagccctttagggtgctggtttgtccaatttatacttgtctgagagaattgctgcaatctcaggatgtcaaagaagacgcagtgctgtgctgctccatggagctgcagagcacggggcgtctcctggaggaacagctgcccgagatgatgactgaactgctggcctcagcccgcgacaaaatgttgtgtccttcagagagcatgctgacaagatccttattactcgaagtaatcgagctgcacgctaattcttggaacccgctcaccccgcccattactcaatattataatcgcacgatacaaaagttaactgcctag

SEQ ID NO: 53443 - DNA, 1803 bp, Artificial Sequence
  derived and/or modified sequence
atggagaacagcagcgctgccagcgccagcagcgaggccggcagcagccgcagccaggagattgaggagctggagcgcttcatcgacagctatgtgctggagtaccaggtgcagggcctgctggccgacaagacagaaggagatggagagagcgagaggacccagagccacatcagccagtggacagctgactgcagcgagcccctggacagcagctgcagcttcagccggggccgggccccaccccagcagaatggcagcaaggacaacagcctggacatgctgggcacagacatctgggccgccaacacctttgacagcttcagcggggccacctgggacctgcagcctgagaagctggacttcacccagttccacaggaaggtgcgccacacccccaagcagcccctgccccacatcgaccgggagggctgtgggaagggcaagctggaggatggagatggcatcaacctgaatgacatcgagaaggtgctgcctgcctggcagggctaccaccccatgcctcatgaggtggagatcgcccacaccaagaagctgttcagaagaagaagaaatgacagaagacggcagcagaggcctcctgggggcaacaagccccagcagcacggggaccaccagcccggcagcgccaagcacaacagagaccaccagaagagctaccagggcggcagcgccccccaccccagcggccggcccacccaccacggctacagccagaacagacgctggcaccacggcaacatgaagcaccccccaggggacaagggggaggccggggcccacagaaatgccaaggagaccatgaccatcgagaaccccaagctggaggacacagctggggacaccggccacagcagcctggaggcccccaggagcccagacaccctggcccctgtggccagcgagcggctgcccccccagcagagcggcggccctgaggtggagaccaagaggaaggacagcatcctgcctgagcgcatcggggagcggcccaagatcaccctgctgcagagcagcaaggaccggctgcggcggcggctgaaggagaaggtgcctgatgaggtggccgtggagaccaccaccccccagcagaacaagatggacaagctgattgagatcctgaacagcatgaggaacaacagcagtgatgtggacaccaagctgaccaccttcatggaggaggcccagaacagcaccaacagcgaggagatgctgggggagatcgtgaggaccatctaccagaaggctgtgtctgacaggagctttgccttcaccgctgccaagctgtgtgacaagatggccctcttcatggtggagggcaccaagttccgcagcctgctgctgaacatgctgcagaaggacttcaccgtgcgggaggagctgcagcagcaggatgtggagcgctggctgggcttcatcaccttcctgtgtgaggtgtttggcaccatgaggagcagcactggagagcccttccgggtgctggtgtgccccatctacacctgcctgcgggagctgctgcagagccaggatgtgaaggaggatgctgtgctgtgctgcagcatggagctgcagagcacaggccgcctgctggaggagcagctgcctgagatgatgacagagctgctggccagcgcccgggacaagatgctgtgccccagcgagagcatgctgaccaggagcctgctgctggaggtgattgagctgcacgccaacagctggaaccccctgaccccacccatcacccagtactacaacagaaccatccagaagctgacagcctag

SEQ ID NO: 53444 - DNA, 1803 bp, Artificial Sequence
  derived and/or modified sequence
atggagaacagcagcgccgccagcgccagcagcgaggccggcagctcccgttctcaggagattgaagaacttgagcgtttcatcgactcgtatgtccttgagtatcaagtacagggactgcttgctgacaagactgagggggacggtgaaagcgaaagaacccagagccacatcagccagtggacggctgattgttcggagcctctggactcctcctgctccttctcacgcggccgcgcaccccctcaacagaatggcagtaaagataattcactggatatgctcggaactgatatctgggcagccaatacattcgatagcttcagtggcgccacctgggaccttcagcctgagaaactggattttacccagttccacagaaaggttcgtcacactcctaaacaaccgctgcctcacatcgacagagaaggctgtgggaagggtaaactggaggatggagacgggatcaatctgaacgacatcgaaaaggtgctgcccgcttggcaagggtatcacccaatgccgcatgaggtggaaattgctcatactaagaagctcttcagaaggagacgaaacgacaggcggcggcagcagcgccctccaggtgggaacaaacctcagcaacatggtgatcaccagccaggatccgcaaagcataatcgggaccatcaaaaatcttatcagggcggctcagctccccacccgtccggccgtccgacccaccatggatatagccagaacagaagatggcaccatggtaatatgaaacaccctccaggggacaagggagaggccggagcacatcggaacgccaaggaaacaatgacgattgagaatcctaaactggaggacaccgcgggggacactggacatagtagtctcgaggcacccagatctcccgacacacttgcacctgtggcatcagagcggctccctccacagcaatcagggggtcccgaggtcgaaactaagagaaaagactctatcctgccagaacgaataggggagcgtcctaaaattactctgcttcagtcctccaaagatagacttcggcgccgcttgaaagagaaggtgcctgacgaggtagcagtcgagactaccactccccaacaaaataagatggataagctcattgagatcctcaatagcatgcgcaacaatagtagtgacgtcgataccaaactaacaacattcatggaggaagcccagaattccaccaacagcgaggaaatgctcggtgagatcgtccgaactatttatcagaaagccgtctccgacaggagttttgcctttaccgccgccaaattatgtgataagatggctctcttcatggtggagggaactaagtttcgctccttactcctgaacatgttgcagaaggatttcaccgtccgcgaggagctgcagcagcaagacgtcgaacggtggctcggcttcattaccttcctgtgtgaggtatttggcacaatgagatcgtctacgggggagccgttccgagtactggtgtgtcctatatatacgtgcttgcgcgagcttctgcagtcccaggacgtgaaagaggacgccgtcttatgctgctctatggaactccagtctacaggccgcctgctggaagagcaactcccagagatgatgacagagctgctggctagtgcaagggataaaatgttgtgtcccagtgagtcaatgttaacacgatcactactgctcgaggtcatcgaactgcatgcaaacagctggaatccactgaccccgcctattacccagtactataataggaccatccaaaaactgacagcctag

SEQ ID NO: 53445 - DNA, 1803 bp, Artificial Sequence
  derived and/or modified sequence
atggaaaattcgtccgccgctagtgcttcatctgaagccggttcttctcgctcacaggagatcgaggagttggagcgcttcatcgatagctacgtactggaatatcaagtgcagggccttctggccgataagaccgaaggagacggcgagtctgagcggactcagtcccacatctctcagtggaccgcagactgttccgaaccactggattcctcttgctccttctctagaggacgcgctccaccacaacagaatggatccaaggataactcactcgacatgctcggtactgacatatgggccgctaacacttttgactctttcagcggggctacctgggatctgcaaccagagaaactcgactttacacagtttcacaggaaagttcgacacacccctaagcagcctctgcctcacatcgacagggaaggatgtgggaagggaaagctggaggatggcgatgggatcaatctaaacgatatcgagaaagttctgccggcttggcaggggtatcaccctatgccacatgaagtcgaaatcgcacatactaaaaagttgtttaggcgaaggcggaacgataggaggcgacaacaacgaccaccgggaggcaataagccccagcagcacggagatcatcaacctgggtcagcaaaacacaacagagaccatcagaagagttaccaaggaggtagcgccccacaccctagcggacggccaacacaccatggttatagccagaacaggagatggcaccatgggaacatgaaacacccgcctggtgataagggcgaagccggtgcccaccggaatgctaaagagacaatgaccatagaaaaccccaagctggaagacaccgctggggacacagggcactcgtccctggaagcccctcgtagtcctgacacattggcgccagtagcaagtgagcggcttcctccccagcagagcggcggacctgaggtggagacaaaacgcaaggactccatcttgcccgaacggataggcgagcgcccaaaaataactcttctccagtcgtcaaaggacagactccgtcgcagactcaaggagaaagtgccagatgaagtcgcagtcgaaactacaactcctcagcagaataagatggacaaactgatcgagattctgaacagcatgcggaacaactcctctgacgtggacacaaagctcaccacattcatggaggaagcccagaattctaccaacagcgaagaaatgcttggagagatagtccggacaatttatcagaaagccgtttcggatagaagctttgctttcactgcagcgaagctatgtgacaagatggccctgttcatggtggaagggacaaagtttaggtccttgcttttaaacatgctacagaaggatttcaccgtaagggaagagctacagcagcaggatgttgagcggtggctggggtttataacatttctgtgcgaagtgttcgggacaatgcgctcttctaccggcgaaccctttcgggtgctcgtgtgtccaatttatacctgccttagagaattactgcaatctcaggacgtgaaagaggacgcagtgttgtgttgttcgatggagcttcagtcaaccggccgtctactggaagaacagttacctgagatgatgaccgaattgctggcctctgccagagacaagatgctgtgtcctagtgaatccatgcttacgcgctccctgttgcttgaggtcatcgagctgcatgctaactcctggaacccgctgactccaccgataactcagtattacaaccgcactatccagaaattaaccgcctag

SEQ ID NO: 53446 - DNA, 5810 bp, Artificial Sequence
  derived and/or modified sequence
gtcagatcagggatcattttttttccttcctctactccctcccccctacccgcccctccctccctgtttcccttccctccctccctcccctctctgctgggtctgtgcgctggggcgcccgatcccctccgcagctgggacgctccgaactcgaggcaggagtcggctctccggagcctcgtccctcccttccccttccctgcccccttcccccacccccgactcgggcttggcgcggcggccagaggaaccccgagcccgcatttgctgcatcgagcagttggtttagtatcagccaaacttgcagctgttcagaccgcgctccgccgagtcccggcccaggcccctgagctggagggatggaaaactcctctgcagcatcagcctcctcggaggcagggagcagccgctcccaggagatcgaggagctggagcgcttcatcgacagctacgtgctggagtaccaggtgcaggggctgctggctgacaagacggagggtgatggcgagagcgagaggacccagtcccacatctcccagtggacagcggactgcagcgaaccgctggacagcagctgttccttctcccgagggcgagcccccccacagcagaatggcagcaaagacaactctctggacatgctgggcacggacatctgggcggccaacaccttcgattccttcagtggtgccacctgggacctgcagccggaaaagctggacttcacccagttccaccgcaaagtccgacacacgcccaagcagcccctgccacacatcgaccgcgaagggtgtggcaaagggaagctggaagatggggatggcatcaacctgaatgacatcgagaaggtccttccagcctggcagggctaccacccgatgccccatgaagtggagatcgcacacaccaagaagctgttccgcaggaggagaaatgatcgaaggcggcagcagagacctccggggggcaacaagccccaacagcatggtgaccaccagccaggcagtgccaaacacaacagggaccaccagaaatcctaccaggggggctcagcaccccacccctcagggaggcccactcaccatggctacagccagaaccggcgctggcaccatggcaacatgaagcacccaccaggcgacaagggggaggcaggcgcacaccgcaatgccaaagagaccatgaccatcgagaacccaaaactggaggacactgcaggggacaccgggcacagcagccttgaggccccccgcagccctgacaccctggccccggtggcttctgagcggctgcccccacagcagtcaggggggccagaggttgagacaaaacgtaaagacagtattcttcccgagcgcatcggggagcggcccaaaattaccctgctccagtcttccaaagacagactgcggcgaaggctaaaggaaaaggtaccggatgaagtggccgtggagacgaccactccccagcagaacaagatggacaagctgatcgagatcctgaacagcatgcggaacaacagcagcgacgtggacaccaagctcaccaccttcatggaggaggcccagaactccaccaactccgaggagatgctgggcgagatcgtgcgcacaatctaccagaaggctgtgtccgaccgcagcttcgccttcaccgctgccaagctctgcgacaagatggcgctctttatggtggaggggaccaagttccggagcctgctcctcaacatgctgcagaaggacttcacggtgcgcgaggagctgcagcagcaggacgtggagcgctggctgggcttcatcaccttcctgtgcgaggtcttcggcaccatgcgcagcagcacaggcgagcccttccgtgtgctcgtgtgccccatctacacctgcctcagggagctcttgcaatctcaggatgtgaaggaagatgctgtcctttgctgctctatggagctgcagagtacaggccggctgctggaggaacagctgcctgagatgatgacagagctcctggccagcgcacgggacaagatgctgtgcccctcggagtccatgctgacccggtcgctgctcctagaggtcatcgagctccacgctaacagctggaaccctctgacgccccccatcacgcagtactacaacagaaccatccagaaactgacagcctgacagccagggggcctggcaggcggcccacgggcagctggggccctggtgcacagggccagatggacaggcgggaggacaggggtggccctggcgggagaaagaaatggggaggagggcaggcagagtcggtggccagtctggagccagacggggaagggagcaaatccctgagaggagtgcccccgcacaagccccccagcccgagcatgcaagctcacaccaataagggaagcatgtttctttttcctggtggccctggccctccccttcctcactcccgcctctcccctccccatcagacccatcccccacggagctttgtgtgagggatctcatcgctgtgactcctcggagaccttggcagcctcgcacgccggggcaccgcttgggtcagaaaggacctcggaaggctgaaaaagtgggtcggagacgggctcgcattgttcccgcatgctgtcagccgcagtcgccaactggcagcaggcgacgtgtagcagatgtccgggaggacaaaggcaggcacggtccccaccagccgcccgtaattgacggcctttgtcagccatggcagagctgacgctccacctcccacctccaagtcctcctcactgcagcccccacagcctcaggcctagggggtcaggcgcagcgggggagatggagtttgcagttccacttgcactcttttgtttattgtgttttatttttcaaaagtcggttgctttgaagtctctttggccaatgaaaatgcccgtgatgtgatcacacagtcagcactgttgaggacccccggattagtgggagatcaaacccagctcccctctagaagaaggattcgagccacagacagcttgccagtagccaattagggtaattggaaacttctgccccggcggggggtccccgctggaatcctgtgttcctcgccactggcttccagcgcctctgttttctcaaagggctgatactgtcaccactgggaccaagttaaacctggtcctggccccaggggccttgtggcaaacagggcacagaacgagactggcaaattaaaaccaaaattctagatggtgtcttgcgctccacacgcaggtcttactggggaaaaggatgggagtgggggctccccaggactcgattttagctaatgcgctgtgtcactgccccagctcggacgtagaagcccagccctccgtgagctcttgggaaaggggtgaattcactgggtcatggaagggacagtcaggtgaccagcggggtcgccagatgaagcttcccagccgggaaacaagacggggtttcttggcaggccctggtcctggggagcaggccctgttgttggctggagaggaaggtgtggggtggaacaggtgtccacatagctccatctctgggggctggagcacacactttgatgagcccccccggaaatgatgtcagagcctagccgcttccttatttgctcttttattgaggccgggcaggccctgggtcactttggaggcccctcttggtccacactggactggccgggaggtgatgggcggggaaggttctcgtgattgattgattctgagtctgagagtggcgagtggggagaggcttccccagttctctccagctttccctgcagctgcaacctgccctctggtcccaggtgtggagcctttgcctgtctctaaaaagagcctgttggcgacaaggtgtagggggcacaagtttacctgaaacaggtcagtggtctctcccaagaagcgcacgccacctctggtccctggccctgaaccctgccttcttcctccctccacggtttcttcccagactttctcaagctcctcctcactgcccttcctccccagcccagcctgggaacacagatgccccgcgggtaggaggcctcgagggaggagccgggctgatgcggggctgctcagggcaggccccagggcgagcttgccatcgtggccaggcagcctccacctgtgcttcagtggcccctgcccccctgaagcatgtggggtttgtccgctaggaggaggcaaggcccccgaagagaggagagacctgggagtgggagctcaggtcagggaggaggcaggggagtggggtctcccagacccaacggtgagctcagagcaagcttcacgcaggacgctccgaaacactgtgtggagggggctgtgttgtgggcaccttggggcctgattctccttcctccgaacgggctccttgatggcctggccacaggggcagctccccattggctgttaggaccagagtgtgaagaagaagtgaaatataaatatgtatacatatataaatatatttttaattacatgtcgtgtcacggtggctccagacatactgtttgcctagtttattccactgcttgaaagcgcttcctagccaatctgaacaacaacactttaagctgtttttctaaatgcaggttgctgctcctttttcagatatggaaggaaaacgttaagactattttttttttaaagaaacaacagtcaagcctaaaatttgagaccccgaggcagcttcccgagggagactgctcagacaggaactgcaggacagaagtggatgccccacagaccctggccccctccccaagtccatcccctctctgtggcatgaggaaggccgcgtccgagttgacctctgaatgtatgtgatgagaggcagagctggatattgcatttctaaggcttgcattgctttcccctcgcccgcggttcttggcgcatggaagaggcggtccagccatctgatgttgatcctgtctcagtctccccactgcctgtcaggatgagttagtcattgtttttctccgaggcggcctgcttgccacagccctgctccccaaggcctggtggctttgccgaagctctgggaccgcagccccagcgaggcccccaacctcacccagacgaggccaggagccccgccaccctccacgggatgtgcaccctcagaccccattctctctgttcgtccttccttgaccagtctgtaaaccttcactgtttggggatcgtcctgtccatccatgtaaatgtaaatgttggccgagtcggtatttattctgattgatttttattttattctattattttctccgagggatgagggtggggggtgtgggaagggtaccacagatcaggccggggcagctgtaggggcgggggcccagacagccaggccgccaccagagcagccccatggggtgccccagacgcgggcctccaagaagccaagtcccagtctgttttctggcatcagacaccggcccgtgttccttgtcagacagacagactctcaggcctgcctggggagtcgtgtccctcagctgcagggcactgtgttgggaaaccattggctgggcctttgaggacacagatcagaagaaagaaagacaactttcctctgcgcggaacactcacacggaagggctggccgcctccctgagccggctgggagtggacgacaggacctacctccccagagcaagggcctggggcttcccgccaaagctgccgcggaaccccgctagtgcgaccaccctccctccgtcggtatgtcctgctttccagctgaacccaaactacaagtgggtttaaaaaaataaacaccaccacc

SEQ ID NO: 53447 - DNA, 1803 bp, Artificial Sequence
  derived and/or modified sequence
atggagaacagcagcgccgccagcgccagcagcgaggccggcagcagcagaagccaggagatcgaggagctggagagattcatcgacagctacgtgctggagtaccaggtgcagggcctgctggccgacaagaccgagggcgacggcgagagcgagagaacccagagccacatcagccagtggaccgccgactgcagcgagcccctggacagcagctgcagcttcagcagaggcagagcccccccccagcagaacggcagcaaggacaacagcctggacatgctgggcaccgacatctgggccgccaacaccttcgacagcttcagcggcgccacctgggacctgcagcccgagaagctggacttcacccagttccacagaaaggtgagacacacccccaagcagcccctgccccacatcgacagagagggctgcggcaagggcaagctggaggacggcgacggcatcaacctgaacgacatcgagaaggtgctgcccgcctggcagggctaccaccccatgccccacgaggtggagatcgcccacaccaagaagctgttcagaagaagaagaaacgacagaagaagacagcagagaccccccggcggcaacaagccccagcagcacggcgaccaccagcccggcagcgccaagcacaacagagaccaccagaagagctaccagggcggcagcgccccccaccccagcggcagacccacccaccacggctacagccagaacagaagatggcaccacggcaacatgaagcacccccccggcgacaagggcgaggccggcgcccacagaaacgccaaggagaccatgaccatcgagaaccccaagctggaggacaccgccggcgacaccggccacagcagcctggaggcccccagaagccccgacaccctggcccccgtggccagcgagagactgcccccccagcagagcggcggccccgaggtggagaccaagagaaaggacagcatcctgcccgagagaatcggcgagagacccaagatcaccctgctgcagagcagcaaggacagactgagaagaagactgaaggagaaggtgcccgacgaggtggccgtggagaccaccaccccccagcagaacaagatggacaagctgatcgagatcctgaacagcatgagaaacaacagcagcgacgtggacaccaagctgaccaccttcatggaggaggcccagaacagcaccaacagcgaggagatgctgggcgagatcgtgagaaccatctaccagaaggccgtgagcgacagaagcttcgccttcaccgccgccaagctgtgcgacaagatggccctgttcatggtggagggcaccaagttcagaagcctgctgctgaacatgctgcagaaggacttcaccgtgagagaggagctgcagcagcaggacgtggagagatggctgggcttcatcaccttcctgtgcgaggtgttcggcaccatgagaagcagcaccggcgagcccttcagagtgctggtgtgccccatctacacctgcctgagagagctgctgcagagccaggacgtgaaggaggacgccgtgctgtgctgcagcatggagctgcagagcaccggcagactgctggaggagcagctgcccgagatgatgaccgagctgctggccagcgccagagacaagatgctgtgccccagcgagagcatgctgaccagaagcctgctgctggaggtgatcgagctgcacgccaacagctggaaccccctgaccccccccatcacccagtactacaacagaaccatccagaagctgaccgcctag

SEQ ID NO: 53448 - protein, 184 aa, Artificial Sequence
  derived and/or modified sequence
MSRLSRSLLWAATCLGVLCVLSADKNTTQHPNVTTLAPISNVTSAPVTSLPLVTTPAPETCEGRNSCVSCFNVSVVNTTCFWIECKDESYCSHNSTVSDCQVGNTTDFCSAKPTVQPSPSTTSKTVTTSGTTNNTVTPTSQPVRKSTFDAASFIGGIVLVLGVQAVIFFLYKFCKSKERNYHTL

SEQ ID NO: 53449 - DNA, 555 bp, Artificial Sequence
  derived and/or modified sequence
atgtccaggttatcaaggtcactgctgtgggctgccacctgtttgggagtgctgtgcgtacttagtgcggataaaaacacaacccaacatccaaatgtgaccactctcgcccccatttctaatgtcacatccgccccggtgactagcctgcccttggttaccaccccagcccccgagacatgtgagggacgaaactcttgtgtctcttgtttcaacgtgtccgtcgtcaacactacctgcttctggatcgagtgtaaggatgagagctactgcagccataattctaccgtctctgattgtcaagtcgggaatactacagatttttgttcggccaagcccacagtgcagcctagccccagcaccaccagcaagacagtcacgacatcagggactactaacaatactgtaaccccaacgagtcagcccgttcgcaagagcacttttgatgccgcatccttcatcggcggaatcgtcctggtgctgggtgtgcaggctgttatcttcttcctgtataagttctgcaagtctaaggagaggaattaccacactttgtag

SEQ ID NO: 53450 - DNA, 555 bp, Artificial Sequence
  derived and/or modified sequence
atgagccggctgagccgcagcctgctgtgggccgccacctgcctgggcgtgctgtgtgtgctgtctgctgacaagaacaccacccagcaccccaacgtgaccaccctggcccccatcagcaatgtgaccagcgcccctgtgaccagcctgcccctggtgaccaccccagcccctgagacctgtgagggcaggaacagctgtgtgtcctgcttcaacgtgtctgtggtgaacaccacctgcttctggattgagtgcaaggatgagagctactgcagccacaacagcacagtgtctgactgccaggtgggcaacaccacagacttctgcagcgccaagcccaccgtgcagcccagccccagcaccaccagcaagacagtgaccaccagcggcaccaccaacaacacagtgacccccaccagccagcctgtgaggaagagcacctttgatgctgccagcttcatcggcggcatcgtgctggtgctgggcgtgcaggccgtcatcttcttcctgtacaagttctgcaagagcaaggagaggaactaccacaccctgtag

SEQ ID NO: 53451 - DNA, 555 bp, Artificial Sequence
  derived and/or modified sequence
atgagccggctgagccggagcctgctgtgggccgccacctgcctgggcgttctgtgtgtgctcagtgcagataagaacaccacccagcaccccaacgtcactacattggcccccatctcaaacgttacatcggcccccgttacctcactacctctggtaaccacacccgctcctgagacgtgcgaggggcggaactcttgcgtgagctgcttcaatgtcagtgtggtgaacaccacgtgcttttggattgaatgtaaggatgaaagctactgtagccataactccactgtaagtgattgccaggtgggcaatacaaccgatttttgcagtgccaaaccaaccgtgcagcccagcccaagtaccacaagcaaaaccgtcaccacgtccggcacaaccaacaatacggttacccctactagccagccagtcagaaagtccacattcgacgcggcctccttcatcggtggaattgtccttgtcctcggtgtgcaggctgtgatattcttcctgtacaaattttgtaaatcaaaggaacgcaactaccatacactgtag

SEQ ID NO: 53452 - DNA, 555 bp, Artificial Sequence
  derived and/or modified sequence
atgtcccgactgagtcgtagtctgctgtgggctgccacttgtctgggcgtactgtgtgtcttgagcgccgataaaaacacaacgcagcacccaaacgttactactctggcaccaatcagcaacgtcaccagcgcacctgttactagcctgccactggtcactactccagcgcctgagacttgtgagggacggaactcttgtgtctcatgtttcaatgtgagcgtggtgaatacgacctgtttctggattgagtgcaaggatgaaagctattgttcacacaatagtacagtgagcgactgccaggtaggcaacacaacagacttttgtagcgcaaagccgaccgtccagcccagtccaagcactacttcgaaaacagtgacaacgtcaggcacaaccaataatacagtgactcccacgtctcagccagtcagaaagtcgacattcgatgctgcttcattcattggcggaatcgtcctcgtcttaggagttcaggcagttatattctttctatacaaattttgcaagagcaaagagcgaaactaccacaccctgtag

SEQ ID NO: 53453 - DNA, 2954 bp, Artificial Sequence
  derived and/or modified sequence
ggattgaggggttgactgagcgttgcgagccttagctttctcccgaacgccagcgctgaggacacgatgtcgcggctctcccgctcactgctttgggccgccacctgcctgggcgtgctctgcgtgctgtccgcggacaagaacacgacccagcacccgaacgtgacgactttagcgcccatctccaacgtaacctcggcgccggtgacgtccctcccgctggtcaccactccggcaccagaaacctgtgaaggtcgaaacagctgcgtttcctgttttaatgttagcgttgttaatactacctgcttttggatagaatgtaaagatgagagctattgttcacataactcaacagttagtgattgtcaagtggggaacacgacagacttctgttccgctaaacccacagttcagccctccccttctacaacttccaagacagttactacatcaggtacaacaaataacactgtgactccaacctcacaacctgtgcgaaagtctacctttgatgcagccagtttcattggaggaattgtcctggtcttgggtgtgcaggctgtaattttctttctttataaattctgcaaatctaaagaacgaaattaccacactctgtaaacagacccattgaattaataaggactggtgattcatttgtgtaactcactgaagccaaaatactatcttttaagatgtcccacatggaagacgctattccaggatctttaaatttccatggatgcatataggatgtttgggagcatcatccgtgaagaaaaaatcaattaaatcattgtgttcaacaggaatatttaaaatattctgcatgaatcctgtggctgtcttattttaaatagctgctgctgtgggattatattttttttccttaacatgccaaatataactttctgaaagtgatggaaaatgttgtcttgtgcagacaacatcatggctcttggcagtttaaatttagtaattttaatttagtgaacagaattgagaagaacgtgccaaatgagaatcaattaggtggatttttggctgtcatttcaaaagtggaataaatttattaatttagtagtactaaatggtatccttagattaaaattttgtgcttgataacagctgttttttctacattagaaataagatgccacacaaggaactacattccagatttaaagaaatgaaaggataccattagtgtgtataacagattattgttcatacttgtaaagcatcttatgtcattgagaatataaagaacagtgccttagaagacagtgaaaggtaagctctagcttaatgtctatgatttgttctttgacattaaggaaggtaaggattggtcagaggatgtaacttgatgtgagcagtagtaaacctgttttagatatcatactgttaatattttattgaaaatttatttcagagcggagaaacttaagctaaagtctgttatacagaattgaaagccttcgtatcttgaacctcccaacatttttcttatggctgttgaaaagtatagagctaaattgatttaattacactttcctttgtactttaaaaaaaagtatgctagcactattgtaccttgaaaggatttccaccagactgtcttgagtagtgacttctttggtgaggcaagaaggatatacattattttagaatcatttactatttaaatgagacaatcatattattttagaatcatttattttaaatgagacaatcattttaagttttaagataacagaagtgaccaatgtaatttcacaacacctaaggattttttggttgatcaggttactgtagatttttactgattgtcctggatgaatagactgtgctttttctttttctctcccttccttcttggtttcccatagtataataagcatgcatactttaacttctatagttttctcctttagagggtcgtcttcagttttagaggtttacttctcccttgcctttgactcattggactagtgcagaggctttaagtagtttaaaatgggcttttgcttttctaggtcattaacgttttttatttagtttctttagccaatagtggctgagtttcgcacttgattttcaatattttatagtaagaaatgacaaactgctttgtttcatttcataaacaaactctgcatttagataactattaaaggttgttaagatgaagatttactgtttctttgttactcgttggtacagctgtttgttttacttgcacatttgtacatatacttaatgttttcaagtgccttaattgtttaaaatctctggcttcaaagtttcttggggaaaggtcggtttacctcacattttttgtttccattagtaatattctaggtacctcacaaaatgtattatggtgccatggctgttagtttttagtgagtgctgtaggattaattcgaaaataggcagaattccattcctcccaaggtggcaaaaattagctatactgatgtaattgtcatttacctgggtatgaattccctgacacacattcatgtcaacatatgtagcaaattttgtgaaaacataacaatttgaagcttctgtaattttgagcactgctctaacaacaagcataatataaaattagttagattttgcaagtctacaaatgagctcttgcaacagaactcacagcctttttacttttttcccctaactttagcaatgtagtatcttgagccattaatttttgggtttttttaaaatccagaaggtatatagaaaccttttcagatttttcatctgatttgttcttgcagatgttcttctatcaaataccttattttaccttacagatatttgttgcacaggcagatactgctgtatttagacatttctatttcagttcattaaaaactgcaaaaccaatctgtatcatgtaccaaactgacttaaaataaatctacatgtttattgaa

SEQ ID NO: 53454 - DNA, 555 bp, Artificial Sequence
  derived and/or modified sequence
atgagcagactgagcagaagcctgctgtgggccgccacctgcctgggcgtgctgtgcgtgctgagcgccgacaagaacaccacccagcaccccaacgtgaccaccctggcccccatcagcaacgtgaccagcgcccccgtgaccagcctgcccctggtgaccacccccgcccccgagacctgcgagggcagaaacagctgcgtgagctgcttcaacgtgagcgtggtgaacaccacctgcttctggatcgagtgcaaggacgagagctactgcagccacaacagcaccgtgagcgactgccaggtgggcaacaccaccgacttctgcagcgccaagcccaccgtgcagcccagccccagcaccaccagcaagaccgtgaccaccagcggcaccaccaacaacaccgtgacccccaccagccagcccgtgagaaagagcaccttcgacgccgccagcttcatcggcggcatcgtgctggtgctgggcgtgcaggccgtgatcttcttcctgtacaagttctgcaagagcaaggagagaaactaccacaccctgtag

SEQ ID NO: 53455 - protein, 178 aa, Artificial Sequence
  derived and/or modified sequence
MSRLSRSLLWAATCLGVLCVLSADKNTTQHPNVTTLAPISNVTSAPVTSLPLVTTPAPETCEGRNSCVSCFNVSVVNTTCFWIECKDESYCSHNSTVSDCQVGNTTDFCSVSTATPVPTANSTGTTNNTVTPTSQPVRKSTFDAASFIGGIVLVLGVQAVIFFLYKFCKSKERNYHTL

SEQ ID NO: 53456 - protein, 165 aa, Artificial Sequence
  derived and/or modified sequence
MSRLSRSLLWAATCLGVLCVLSADKNTTQHPNVTTLAPISNVTSAPVTSLPLVTTPAPETCEGRNSCVSCFNVSVVNTTCFWIECKDESYCSHNSTVSDCQVGNTTDFCSGTTNNTVTPTSQPVRKSTFDAASFIGGIVLVLGVQAVIFFLYKFCKSKERNYHTL

SEQ ID NO: 53457 - DNA, 537 bp, Artificial Sequence
  derived and/or modified sequence
atgagtcgcctctcacgatctctgctctgggccgctacatgcctgggggtcctatgtgtcctcagcgctgataagaacaccactcagcatcccaatgtcaccacacttgcccctatcagcaacgttacctccgccccagtgacatccttacctctggtgactacaccagctccagagacatgcgaaggtaggaacagttgcgtaagctgcttcaacgtcagcgtggttaacacaacttgtttttggatcgaatgtaaagatgagtcctactgcagccataactcgaccgtgagcgactgccaagtggggaacaccacagatttctgtagtgtcagcacggcgacccccgtccccacggccaactccacagggacaacaaacaacacagtgactccaacctctcagccagttagaaaatccacatttgacgccgcctcgtttattggcggtatcgttttggtcctgggggtgcaggcagtcatcttcttcttgtacaaattttgcaagagcaaggaacgtaattaccatacgttatag

SEQ ID NO: 53458 - DNA, 498 bp, Artificial Sequence
  derived and/or modified sequence
atgtccagactgtcacgctccttgctgtgggccgcaacttgcctcggggtgctgtgcgttctctcggccgacaagaacactactcagcacccgaacgtgactaccctggcccccatatccaatgtgacatcagcgcccgtgacttctctgcccctggttaccaccccagcccccgaaacttgcgaaggaaggaactcttgcgtgagctgtttcaacgtgagcgtggttaatactacgtgcttctggatcgagtgcaaggacgagtcttattgctctcacaatagtacagtgtctgactgtcaagtgggcaacacgactgatttctgctcaggcaccaccaataatacagtcacacctacttcacagccagtgagaaagtcaacatttgatgccgccagtttcatcggtggcattgtcctcgttctaggtgtgcaggccgtgatcttcttcctgtataagttttgcaagtccaaagaacgcaactaccacacactttag

SEQ ID NO: 53459 - DNA, 537 bp, Artificial Sequence
  derived and/or modified sequence
atgagccggctgagccgcagcctgctgtgggccgccacctgcctgggcgtgctgtgtgtgctgtctgctgacaagaacaccacccagcaccccaacgtgaccaccctggcccccatcagcaatgtgaccagcgcccctgtgaccagcctgcccctggtgaccaccccagcccctgagacctgtgagggcaggaacagctgtgtgtcctgcttcaacgtgtctgtggtgaacaccacctgcttctggattgagtgcaaggatgagagctactgcagccacaacagcacagtgtctgactgccaggtgggcaacaccacagacttctgcagcgtgtccacagccacccctgtgcccacagccaacagcacaggcaccaccaacaacacagtgacccccaccagccagcctgtgaggaagagcacctttgatgctgccagcttcatcggcggcatcgtgctggtgctgggcgtgcaggccgtcatcttcttcctgtacaagttctgcaagagcaaggagaggaactaccacaccctgtag

SEQ ID NO: 53460 - DNA, 498 bp, Artificial Sequence
  derived and/or modified sequence
atgagccggctgagccgcagcctgctgtgggccgccacctgcctgggcgtgctgtgtgtgctgtctgctgacaagaacaccacccagcaccccaacgtgaccaccctggcccccatcagcaatgtgaccagcgcccctgtgaccagcctgcccctggtgaccaccccagcccctgagacctgtgagggcaggaacagctgtgtgtcctgcttcaacgtgtctgtggtgaacaccacctgcttctggattgagtgcaaggatgagagctactgcagccacaacagcacagtgtctgactgccaggtgggcaacaccacagacttctgcagcggcaccaccaacaacacagtgacccccaccagccagcctgtgaggaagagcacctttgatgctgccagcttcatcggcggcatcgtgctggtgctgggcgtgcaggccgtcatcttcttcctgtacaagttctgcaagagcaaggagaggaactaccacaccctgtag

SEQ ID NO: 53461 - DNA, 537 bp, Artificial Sequence
  derived and/or modified sequence
atgagccggctgagccggagcctgctgtgggccgccacctgcctgggagtcctgtgcgtgctatcggcggataagaacacgacccagcacccaaacgttactaccctggctcccatctctaatgtgaccagcgcccctgtgacttcattacccttagttaccacacccgcccccgagacctgtgaaggcagaaattcctgtgtgtcttgtttcaacgtgtcggtggtcaacactacgtgtttctggattgaatgcaaggatgaatcttattgttcccataatagtacagtttccgattgccaagttgggaacacaacggacttctgctcggtgagcacggccaccccagtgccaacagctaattcaacagggacaactaacaacaccgtgacaccaacttcccagcccgtgagaaaatctacgtttgacgcagcctcttttataggcggcatcgtcctagtgctaggtgtacaggccgtgatctttttcctctacaagttctgcaagtccaaggagcgtaactaccatacactctag

SEQ ID NO: 53462 - DNA, 498 bp, Artificial Sequence
  derived and/or modified sequence
atgagccggctgagccggagcctgctgtgggccgccacctgcctgggcgttctctgtgtgctcagcgccgacaaaaacacaacacaacatcctaacgtaacaacactggcccccatctcgaacgttacatccgcccccgttacctccctgcctctagtgaccaccccagcccctgaaacatgtgaaggcaggaactcttgtgtttcttgcttcaacgtgtccgtcgtgaacaccacctgtttctggatcgaatgcaaggacgaaagctactgttcacacaactccaccgtgtcagactgccaggtcggcaacaccactgatttttgctccggcacaacaaataatacagtaacacctacaagccagcccgtgaggaagagcacctttgatgcggcatcattcattggcgggattgttctggtgctcggcgtgcaggctgtgatatttttcctgtacaagttctgcaagtccaaggaacggaactaccacacactgtag

SEQ ID NO: 53463 - DNA, 537 bp, Artificial Sequence
  derived and/or modified sequence
atgtctcgactctcccgaagtttgctatgggctgcaacatgtctcggcgtcttgtgtgtgctgtcagcagacaagaatactacccagcatcctaacgtgactacactggcccctataagtaatgtaacctctgcacccgttacgtctctgccattggtgacaacccctgccccagagacctgcgaaggtaggaactcttgtgtgtcctgttttaatgtttccgtggtcaatacgacctgcttttggattgagtgcaaggatgaatcttactgctcacataatagtaccgtctctgactgccaagttggcaacactacagatttttgtagcgtgagcaccgccacacctgtacctacagcaaatagcactgggactaccaataatacagttactccaacctctcaaccagtgagaaagtctacattcgacgccgcttctttcattggagggattgtcctggtcctcggtgtgcaggctgtaatctttttcctctacaagttctgtaagtcaaaagagcgcaactatcacacactgtag

SEQ ID NO: 53464 - DNA, 498 bp, Artificial Sequence
  derived and/or modified sequence
atgagccgcctctccagaagtttactctgggccgctacatgtcttggggtcctttgcgtcctttctgcagataaaaacaccacacaacaccccaacgtgaccaccttagccccaatctcaaacgttaccagtgcacccgtgacaagcctgccactggtgactacacctgcaccggagacctgtgaaggacggaacagctgtgtgtcttgcttcaacgtctccgtggtgaataccacgtgcttctggatcgagtgtaaagatgaaagctactgcagccataactctacggtgtcggactgccaagtggggaatactacagacttctgctctggtactacgaataacaccgtaacgccgacaagtcagcctgtccgcaaaagcacattcgatgcagcttcctttatagggggaatcgtgctggtcctgggagtgcaagccgtgatctttttcctgtataaattttgcaaatccaaagagcgcaattatcacacgctctag

SEQ ID NO: 53465 - DNA, 2936 bp, Artificial Sequence
  derived and/or modified sequence
ggattgaggggttgactgagcgttgcgagccttagctttctcccgaacgccagcgctgaggacacgatgtcgcggctctcccgctcactgctttgggccgccacctgcctgggcgtgctctgcgtgctgtccgcggacaagaacacgacccagcacccgaacgtgacgactttagcgcccatctccaacgtaacctcggcgccggtgacgtccctcccgctggtcaccactccggcaccagaaacctgtgaaggtcgaaacagctgcgtttcctgttttaatgttagcgttgttaatactacctgcttttggatagaatgtaaagatgagagctattgttcacataactcaacagttagtgattgtcaagtggggaacacgacagacttctgttccgtttccacggccactccagtgccaacagccaattctacaggtacaacaaataacactgtgactccaacctcacaacctgtgcgaaagtctacctttgatgcagccagtttcattggaggaattgtcctggtcttgggtgtgcaggctgtaattttctttctttataaattctgcaaatctaaagaacgaaattaccacactctgtaaacagacccattgaattaataaggactggtgattcatttgtgtaactcactgaagccaaaatactatcttttaagatgtcccacatggaagacgctattccaggatctttaaatttccatggatgcatataggatgtttgggagcatcatccgtgaagaaaaaatcaattaaatcattgtgttcaacaggaatatttaaaatattctgcatgaatcctgtggctgtcttattttaaatagctgctgctgtgggattatattttttttccttaacatgccaaatataactttctgaaagtgatggaaaatgttgtcttgtgcagacaacatcatggctcttggcagtttaaatttagtaattttaatttagtgaacagaattgagaagaacgtgccaaatgagaatcaattaggtggatttttggctgtcatttcaaaagtggaataaatttattaatttagtagtactaaatggtatccttagattaaaattttgtgcttgataacagctgttttttctacattagaaataagatgccacacaaggaactacattccagatttaaagaaatgaaaggataccattagtgtgtataacagattattgttcatacttgtaaagcatcttatgtcattgagaatataaagaacagtgccttagaagacagtgaaaggtaagctctagcttaatgtctatgatttgttctttgacattaaggaaggtaaggattggtcagaggatgtaacttgatgtgagcagtagtaaacctgttttagatatcatactgttaatattttattgaaaatttatttcagagcggagaaacttaagctaaagtctgttatacagaattgaaagccttcgtatcttgaacctcccaacatttttcttatggctgttgaaaagtatagagctaaattgatttaattacactttcctttgtactttaaaaaaaagtatgctagcactattgtaccttgaaaggatttccaccagactgtcttgagtagtgacttctttggtgaggcaagaaggatatacattattttagaatcatttactatttaaatgagacaatcatattattttagaatcatttattttaaatgagacaatcattttaagttttaagataacagaagtgaccaatgtaatttcacaacacctaaggattttttggttgatcaggttactgtagatttttactgattgtcctggatgaatagactgtgctttttctttttctctcccttccttcttggtttcccatagtataataagcatgcatactttaacttctatagttttctcctttagagggtcgtcttcagttttagaggtttacttctcccttgcctttgactcattggactagtgcagaggctttaagtagtttaaaatgggcttttgcttttctaggtcattaacgttttttatttagtttctttagccaatagtggctgagtttcgcacttgattttcaatattttatagtaagaaatgacaaactgctttgtttcatttcataaacaaactctgcatttagataactattaaaggttgttaagatgaagatttactgtttctttgttactcgttggtacagctgtttgttttacttgcacatttgtacatatacttaatgttttcaagtgccttaattgtttaaaatctctggcttcaaagtttcttggggaaaggtcggtttacctcacattttttgtttccattagtaatattctaggtacctcacaaaatgtattatggtgccatggctgttagtttttagtgagtgctgtaggattaattcgaaaataggcagaattccattcctcccaaggtggcaaaaattagctatactgatgtaattgtcatttacctgggtatgaattccctgacacacattcatgtcaacatatgtagcaaattttgtgaaaacataacaatttgaagcttctgtaattttgagcactgctctaacaacaagcataatataaaattagttagattttgcaagtctacaaatgagctcttgcaacagaactcacagcctttttacttttttcccctaactttagcaatgtagtatcttgagccattaatttttgggtttttttaaaatccagaaggtatatagaaaccttttcagatttttcatctgatttgttcttgcagatgttcttctatcaaataccttattttaccttacagatatttgttgcacaggcagatactgctgtatttagacatttctatttcagttcattaaaaactgcaaaaccaatctgtatcatgtaccaaactgacttaaaataaatctacatgtttattgaa

SEQ ID NO: 53466 - DNA, 3014 bp, Artificial Sequence
  derived and/or modified sequence
atcgtccgagccccacctccctcctcttcgcccccgcacgccgaaaacaggggcctctcacgtgacccctgcgcgctcccgcgggggagcgtagtctcggaggcggcgccgcaggggattgaggggttgactgagcgttgcgagccttagctttctcccgaacgccagcgctgaggacacgatgtcgcggctctcccgctcactgctttgggccgccacctgcctgggcgtgctctgcgtgctgtccgcggacaagaacacgacccagcacccgaacgtgacgactttagcgcccatctccaacgtaacctcggcgccggtgacgtccctcccgctggtcaccactccggcaccagaaacctgtgaaggtcgaaacagctgcgtttcctgttttaatgttagcgttgttaatactacctgcttttggatagaatgtaaagatgagagctattgttcacataactcaacagttagtgattgtcaagtggggaacacgacagacttctgttccggtacaacaaataacactgtgactccaacctcacaacctgtgcgaaagtctacctttgatgcagccagtttcattggaggaattgtcctggtcttgggtgtgcaggctgtaattttctttctttataaattctgcaaatctaaagaacgaaattaccacactctgtaaacagacccattgaattaataaggactggtgattcatttgtgtaactcactgaagccaaaatactatcttttaagatgtcccacatggaagacgctattccaggatctttaaatttccatggatgcatataggatgtttgggagcatcatccgtgaagaaaaaatcaattaaatcattgtgttcaacaggaatatttaaaatattctgcatgaatcctgtggctgtcttattttaaatagctgctgctgtgggattatattttttttccttaacatgccaaatataactttctgaaagtgatggaaaatgttgtcttgtgcagacaacatcatggctcttggcagtttaaatttagtaattttaatttagtgaacagaattgagaagaacgtgccaaatgagaatcaattaggtggatttttggctgtcatttcaaaagtggaataaatttattaatttagtagtactaaatggtatccttagattaaaattttgtgcttgataacagctgttttttctacattagaaataagatgccacacaaggaactacattccagatttaaagaaatgaaaggataccattagtgtgtataacagattattgttcatacttgtaaagcatcttatgtcattgagaatataaagaacagtgccttagaagacagtgaaaggtaagctctagcttaatgtctatgatttgttctttgacattaaggaaggtaaggattggtcagaggatgtaacttgatgtgagcagtagtaaacctgttttagatatcatactgttaatattttattgaaaatttatttcagagcggagaaacttaagctaaagtctgttatacagaattgaaagccttcgtatcttgaacctcccaacatttttcttatggctgttgaaaagtatagagctaaattgatttaattacactttcctttgtactttaaaaaaaagtatgctagcactattgtaccttgaaaggatttccaccagactgtcttgagtagtgacttctttggtgaggcaagaaggatatacattattttagaatcatttactatttaaatgagacaatcatattattttagaatcatttattttaaatgagacaatcattttaagttttaagataacagaagtgaccaatgtaatttcacaacacctaaggattttttggttgatcaggttactgtagatttttactgattgtcctggatgaatagactgtgctttttctttttctctcccttccttcttggtttcccatagtataataagcatgcatactttaacttctatagttttctcctttagagggtcgtcttcagttttagaggtttacttctcccttgcctttgactcattggactagtgcagaggctttaagtagtttaaaatgggcttttgcttttctaggtcattaacgttttttatttagtttctttagccaatagtggctgagtttcgcacttgattttcaatattttatagtaagaaatgacaaactgctttgtttcatttcataaacaaactctgcatttagataactattaaaggttgttaagatgaagatttactgtttctttgttactcgttggtacagctgtttgttttacttgcacatttgtacatatacttaatgttttcaagtgccttaattgtttaaaatctctggcttcaaagtttcttggggaaaggtcggtttacctcacattttttgtttccattagtaatattctaggtacctcacaaaatgtattatggtgccatggctgttagtttttagtgagtgctgtaggattaattcgaaaataggcagaattccattcctcccaaggtggcaaaaattagctatactgatgtaattgtcatttacctgggtatgaattccctgacacacattcatgtcaacatatgtagcaaattttgtgaaaacataacaatttgaagcttctgtaattttgagcactgctctaacaacaagcataatataaaattagttagattttgcaagtctacaaatgagctcttgcaacagaactcacagcctttttacttttttcccctaactttagcaatgtagtatcttgagccattaatttttgggtttttttaaaatccagaaggtatatagaaaccttttcagatttttcatctgatttgttcttgcagatgttcttctatcaaataccttattttaccttacagatatttgttgcacaggcagatactgctgtatttagacatttctatttcagttcattaaaaactgcaaaaccaatctgtatcatgtaccaaactgacttaaaataaatctacatgtttattgaatt

SEQ ID NO: 53467 - DNA, 537 bp, Artificial Sequence
  derived and/or modified sequence
atgagcagactgagcagaagcctgctgtgggccgccacctgcctgggcgtgctgtgcgtgctgagcgccgacaagaacaccacccagcaccccaacgtgaccaccctggcccccatcagcaacgtgaccagcgcccccgtgaccagcctgcccctggtgaccacccccgcccccgagacctgcgagggcagaaacagctgcgtgagctgcttcaacgtgagcgtggtgaacaccacctgcttctggatcgagtgcaaggacgagagctactgcagccacaacagcaccgtgagcgactgccaggtgggcaacaccaccgacttctgcagcgtgagcaccgccacccccgtgcccaccgccaacagcaccggcaccaccaacaacaccgtgacccccaccagccagcccgtgagaaagagcaccttcgacgccgccagcttcatcggcggcatcgtgctggtgctgggcgtgcaggccgtgatcttcttcctgtacaagttctgcaagagcaaggagagaaactaccacaccctgtag

SEQ ID NO: 53468 - DNA, 498 bp, Artificial Sequence
  derived and/or modified sequence
atgagcagactgagcagaagcctgctgtgggccgccacctgcctgggcgtgctgtgcgtgctgagcgccgacaagaacaccacccagcaccccaacgtgaccaccctggcccccatcagcaacgtgaccagcgcccccgtgaccagcctgcccctggtgaccacccccgcccccgagacctgcgagggcagaaacagctgcgtgagctgcttcaacgtgagcgtggtgaacaccacctgcttctggatcgagtgcaaggacgagagctactgcagccacaacagcaccgtgagcgactgccaggtgggcaacaccaccgacttctgcagcggcaccaccaacaacaccgtgacccccaccagccagcccgtgagaaagagcaccttcgacgccgccagcttcatcggcggcatcgtgctggtgctgggcgtgcaggccgtgatcttcttcctgtacaagttctgcaagagcaaggagagaaactaccacaccctgtag

SEQ ID NO: 53469 - protein, 189 aa, Artificial Sequence
  derived and/or modified sequence
MSRLSRSLLWAATCLGVLCVLSADKNTTQHPNVTTLAPISNVTSAPVTSLPLVTTPAPETCEGRNSCVSCFNVSVVNTTCFWIECKDESYCSHNSTVSDCQVGNTTDFCSVSTATPVPTANSTAKPTVQPSPSTTSKTVTTSGTTNNTVTPTSQPVRKSTFDAASFIGGIVLVLEIRCHTRNYIPDLKK

SEQ ID NO: 53470 - DNA, 570 bp, Artificial Sequence
  derived and/or modified sequence
atgagtaggctctctcgctcgttgctgtgggctgccacatgcctgggtgttctctgcgtattgagcgctgacaaaaacacaactcagcaccccaacgttaccacactagcccccatctcgaatgtcacatcagcgccagtgacaagtcttccgctggttacaactccagcacccgagacatgtgagggcagaaactcttgcgtgtcttgctttaatgtcagcgtggtgaacaccacttgtttctggatcgaatgtaaggacgaaagctattgctcccacaacagcaccgtctctgattgtcaggtcggcaatacgactgacttctgtagtgtgtcgacagcaacgcccgtaccgactgctaattccacagcaaagccgaccgtacagccttcccccagcactacctcaaagacggtcacaacgtcaggtaccactaataacactgtgacgccaacaagccagcccgttcgtaaatccacctttgatgcggctagttttattggcggaattgtcctagttctggagatacgctgtcatacccggaattatatacccgatctgaaaaagtag

SEQ ID NO: 53471 - DNA, 570 bp, Artificial Sequence
  derived and/or modified sequence
atgagccggctgagccgcagcctgctgtgggccgccacctgcctgggcgtgctgtgtgtgctgtctgctgacaagaacaccacccagcaccccaacgtgaccaccctggcccccatcagcaatgtgaccagcgcccctgtgaccagcctgcccctggtgaccaccccagcccctgagacctgtgagggcaggaacagctgtgtgtcctgcttcaacgtgtctgtggtgaacaccacctgcttctggattgagtgcaaggatgagagctactgcagccacaacagcacagtgtctgactgccaggtgggcaacaccacagacttctgcagcgtgtccacagccacccctgtgcccacagccaacagcacagccaagcccaccgtgcagcccagccccagcaccaccagcaagacagtgaccaccagcggcaccaccaacaacacagtgacccccaccagccagcctgtgaggaagagcacctttgatgctgccagcttcatcggcggcatcgtgctggtgctggagatccgctgccacaccaggaactacatcccagacctgaagaagtag

SEQ ID NO: 53472 - DNA, 570 bp, Artificial Sequence
  derived and/or modified sequence
atgagccggctgagccggagcctgctgtgggccgccacctgcctgggcgtgctctgtgtgttatccgctgacaaaaatactacacagcaccccaatgttaccacattagctcccatctccaatgtgactagcgctcccgtgacttccttgcccctagtgaccacgccagctccagagacgtgtgaaggacgcaattcatgtgtcagctgcttcaatgtctccgtggtgaacaccacctgcttctggatcgagtgtaaggatgaatcgtactgttcccacaacagcaccgtctccgactgccaggtgggaaacaccacggatttttgcagcgtcagtactgccacacctgtccctacagccaatagtaccgcgaagccaactgttcagcccagcccttccaccacctctaagaccgtgaccacttccgggaccacaaacaataccgtcacccccacgtcccagcctgtgcgcaagtctactttcgacgcagcaagcttcattggcggcatcgtactcgtcctggagatcagatgtcacacacggaactatataccggatctgaaaaagtag

SEQ ID NO: 53473 - DNA, 570 bp, Artificial Sequence
  derived and/or modified sequence
atgtctcggctgagcagatctttattgtgggcagcaacatgtctgggcgtcctttgtgtcttgagtgctgacaagaacacaactcagcacccgaacgtaacaacccttgccccaatatccaatgtaacatctgcccctgttacatctcttcctctggtgactactcctgcccctgagacctgcgaaggcagaaactcatgcgtgtcgtgctttaacgtgtccgtggttaatactacttgcttttggattgagtgcaaggatgaatcttactgctcccacaactctacagtctccgattgccaggttgggaatacaacggatttttgctccgtgagtacagctacccctgtgccaaccgccaacagtacagccaaacccacggtgcaaccaagcccatcaactacttccaagacagtgacaacttccggcactaccaacaatacggtgacgccaacaagccaacctgtgagaaaaagcacctttgacgctgcgagttttatcgggggtatcgttctggtgctagagataaggtgccacacacgcaactatatccctgacctcaaaaaatag

SEQ ID NO: 53474 - DNA, 2414 bp, Artificial Sequence
  derived and/or modified sequence
gcggcgccgcaggggattgaggggttgactgagcgttgcgagccttagctttctcccgaacgccagcgctgaggacacgatgtcgcggctctcccgctcactgctttgggccgccacctgcctgggcgtgctctgcgtgctgtccgcggacaagaacacgacccagcacccgaacgtgacgactttagcgcccatctccaacgtaacctcggcgccggtgacgtccctcccgctggtcaccactccggcaccagaaacctgtgaaggtcgaaacagctgcgtttcctgttttaatgttagcgttgttaatactacctgcttttggatagaatgtaaagatgagagctattgttcacataactcaacagttagtgattgtcaagtggggaacacgacagacttctgttccgtttccacggccactccagtgccaacagccaattctacagctaaacccacagttcagccctccccttctacaacttccaagacagttactacatcaggtacaacaaataacactgtgactccaacctcacaacctgtgcgaaagtctacctttgatgcagccagtttcattggaggaattgtcctggtcttggaaataagatgccacacaaggaactacattccagatttaaagaaatgaaaggataccattagtgtgtataacagattattgttcatacttgtaaagcatcttatgtcattgagaatataaagaacagtgccttagaagacagtgaaaggtaagctctagcttaatgtctatgatttgttctttgacattaaggaaggtaaggattggtcagaggatgtaacttgatgtgagcagtagtaaacctgttttagatatcatactgttaatattttattgaaaatttatttcagagcggagaaacttaagctaaagtctgttatacagaattgaaagccttcgtatcttgaacctcccaacatttttcttatggctgttgaaaagtatagagctaaattgatttaattacactttcctttgtactttaaaaaaaagtatgctagcactattgtaccttgaaaggatttccaccagactgtcttgagtagtgacttctttggtgaggcaagaaggatatacattattttagaatcatttactatttaaatgagacaatcatattattttagaatcatttattttaaatgagacaatcattttaagttttaagataacagaagtgaccaatgtaatttcacaacacctaaggattttttggttgatcaggttactgtagatttttactgattgtcctggatgaatagactgtgctttttctttttctctcccttccttcttggtttcccatagtataataagcatgcatactttaacttctatagttttctcctttagagggtcgtcttcagttttagaggtttacttctcccttgcctttgactcattggactagtgcagaggctttaagtagtttaaaatgggcttttgcttttctaggtcattaacgttttttatttagtttctttagccaatagtggctgagtttcgcacttgattttcaatattttatagtaagaaatgacaaactgctttgtttcatttcataaacaaactctgcatttagataactattaaaggttgttaagatgaagatttactgtttctttgttactcgttggtacagctgtttgttttacttgcacatttgtacatatacttaatgttttcaagtgccttaattgtttaaaatctctggcttcaaagtttcttggggaaaggtcggtttacctcacattttttgtttccattagtaatattctaggtacctcacaaaatgtattatggtgccatggctgttagtttttagtgagtgctgtaggattaattcgaaaataggcagaattccattcctcccaaggtggcaaaaattagctatactgatgtaattgtcatttacctgggtatgaattccctgacacacattcatgtcaacatatgtagcaaattttgtgaaaacataacaatttgaagcttctgtaattttgagcactgctctaacaacaagcataatataaaattagttagattttgcaagtctacaaatgagctcttgcaacagaactcacagcctttttacttttttcccctaactttagcaatgtagtatcttgagccattaatttttgggtttttttaaaatccagaaggtatatagaaaccttttcagatttttcatctgatttgttcttgcagatgttcttctatcaaataccttattttaccttacagatatttgttgcacaggcagatactgctgtatttagacatttctatttcagttcattaaaaactgcaaaaccaatctgtatcatgtaccaaactgacttaaaataaatctacatgtttattgaattaa

SEQ ID NO: 53475 - DNA, 570 bp, Artificial Sequence
  derived and/or modified sequence
atgagcagactgagcagaagcctgctgtgggccgccacctgcctgggcgtgctgtgcgtgctgagcgccgacaagaacaccacccagcaccccaacgtgaccaccctggcccccatcagcaacgtgaccagcgcccccgtgaccagcctgcccctggtgaccacccccgcccccgagacctgcgagggcagaaacagctgcgtgagctgcttcaacgtgagcgtggtgaacaccacctgcttctggatcgagtgcaaggacgagagctactgcagccacaacagcaccgtgagcgactgccaggtgggcaacaccaccgacttctgcagcgtgagcaccgccacccccgtgcccaccgccaacagcaccgccaagcccaccgtgcagcccagccccagcaccaccagcaagaccgtgaccaccagcggcaccaccaacaacaccgtgacccccaccagccagcccgtgagaaagagcaccttcgacgccgccagcttcatcggcggcatcgtgctggtgctggagatcagatgccacaccagaaactacatccccgacctgaagaagtag

SEQ ID NO: 53476 - protein, 157 aa, Artificial Sequence
  derived and/or modified sequence
MSRLSRSLLWAATCLGVLCVLSADKNTTQHPNVTTLAPISNVTSAPVTSLPLVTTPAPETCEGRNSCVSCFNVSVVNTTCFWIECKDESYCSHNSTVSDCQVGNTTDFCSVSTATPVPTANSTAKPTVQPSPSTTSKTVTTSEIRCHTRNYIPDLKK

SEQ ID NO: 53477 - DNA, 474 bp, Artificial Sequence
  derived and/or modified sequence
atgtctaggttatcccgctcattgttgtgggccgcaacttgtttaggggtcctgtgtgtgctctcagccgataagaataccacacagcatcccaatgtgactacattggccccaatcagcaatgtgacttctgcccccgtcacttccttgcctctagttactacaccagcaccagaaacctgtgagggacgaaatagctgcgtgagctgcttcaatgtgtcagtcgtgaacactacgtgcttttggattgaatgtaaggacgaatcttactgctcccataactctaccgtctctgattgccaagtgggcaataccaccgatttctgctccgtttcaaccgccactccggttcccaccgccaattctactgcaaagcctacagtgcagccatcaccttcgacgacaagcaagaccgttacaacaagtgaaatcagatgtcatacccggaactacattcccgatctcaagaagtag

SEQ ID NO: 53478 - DNA, 474 bp, Artificial Sequence
  derived and/or modified sequence
atgagccggctgagccgcagcctgctgtgggccgccacctgcctgggcgtgctgtgtgtgctgtctgctgacaagaacaccacccagcaccccaacgtgaccaccctggcccccatcagcaatgtgaccagcgcccctgtgaccagcctgcccctggtgaccaccccagcccctgagacctgtgagggcaggaacagctgtgtgtcctgcttcaacgtgtctgtggtgaacaccacctgcttctggattgagtgcaaggatgagagctactgcagccacaacagcacagtgtctgactgccaggtgggcaacaccacagacttctgcagcgtgtccacagccacccctgtgcccacagccaacagcacagccaagcccaccgtgcagcccagccccagcaccaccagcaagacagtgaccaccagcgagatccgctgccacaccaggaactacatcccagacctgaagaagtag

SEQ ID NO: 53479 - DNA, 474 bp, Artificial Sequence
  derived and/or modified sequence
atgagccggctgagccggagcctgctgtgggccgccacctgcctgggggtcctgtgcgtactctctgccgacaagaatactacgcaacacccaaatgtgactactctggctcctatcagtaacgtcacttccgcccctgtcaccagtctgccattggtcaccacaccagcgccagagacttgtgagggtcggaattcttgtgtatcctgttttaacgtgtctgtcgttaacaccacatgcttctggatcgaatgcaaggacgagtcctactgttcccacaactcaactgtgagcgactgtcaggtaggaaacaccacagatttctgcagcgtgagtactgcaacccccgtgcccaccgctaatagtaccgccaaacctaccgtgcagccttctccttcaactacttctaagacagtgacgacaagcgaaattcgatgccataccaggaattacatcccagatttaaagaaatag

SEQ ID NO: 53480 - DNA, 474 bp, Artificial Sequence
  derived and/or modified sequence
atgtcaaggctgagccgatccctgttgtgggccgctacttgccttggagttctttgcgtgctgtctgccgataaaaacaccacccaacatcccaacgtgaccacacttgcccctatttctaacgtgacatctgcacctgtcacctctctaccactggtaaccactccagctccggaaacttgcgagggccgaaactcctgcgtcagctgtttcaacgtgtctgttgtcaacacaacttgcttttggatcgagtgcaaagatgaatcatactgttctcataattccaccgtgtcagactgccaggtcgggaacaccacagatttctgttcggtgtccacggcgacaccagtacccactgccaactccactgctaaaccaacagttcaaccatctccttcaacgacgtcaaagaccgtgacaacctcagaaataagatgtcacacgcggaattacattcctgatctcaagaagtag

SEQ ID NO: 53481 - DNA, 964 bp, Artificial Sequence
  derived and/or modified sequence
gctttctcccgaacgccagcgctgaggacacgatgtcgcggctctcccgctcactgctttgggccgccacctgcctgggcgtgctctgcgtgctgtccgcggacaagaacacgacccagcacccgaacgtgacgactttagcgcccatctccaacgtaacctcggcgccggtgacgtccctcccgctggtcaccactccggcaccagaaacctgtgaaggtcgaaacagctgcgtttcctgttttaatgttagcgttgttaatactacctgcttttggatagaatgtaaagatgagagctattgttcacataactcaacagttagtgattgtcaagtggggaacacgacagacttctgttccgtttccacggccactccagtgccaacagccaattctacagctaaacccacagttcagccctccccttctacaacttccaagacagttactacatcagaaataagatgccacacaaggaactacattccagatttaaagaaatgaaaggataccattagtgtgtataacagattattgttcatacttgtaaagcatcttatgtcattgagaatataaagaacagtgccttagaagacagtgaaaggtaagctctagcttaatgtctatgatttgttctttgacattaaggaaggtaaggattggtcagaggatgtaacttgatgtgagcagtagtaaacctgttttagatatcatactgttaatattttattgaaaatttatttcagagcggagaaacttaagctaaagtctgttatacagaattgaaagccttcgtatcttgaacctcccaacatttttcttatggctgttgaaaagtatagagctaaattgatttaattacactttcctttgtactttaaaaaaaagtatgctagcactattgtaccttgaaaggatttccaccagactgtcttgagtagtgacttctttggtgaggcaag

SEQ ID NO: 53482 - DNA, 474 bp, Artificial Sequence
  derived and/or modified sequence
atgagcagactgagcagaagcctgctgtgggccgccacctgcctgggcgtgctgtgcgtgctgagcgccgacaagaacaccacccagcaccccaacgtgaccaccctggcccccatcagcaacgtgaccagcgcccccgtgaccagcctgcccctggtgaccacccccgcccccgagacctgcgagggcagaaacagctgcgtgagctgcttcaacgtgagcgtggtgaacaccacctgcttctggatcgagtgcaaggacgagagctactgcagccacaacagcaccgtgagcgactgccaggtgggcaacaccaccgacttctgcagcgtgagcaccgccacccccgtgcccaccgccaacagcaccgccaagcccaccgtgcagcccagccccagcaccaccagcaagaccgtgaccaccagcgagatcagatgccacaccagaaactacatccccgacctgaagaagtag

SEQ ID NO: 53483 - protein, 243 aa, Artificial Sequence
  derived and/or modified sequence
MALLPVLFLVTVLLPSLPAEGKDPAFTALLTTQLQVQREIVNKHNELRKAVSPPASNMLKMEWSREVTTNAQRWANKCTLQHSDPEDRKTSTRCGENLYMSSDPTSWSSAIQSWYDEILDFVYGVGPKSPNAVVGHYTQLVWYSTYQVGCGIAYCPNQDSLKYYYVCQYCPAGNNMNRKNTPYQQGTPCAGCPDDCDKGLCTNSCQYQDLLSNCDSLKNTAGCEHELLKEKCKATCLCENKIY

SEQ ID NO: 53484 - DNA, 732 bp, Artificial Sequence
  derived and/or modified sequence
atggctctgctgcccgtcctgttcctcgtgacagttctcttaccatccctccccgctgaaggcaaagacccagcattcactgccctcctgaccacgcagcttcaggtgcaaagggaaatcgtgaataaacacaacgagttgcgaaaagctgtcagcccacccgctagtaacatgttgaagatggaatggtctcgagaagtgactactaatgcgcagaggtgggcaaacaaatgtaccctgcagcattctgaccccgaggatcggaaaacttccaccagatgcggagagaatttgtacatgagcagcgatccaacgtcatggagctccgcaatccaatcctggtacgatgaaatcctcgactttgtgtacggagtaggccccaagagccctaatgccgttgtgggtcactacacacagttagtctggtattctacctaccaggttggatgcggcatcgcatattgtcctaaccaggattcactgaagtactattatgtctgccagtattgtccagctggcaacaatatgaatagaaagaatacaccatatcagcaaggcaccccctgcgcaggctgcccggatgattgtgacaaaggcttgtgtaccaactcctgccaataccaggacctgctgagcaattgtgattccctaaaaaacaccgcgggctgtgagcatgaactgttaaaagagaagtgcaaggctacctgtctgtgcgagaataagatttattag

SEQ ID NO: 53485 - DNA, 732 bp, Artificial Sequence
  derived and/or modified sequence
atggccctgctgcctgtgctcttcctggtgacagtgctgctgcccagcctgcctgctgagggcaaggaccctgccttcaccgccctgctgaccacccagctgcaggtgcagcgggagatcgtgaacaagcacaatgagctgaggaaggctgtgtccccaccagccagcaacatgctgaagatggagtggagccgggaggtgaccaccaatgcccagcgctgggccaacaagtgcaccctgcagcacagcgaccctgaggacaggaagaccagcacccgctgtggggagaacctgtacatgagcagtgaccccacctcctggagcagcgccatccagagctggtatgatgagatcctggactttgtgtatggagtgggccccaagagccccaatgctgtggtgggccactacacccagctggtgtggtacagcacctaccaggtgggctgcggcatcgcctactgccccaaccaggacagcctgaagtactactacgtgtgccagtactgcccagctggcaacaacatgaacaggaagaacaccccctaccagcagggcaccccctgtgccggctgcccagatgactgtgacaagggcctgtgcaccaacagctgccagtaccaggacctgctgagcaactgtgacagcctgaagaacacagctggctgtgaacatgagctgctgaaggagaagtgcaaggccacctgcctgtgtgagaacaagatctactag

SEQ ID NO: 53486 - DNA, 732 bp, Artificial Sequence
  derived and/or modified sequence
atggccctgctgcccgtgctgttcctggtgaccgtgctgctgccctctttgcccgccgaggggaaagacccagccttcacggcccttctgaccacccagctgcaggtccaaagagagattgtgaataaacacaatgaattgcggaaggcggtgagcccacctgcgagtaatatgctgaagatggagtggtcaagggaggtcactaccaacgcgcagagatgggctaataagtgcaccctccaacactccgatccagaggaccggaagacatctaccagatgcggagaaaacctgtacatgagcagtgaccccacatcctggagcagtgccatccagtcatggtatgacgaaatactggatttcgtgtatggtgtcggaccaaaatcccctaacgccgtggtgggccattacactcagctggtttggtattctacctaccaggtcggttgtggaatagcctactgccccaatcaggatagcctcaaatactattatgtatgtcagtactgtccggccggcaacaatatgaaccggaagaataccccctatcaacagggcaccccttgtgcagggtgcccggacgattgtgataagggcctgtgtaccaattcatgtcagtaccaagacttactgtccaactgtgacagcctaaaaaacacagctggctgcgaacacgaactgttaaaggaaaaatgtaaagcgacatgcctgtgtgaaaataaaatatattag

SEQ ID NO: 53487 - DNA, 732 bp, Artificial Sequence
  derived and/or modified sequence
atggctttactgcccgtgcttttcctcgtcacagttcttcttcccagccttcctgcagaggggaaagaccccgcattcaccgccttacttaccactcagttgcaagtccaaagagaaattgtgaacaaacacaacgaacttcggaaagcagtctcgccgcctgcttccaatatgcttaagatggagtggagtcgcgaagttaccactaacgcccagcgttgggccaataagtgtacacttcaacactcagacccggaggaccgtaagaccagtacaaggtgcggagaaaacctctatatgtcttccgatccaaccagttggagcagcgcaatccagtcttggtatgatgagatactggattttgtctacggggtgggcccaaaatctcccaatgccgttgttggccactatacccaactcgtctggtattcaacataccaggttgggtgcggtattgcgtattgccctaaccaggactccctgaaatactactacgtgtgccaatactgtcctgccggtaacaacatgaataggaagaacaccccataccagcagggaacgccatgtgcaggctgccccgacgattgcgataagggcctgtgtactaactcttgccagtatcaggacctgctctccaattgcgatagtctgaaaaatacagcgggatgcgaacatgaactcctgaaagagaagtgtaaagctacatgtttgtgcgagaacaaaatctactag

SEQ ID NO: 53488 - DNA, 1382 bp, Artificial Sequence
  derived and/or modified sequence
cggtgagaggggcgcgccgcagctcctcaacgccgcaacgcgccggcccaactgcaggaaggtctgtgctctggagccagggtaaatggttataaaattatacaccatggccctcctaaagacactctaggaaaaccatgtcatcctgatcttaaaacacctgcaagaaagagcacagtacttcaccattaataaagtagatatttcatcctgctcagaaaaccaacatttccagcaatggctttactaccggtgttgtttctggttactgtgctgcttccatctttacctgcagaaggaaaggatcccgcttttactgctttgttaaccacccagttgcaagtgcaaagggagattgtaaataaacacaatgaactaaggaaagcagtctctccacctgccagtaacatgctaaagatggaatggagcagagaggtaacaacgaatgcccaaaggtgggcaaacaagtgcactttacaacatagtgatccagaggaccgcaaaaccagtacaagatgtggtgagaatctctatatgtcaagtgaccctacttcctggtcttctgcaatccaaagctggtatgacgagatcctagattttgtctatggtgtaggaccaaagagtcccaatgcagttgttggacattatactcagcttgtttggtactcgacttaccaggtaggctgtggaattgcctactgtcccaatcaagatagtctaaaatactactatgtttgccaatattgtcctgctggtaataatatgaatagaaagaataccccgtaccaacaaggaacaccttgtgccggttgccctgatgactgtgacaaaggactatgcaccaatagttgccagtatcaagatctcctaagtaactgtgattccttgaagaatacagctggctgtgaacatgagttactcaaggaaaagtgcaaggctacttgcctatgtgagaacaaaatttactgatttacctagtgagcattgtgcaagactgcatggataagggctgcatcatttaattgcgacataccagtggaaattgtatgtatgttagtgacaaatttgatttcaaagagcaatgcatcttctcccccagatcatcacagaaatcactttcaggcaatgatttacaaaagtagcatagtagatgatgacaactgtgaactctgacataaatttagtgctttataacgaactgaatcaggttgaggattttgaaaactgtataaccataggatttaggtcactaggactttggatcaaaatggtgcattacgtatttcctgaaacatgctaaagaagaagactgtaacatcattgccattcctactacctgagtttttacttgcataaacaataaattcaaagctttacatctg

SEQ ID NO: 53489 - DNA, 732 bp, Artificial Sequence
  derived and/or modified sequence
atggccctgctgcccgtgctgttcctggtgaccgtgctgctgcccagcctgcccgccgagggcaaggaccccgccttcaccgccctgctgaccacccagctgcaggtgcagagagagatcgtgaacaagcacaacgagctgagaaaggccgtgagcccccccgccagcaacatgctgaagatggagtggagcagagaggtgaccaccaacgcccagagatgggccaacaagtgcaccctgcagcacagcgaccccgaggacagaaagaccagcaccagatgcggcgagaacctgtacatgagcagcgaccccaccagctggagcagcgccatccagagctggtacgacgagatcctggacttcgtgtacggcgtgggccccaagagccccaacgccgtggtgggccactacacccagctggtgtggtacagcacctaccaggtgggctgcggcatcgcctactgccccaaccaggacagcctgaagtactactacgtgtgccagtactgccccgccggcaacaacatgaacagaaagaacaccccctaccagcagggcaccccctgcgccggctgccccgacgactgcgacaagggcctgtgcaccaacagctgccagtaccaggacctgctgagcaactgcgacagcctgaagaacaccgccggctgcgagcacgagctgctgaaggagaagtgcaaggccacctgcctgtgcgagaacaagatctactag

SEQ ID NO: 53490 - protein, 141 aa, Artificial Sequence
  derived and/or modified sequence
MQRGDPGEHLGARSWHLGAVGGGGDSCEVKDANSALLSNYETLKYISKTPCRHQSPEIVREFLTALKSHKLTKAEKLQLLNHRPVTAVEIQLMVEESEERLTEEQIEALLHTVTSILPAEPEAEQKKNTNSNVAMDEEDPA

SEQ ID NO: 53491 - DNA, 426 bp, Artificial Sequence
  derived and/or modified sequence
atgcagagaggcgaccccggcgagcacctgggcgccagaagctggcacctgggcgccgtgggcggcggcggcgacagctgcgaggtgaaggacgccaacagcgccctgctgagcaactacgagaccctgaagtacatcagcaagaccccctgcagacaccagagccccgagatcgtgagagagttcctgaccgccctgaagagccacaagctgaccaaggccgagaagctgcagctgctgaaccacagacccgtgaccgccgtggagatccagctgatggtggaggagagcgaggagagactgaccgaggagcagatcgaggccctgctgcacaccgtgaccagcatcctgcccgccgagcccgaggccgagcagaagaagaacaccaacagcaacgtggccatggacgaggaggaccccgcctag

SEQ ID NO: 53492 - DNA, 426 bp, Artificial Sequence
  derived and/or modified sequence
atgcaaaggggcgacccaggtgaacacctcggggccagaagctggcacttaggagcggttggaggcggtggtgatagctgcgaggttaaagacgctaatagcgcactcctgtcaaactacgaaacactgaaatatattagcaaaactccatgtcgccaccagtcgcccgaaattgtccgggaatttctgacggctctgaaatcccacaagctcacaaaggcagagaagctgcagctccttaatcaccgtcccgtgaccgctgtcgaaatacagctgatggtcgaagaaagcgaagagcgactgacagaagaacagatcgaagccctgctccacacagtaaccagtatcctgccagccgagcccgaggcagagcagaaaaaaaacactaacagtaatgttgctatggacgaggaggacccagcctag

SEQ ID NO: 53493 - DNA, 426 bp, Artificial Sequence
  derived and/or modified sequence
atgcagagaggagaccccggggagcacctgggcgcccgctcctggcacctgggcgctgtgggcggcggcggggacagctgtgaggtgaaggatgccaacagcgccctgctgagcaactatgagaccctgaagtacatcagcaagaccccctgccgccaccagagccctgagatcgtgcgggagttcctgacagccctgaagagccacaagctgaccaaggccgagaagctgcagctgctgaaccacaggcctgtgacagctgtggagatccagctgatggtggaggagagcgaggagcggctgacagaggagcagatcgaggccctgctgcacacagtgaccagcatcctgcctgctgagcctgaggccgagcagaagaagaacaccaacagcaatgtggccatggatgaggaggaccctgcctag

SEQ ID NO: 53494 - DNA, 426 bp, Artificial Sequence
  derived and/or modified sequence
atgcagcggggcgaccccggcgagcacctgggcgcccggagctggcatctgggagccgtgggcggcggtggggactcctgtgaggtaaaggacgccaactcagccctgcttagcaattatgagacacttaagtatatttctaaaactccctgcaggcatcagtcgccagagatcgtgcgggaatttctcactgcattgaagagccacaaattgaccaaagccgaaaaactgcaactcctgaaccaccgacctgtgacagccgttgaaatacagctaatggtggaagaaagtgaggagagactcaccgaagaacagatcgaggcgctgttgcataccgtcactagcatcttgcccgccgaaccagaagctgagcagaaaaagaacacaaacagcaatgttgccatggacgaagaggatccagcctag

SEQ ID NO: 53495 - DNA, 426 bp, Artificial Sequence
  derived and/or modified sequence
atgcagagaggtgatcctggcgaacatttgggggctcgaagctggcatctgggcgcagtgggtggaggcggagactcctgcgaggtaaaagatgctaatagtgcactgttatcaaattatgagacattgaagtacatatccaaaactccgtgcaggcaccagagcccagaaattgtccgggagtttctaacagcactcaaatcacataagttgaccaaggcagagaagcttcagctattgaaccaccgccctgtcaccgccgttgaaatccagctgatggttgaagagagtgaagagagacttacagaagaacagatcgaagcactgctccacaccgtcacttctattcttccagctgaaccggaagctgagcagaaaaagaataccaattctaatgttgctatggacgaggaggatcctgcctag

SEQ ID NO: 53496 - DNA, 1393 bp, Artificial Sequence
  derived and/or modified sequence
gagcaccttggcgcgcggagctggcaccttggcgctgttggtggcggcggagacagctgtgaagtgtgaggttctttgtctgctggcagctaggggcgacgaggcgggacgtcatggaagtgaaggatgccaattctgcgcttctcagtaactacgagacgttaaaatacatatcaaaaacaccatgcaggcaccagagtcctgaaattgtcagagaatttctcacagcattgaaaagccacaagttgaccaaagctgagaagctccagctgctgaaccaccggcctgtgactgctgtggagatccagctgatggtggaagagagtgaagagcggctcacggaggagcagattgaagctcttctccacaccgtcaccagcattctgcctgcagagccagaggctgagcagaagaagaatacaaacagcaatgtggcaatggacgaagaggacccagcatagaagagcacagctggccccggcgtttcatgaagtcagaaggcctggcagccatttcctggacgttgagaggattgtttatttgatttttatcctcatcccagcaggcctggctttgtggttagttgggtacatcacaaaaataagttaaaaagaaatatttgtgccttggggagaagaaacatggtgaaaacaggctgaggttgtcagggcagagagctgaaggtggggacagtgaccgcggacccctctgtgcttgaaagatttcctccacggcctttgccccagttgtggggaggtctctgtgcacagcggggaaaatgcttgtgtcgcctttggtgggccatgtcctaattagtttcatctgcttccctgggaacttactaaggggcccagagcactgttggaagtctggttagagtccccagagagttactctaagttaaaatgagccactgaccttggctcaccttagaggaatttcctcgagaacaacagagataagaaaagaaccggcctggccaatccttcaacagctctagagccccttttctctgctggcaggggctttgtttaccagctcactgtttaggctaaatgttagggaccagatcactgcagttgaaaacgggcactccaggcttagtgacagtggcagcagaaacagtgttggctgcctttctgaccaccccactttcctgccctgagacagcagcccagggcaggtgcttcatattcagaccaggtaagcctcatttgcacaacagtcaaattgtttgttcctttaaaaaggacacaattagcctggcacggtgactcatgcttgtaatcccagcactttgggagggcaaggcaggcggatcacctgaggtcaggagtttgagaccagcctcaccaacatggaaaaaccccatctctactaaaaaaatacaaaa

SEQ ID NO: 53497 - DNA, 492 bp, Artificial Sequence
  derived and/or modified sequence
gatcccggcgagcaccttggcgcgcggagctggcaccttggcgctgttggtggcggcggagacagctgtgaagtgtgaggttctttgtctgctggcagctaggggcgacgaggcgggacgtcatggaagtagctgagaagctccagctgctgaaccaccggcctgtgactgctgtggagatccagctgatggtggaagagagtgaagagcggctcacggaggagcagattgaagctcttctccacaccgtcaccagcattctgcctgcagagccagaggctgagcagaagaagaatacaaacagcaatgtggcaatggacgaagaggacccagcatagaagagcacagctggccccggcgtttcatgaagtcagaaggcctggcagccatttcctggacgttgagaggattgtttatttgatttttatcctcatcccagcaggcctggctttgtggttagttgggtacatcacaaaaataagttaaaaagaa

SEQ ID NO: 53498 - DNA, 942 bp, Artificial Sequence
  derived and/or modified sequence
ggcatgcagcgcggcgatcccggcgagcaccttggcgcgcggagctggcaccttggcgctgttggtggcggcggagacagctgtgaagtgaaggatgccaattctgcgcttctcagtaactacgagacgttaaaatacatatcaaaaacaccatgcaggcaccagagtcctgaaattgtcagagaatttctcacagcattgaaaagccacaagttgaccaaagctgagaagctccagctgctgaaccaccggcctgtgactgctgtggagatccagctgatggtggaagagagtgaagagcggctcacggaggagcagattgaagctcttctccacaccgtcaccagcattctgcctgcagagccagaggctgagcagaagaagaatacaaacagcaatgtggcaatggacgaagaggacccagcatagaagagcacagctggccccggcgtttcatgaagtcagaaggcctggcagccatttcctggacgttgagaggattgtttatttgatttttatcctcatcccagcaggcctggctttgtggttagttgggtacatcacaaaaataagttaaaaagaaatatttgtgccttggggagaagaaacatggtgaaaacaggctgaggttgtcagggcagagagctgaaggtggggacagtgaccgcggacccctctgtgcttgaaagatttcctccacggcctttgccccagttgtggggaggtctctgtgcacagcggggaaaatgcttgtgtcgcctttggtgggccatgtcctaattagtttcatctgcttccctgggaacttactaaggggcccagagcactgttggaagtctggttagagtccccagagagttactctaagttaaaatgagccactgaccttggctcaccttagaggaatttcctcgagaacaacagagataagaaaagaaccgg

SEQ ID NO: 53499 - DNA, 939 bp, Artificial Sequence
  derived and/or modified sequence
atggcgaacaacgatgcagtcctcaagagacttgagcagaagggcgcagaggcagaccagattattgaatatctgaagcagcaagtgtccctcctgaaggaaaaggccatccttcaagccacactgagggaggagaagaagctgagagtggaaaacgcaaaattgaaaaaagaaattgaggaactgaagcaggagctaatacaggcagagattcaaaatggagtgaagcagatcccgtttccttccggcactccactacatgccaacagtatggtctccgagaatgtcatccagagtactgccgtcacaacagttagctccggcacaaaggagcagataaaggggggaaccggcgacgaaaagaaggcaaaggaaaagatcgagaaaaaaggcgagaagaaggaaaaaaagcagcaatctattgccgggagtgccgattctaagcctatcgacgtgtcccggctggatcttcgaattggttgtattataacggccagaaaacatcctgacgccgacagtctgtatgttgaagaggttgacgttggggaaatagccccccgaaccgttgttagcggactcgtgaaccacgtgccattggagcaaatgcaaaatagaatggtgatactcttatgcaatctgaaaccagcaaagatgaggggcgtcctcagtcaagccatggtgatgtgcgcaagctccccagaaaagattgagatccttgcaccccccaacggctctgtcccaggggatcgtattactttcgatgcatttcctggagaacccgacaaggagctgaatcccaaaaagaagatttgggaacagatacagcctgacctccataccaatgatgagtgcgtcgccacgtacaagggcgtgcctttcgaggtgaagggcaaaggtgtgtgccgggcgcaaactatgtcaaattccgggatcaaatag

SEQ ID NO: 53500 - DNA, 810 bp, Artificial Sequence
  derived and/or modified sequence
atggcgaacaacgacgcagtgctgaagaggttggaacagaaaggtgcagaggcagaccagataatagagtatttaaaacagcaggttagtctcctcaaggaaaaagctatactccaagctaccctccgagaggaaaaaaagctgcgtgtggagaacgccaaactaaagaaggagatcgaggagcttaaacaggaactgattcaggccgagatccagaacggagttaagcaaatccccttccccagtgggaccccactacatgccaactctatggtgtcagagaatgtcattcagagtaccgccgtgaccactgtgagctcaggaaccaaggaacagatcaagggcggtactggcgacgaaaagaaagcgaaggagaaaattgaaaaaaaaggggaaaagaaagaaaagaaacagcagagcattgcaccaagaacggtcgtttctggtctcgtgaatcatgtgcccctggagcagatgcagaatcggatggtgatactgctctgcaacctgaagcctgctaagatgcggggggtgctgtctcaggccatggttatgtgcgcaagtagccccgagaaaatcgagatcctagcccctcctaatggttcagttccgggcgaccgcatcactttcgatgcgtttccaggcgagccagacaaggagttgaaccccaagaagaaaatctgggaacaaatacagccagatcttcacactaatgatgagtgtgttgcaacttacaagggtgtgccttttgaagtgaagggaaagggggtctgtagagcccagacaatgtccaactctgggattaagtag

SEQ ID NO: 53501 - DNA, 939 bp, Artificial Sequence
  derived and/or modified sequence
atggccaataatgatgccgtgttaaaaagactggagcagaaaggcgctgaagccgatcagattatagagtatctcaagcagcaggtcagcctcctaaaagagaaggccattttacaggccactctgcgtgaagagaaaaagcttagagtcgaaaatgccaagctgaaaaaggagattgaggaactgaagcaagaactgatccaggccgaaattcagaatggcgtgaaacaaatcccatttccttccggcaccccgttgcacgccaacagtatggtttcggagaacgtgattcagagcacagccgtgacgactgtgtcatctgggactaaggaacagatcaagggcggaaccggggacgaaaagaaagcgaaagagaaaatcgaaaagaagggggaaaaaaaagagaaaaagcagcagtcgatagctggctcagctgattctaagcccatcgatgtaagccgactcgacctgcgtataggctgtataataaccgccagaaaacaccctgatgcagactccctatatgtcgaagaggtggacgtgggtgagatcgcgccccgtaccgtggtctctggactagtcaaccacgtgcctctggagcaaatgcaaaaccgaatggtgatactactgtgtaacctgaagccggccaagatgagaggcgtcttgtcacaagccatggtaatgtgcgcaagctctcccgagaaaattgagatcctggcccctcctaatggaagtgtgcccggagataggataacctttgacgcattccccggcgagcccgacaaagagttgaacccaaaaaagaaaatctgggaacagattcagcccgatttacatactaatgatgagtgcgtcgctacgtacaagggcgtgccatttgaagtgaagggcaaaggtgtctgtagggctcagaccatgtccaattcgggcattaaatag

SEQ ID NO: 53502 - DNA, 453 bp, Artificial Sequence
  derived and/or modified sequence
atggccaacaacgacgcggtgctaaagcggctcgagcaaaaaggagctgaagccgaccagatcattgaatatttaaagcagcaggtgagcctgcttaaggaaaaagctattttgcaggccacgctgcgagaagaaaagaaactcagagtcgaaaatgctaagctgaagaaagaaatcgaagagctgaagcaggaactgatccaggctgagatccagaacggggtaaagcagattccattcccatccgggacccccctgcacgctaattcaatggtgagcgagaatgtaatacaaagcactgctgtgaccacagtgtcatcaggcacaaaggaacagatcaagggagggactggcgacgagaagaaggccaaggagaagatagagaagaagggagagaaaaaagagaagaaacagcagagcatagcgggttctgcagattctaagcctatttag

SEQ ID NO: 53503 - DNA, 939 bp, Artificial Sequence
  derived and/or modified sequence
atggccaacaatgatgctgtgctgaagaggctggagcagaagggagctgaggccgaccagatcatcgagtacctgaagcagcaggtgtccctgctgaaggagaaggccatcctgcaggccaccctgcgggaggagaagaagctgcgggtggagaatgccaagctgaagaaggagattgaggagctgaagcaggagctgatccaggccgagatccagaatggagtgaagcagatccccttccccagcggcacccccctgcacgccaacagcatggtgtctgaaaatgtcatccagagcacagctgtgaccaccgtgagcagcggcaccaaggagcagatcaagggcggcactggagatgagaagaaggccaaggagaagattgagaagaagggggagaagaaggagaagaagcagcagagcattgctggcagcgctgacagcaagcccattgatgtgtcccggctggacctgagaattggctgcatcatcacagccaggaagcacccagatgctgacagcctgtatgtggaggaggtggatgtgggggagatcgcccccaggacagtggtgtctggcctggtgaaccacgtgcccctggagcagatgcagaacaggatggtgatcctgctgtgcaacctgaagccagccaagatgaggggcgtgctgagccaggccatggtgatgtgtgccagcagccctgagaagattgagatcctggcccccccaaatggatctgtgcctggggaccgcatcacctttgatgccttccctggagagccagacaaggagctgaaccccaagaagaagatctgggagcagatccagcctgacctgcacaccaatgatgaatgtgtggccacctacaagggcgtgccctttgaggtgaagggcaagggcgtgtgccgggcccagaccatgagcaacagcggcatcaagtag

SEQ ID NO: 53504 - DNA, 810 bp, Artificial Sequence
  derived and/or modified sequence
atggccaacaatgatgctgtgctgaagaggctggagcagaagggagctgaggccgaccagatcatcgagtacctgaagcagcaggtgtccctgctgaaggagaaggccatcctgcaggccaccctgcgggaggagaagaagctgcgggtggagaatgccaagctgaagaaggagattgaggagctgaagcaggagctgatccaggccgagatccagaatggagtgaagcagatccccttccccagcggcacccccctgcacgccaacagcatggtgtctgaaaatgtcatccagagcacagctgtgaccaccgtgagcagcggcaccaaggagcagatcaagggcggcactggagatgagaagaaggccaaggagaagattgagaagaagggggagaagaaggagaagaagcagcagagcatcgcccccaggacagtggtgtctggcctggtgaaccacgtgcccctggagcagatgcagaacaggatggtgatcctgctgtgcaacctgaagccagccaagatgagaggagtgctgagccaggccatggtgatgtgtgccagcagccctgagaagattgagatcctggccccacccaacggctctgtgcctggggaccgcatcacctttgatgccttccctggagagccagacaaggagctgaaccccaagaagaagatctgggagcagatccagcctgacctgcacaccaatgatgaatgtgtggccacctacaagggcgtgccctttgaggtgaagggcaaaggagtgtgccgggcccagaccatgagcaacagcggcatcaagtag

SEQ ID NO: 53505 - DNA, 453 bp, Artificial Sequence
  derived and/or modified sequence
atggccaacaatgatgctgtgctgaagaggctggagcagaagggagctgaggccgaccagatcatcgagtacctgaagcagcaggtgtccctgctgaaggagaaggccatcctgcaggccaccctgcgggaggagaagaagctgcgggtggagaatgccaagctgaagaaggagattgaggagctgaagcaggagctgatccaggccgagatccagaatggagtgaagcagatccccttccccagcggcacccccctgcacgccaacagcatggtgtctgaaaatgtcatccagagcacagctgtgaccaccgtgagcagcggcaccaaggagcagatcaagggcggcactggagatgagaagaaggccaaggagaagattgagaagaagggggagaagaaggagaagaagcagcagagcattgctggcagcgctgacagcaagcccatctag

SEQ ID NO: 53506 - DNA, 939 bp, Artificial Sequence
  derived and/or modified sequence
atggccaacaacgacgccgtgctgaagcggctggagcagaagggcgcagaggctgaccaaattatcgaatacctcaagcaacaggtgagcctcctgaaagaaaaagcaatcttgcaagcgacactccgtgaggagaaaaaactgcgcgtggagaacgctaagcttaagaaagagatcgaggagctgaagcaggagctgatccaggccgaaattcaaaatggggtaaaacagatacctttcccctctgggacacccctgcacgctaattcaatggtaagcgaaaatgtgatacagagcaccgcggtgactactgtctcgtctggcaccaaggagcaaatcaaaggagggaccggcgatgaaaagaaggccaaagaaaaaattgagaagaagggagagaagaaagaaaaaaaacaacagtcaatcgccggaagcgctgattcaaaacctatcgatgtatctcggttagacctaagaattggatgtatcattacagcgaggaagcaccccgatgctgattccttatacgtggaagaggtagacgtgggggaaattgccccccggactgtggtctctggactcgttaaccacgtgcctctggaacagatgcagaaccgaatggtgatacttctttgtaacctgaaacctgccaagatgcggggtgtcctgtctcaggccatggtaatgtgcgcctccagccctgagaagattgagattctcgctcccccgaacgggtctgttcctggagataggatcacatttgatgcatttcccggcgaacccgacaaagaacttaacccaaagaaaaagatttgggagcagatccagcctgacctccacactaatgacgaatgtgttgctacctacaagggcgttccgtttgaggtgaagggcaaaggtgtttgtagagcccagactatgagcaacagtggtatcaaatag

SEQ ID NO: 53507 - DNA, 810 bp, Artificial Sequence
  derived and/or modified sequence
atggccaacaacgacgccgtgctgaagcggctggagcagaagggcgctgaggccgaccaaataatagagtacctcaaacagcaggtgagtctgcttaaagaaaaggccattttgcaggccactctcagggaggaaaagaaactgcgagtggaaaacgccaagctaaaaaaggaaatcgaagagcttaagcaggagctaatacaggccgagatccagaacggagtgaagcagatcccatttccatctggtacgccactccatgcaaacagcatggtttcagagaacgtcattcagtccaccgcagtcacaactgtgtccagtgggaccaaggagcagatcaagggtggaaccggcgatgaaaagaaagccaaagagaaaattgaaaagaaaggtgagaagaaggagaagaaacagcaaagcattgcaccaagaaccgtggtcagcggcctggtgaaccatgtgcccctagagcagatgcagaacagaatggttatcctgctttgcaacctgaaacccgccaagatgcgaggcgtcttatcccaggcaatggtgatgtgcgccagttcccccgagaagattgaaatcctggcacctcctaatggcagcgttccaggggataggatcactttcgacgcttttcctggggagcccgataaggaacttaacccaaaaaaaaagatctgggagcagatccagcctgatcttcatacgaacgacgagtgtgtggctacttataagggcgtgccttttgaggtgaaagggaaaggcgtctgcagagcccagacaatgagtaactccggtattaagtag

SEQ ID NO: 53508 - DNA, 939 bp, Artificial Sequence
  derived and/or modified sequence
atggccaacaacgacgccgtgctgaagcggctggagcagaagggcgctgaagccgatcagatcatcgagtacctgaagcagcaagtgtccctgctcaaggagaaggcaatccttcaggccactctgagggaagaaaaaaagctgcgcgtggagaatgctaaattaaaaaaggagatcgaagagctgaagcaagaactgatacaggccgagatccagaatggggtgaagcagataccctttccatccggcacccctcttcacgccaacagtatggtgtccgaaaacgtcatccaatccacagctgtaacaaccgtaagcagcggaaccaaggagcaaatcaagggtggcacgggagacgaaaaaaaagccaaagagaagattgaaaaaaagggcgagaagaaagagaaaaaacagcaaagcatcgctgggtccgcagattctaagcccatcgatgtctcacgtctcgacctgcgtatcggctgtatcatcacagctaggaagcaccccgatgccgatagtctgtacgtggaggaagtggacgtgggcgaaattgcccctaggactgtggtgtccggactcgtgaaccacgtccctttagaacaaatgcagaatcgcatggtgattctcctgtgtaacttgaagcctgctaagatgcggggcgtccttagccaagcgatggttatgtgcgcatcatctccggagaaaatcgaaatcttagccccaccaaacgggagtgtcccaggggatcgaattacctttgatgcttttcctggtgaacccgacaaggaactgaacccgaagaagaaaatatgggagcagatacaaccggaccttcacactaacgacgaatgtgtggcaacatacaaaggagtcccatttgaagtgaaaggaaagggggtgtgccgggctcagacaatgagtaatagcggcatcaagtag

SEQ ID NO: 53509 - DNA, 453 bp, Artificial Sequence
  derived and/or modified sequence
atggccaacaacgacgccgtgctgaagcggctggagcagaagggcgccgaagcagaccagattattgagtatttaaaacaacaagtctccctcctgaaggagaaagcaatactccaggctaccctgcgagaggagaagaagttacgtgttgagaacgccaaactgaaaaaggagattgaagaactcaagcaggagctgatccaggcagagatccagaatggtgtgaagcaaatcccttttcctagtggcacaccactgcacgccaattccatggtctcagagaacgtgatccagtctacagcagttaccacagtcagtagtgggacaaaggagcagattaagggcggcactggagacgagaagaaggctaaagagaaaatcgagaagaaaggcgagaaaaaagaaaaaaagcagcagtcaatcgcaggatccgctgatagcaagcctatctag

SEQ ID NO: 53510 - DNA, 939 bp, Artificial Sequence
  derived and/or modified sequence
atggccaacaatgacgccgtcttgaaaaggctggagcagaaaggagcggaggccgaccagattatagaatatcttaaacaacaggtatcactcttgaaggagaaagcgatccttcaagccacccttagagaagaaaagaaattgagggtagagaatgctaagctgaagaaggaaatagaggagctgaagcaagaactcattcaggctgaaatacaaaatggcgtgaagcaaatcccattcccaagtggaactcctttgcacgccaattccatggtttctgaaaatgttatacagtctaccgcagttactacagtgagcagcggaacaaaggagcagataaagggtgggacgggggatgagaaaaaggccaaggagaaaattgaaaaaaagggggagaagaaagagaagaagcaacagtcgattgctggatctgccgattccaagccgatcgatgtcagcaggctggatctgaggatcgggtgcattattacagcaagaaagcatccagatgccgacagcctctacgtggaagaagtcgatgtcggggaaatcgctcctcgcaccgtggtctccggcctggtcaatcatgtccccttagaacagatgcaaaacaggatggtgattctgctttgcaacctcaaacccgcaaaaatgagaggggtgctgtctcaggctatggtcatgtgtgcttcttccccagagaagatcgagatcttagcgccacctaacggaagcgtgccaggggacagaataacatttgacgcattccccggtgagcccgacaaggaactaaatccgaagaaaaaaatctgggagcagatccagcccgatctccacactaatgatgaatgtgttgccacctataaaggggtcccctttgaagtcaaaggcaagggtgtttgccgggctcaaactatgagtaactccggcattaaatag

SEQ ID NO: 53511 - DNA, 810 bp, Artificial Sequence
  derived and/or modified sequence
atggccaacaatgacgctgtgcttaaacgacttgagcagaagggcgcagaggccgaccagatcattgaataccttaagcagcaggtgtcgctgctcaaagagaaagctatactgcaggccactctgcgggaagaaaaaaagttacgggtagagaacgctaaactaaaaaaggaaatcgaggagctgaagcaggaacttatccaggctgagattcagaatggagtcaaacagataccttttcccagcggaacacctttgcatgctaacagcatggtgtcggagaatgtgatccagagcaccgcagtgaccactgtcagctctgggaccaaggagcagatcaaaggcggaacaggtgatgagaaaaaagcaaaagaaaagatcgagaagaaaggagagaagaaagagaagaagcagcaaagcattgcgcctcggactgttgtgtctggcctcgttaatcatgtacccttggagcagatgcaaaacaggatggtgatcctgctgtgcaacttgaagccagctaaaatgcgaggagttcttagtcaggccatggtaatgtgtgcatcttcacccgagaagattgaaattcttgcaccccctaatgggagtgtgccgggagatagaatcacttttgatgcctttcctggggaacccgacaaagagctcaatccgaagaaaaaaatttgggagcagatccagcctgacctgcacaccaatgatgagtgcgttgccacatacaagggcgttcccttcgaggtaaaagggaaaggtgtttgccgcgctcagacaatgtccaacagtggaatcaaatag

SEQ ID NO: 53512 - DNA, 939 bp, Artificial Sequence
  derived and/or modified sequence
atggccaacaatgatgccgtgctgaagcgtctggaacagaagggtgccgaggcagaccaaattatcgaatatttaaaacagcaggtatctcttctgaaagaaaaggcaattctacaagccactctgagagaggagaagaaacttcgggtggagaacgcaaaacttaagaaggagatagaggagctgaagcaggaattgattcaggctgagatccagaatggcgtcaagcaaattccatttccctcgggcacgccattacatgctaattcaatggtgtcagagaacgtcattcagtccacggccgtaaccaccgtgtcctctggaactaaggaacagatcaaagggggtaccggagacgagaagaaagcaaaggagaagatagagaagaaaggagagaagaaagagaaaaagcagcagagcatcgccggatcagctgactcaaagccaatagatgtgagccggctggacttgagaattgggtgtatcatcactgcaaggaagcaccccgacgctgacagtctctatgtggaggaagtagatgtcggcgaaatcgcgcctagaaccgttgttagtgggctggttaatcacgtgccattggaacagatgcaaaatagaatggtgattttgctgtgtaacctaaagccagcgaagatgcggggtgtcctatcccaagcaatggtaatgtgcgcttcctcacccgagaaaatcgagattcttgcaccacctaacggctcagtcccgggtgatagaatcacgttcgatgccttccccggtgaacctgacaaggaacttaatccaaaaaagaagatttgggaacagatccagcctgacttgcatacgaacgatgagtgtgtggccacatataaaggggtaccctttgaagtgaagggaaagggcgtgtgccgagctcaaaccatgtccaacagtggaatcaagtag

SEQ ID NO: 53513 - DNA, 453 bp, Artificial Sequence
  derived and/or modified sequence
atggctaacaacgacgctgtccttaaacgcttggaacagaagggtgccgaagctgaccaaatcatagaatatttaaaacagcaagtaagcttgcttaaggaaaaagctatcctccaagctacgctgcgtgaggaaaaaaagctgagggtggagaacgctaaactgaagaaggagatcgaggagttaaagcaggagctaatccaagccgaaatacagaatggagtaaaacagattccgttcccaagcggcactcccttgcatgctaacagcatggtcagcgagaatgtgatacagtctactgctgtgaccaccgttagctccggcacaaaggagcagattaaaggcggtacgggagacgaaaaaaaggcgaaggaaaagattgaaaaaaaaggcgagaagaaggaaaaaaagcagcaaagtatcgccggatccgcggactcgaaacctatctag

SEQ ID NO: 53514 - DNA, 939 bp, Artificial Sequence
  derived and/or modified sequence
atggccaacaacgacgccgtgctgaagagactggagcagaagggcgccgaggccgaccagatcatcgagtacctgaagcagcaggtgagcctgctgaaggagaaggccatcctgcaggccaccctgagagaggagaagaagctgagagtggagaacgccaagctgaagaaggagatcgaggagctgaagcaggagctgatccaggccgagatccagaacggcgtgaagcagatccccttccccagcggcacccccctgcacgccaacagcatggtgagcgagaacgtgatccagagcaccgccgtgaccaccgtgagcagcggcaccaaggagcagatcaagggcggcaccggcgacgagaagaaggccaaggagaagatcgagaagaagggcgagaagaaggagaagaagcagcagagcatcgccggcagcgccgacagcaagcccatcgacgtgagcagactggacctgagaatcggctgcatcatcaccgccagaaagcaccccgacgccgacagcctgtacgtggaggaggtggacgtgggcgagatcgcccccagaaccgtggtgagcggcctggtgaaccacgtgcccctggagcagatgcagaacagaatggtgatcctgctgtgcaacctgaagcccgccaagatgagaggcgtgctgagccaggccatggtgatgtgcgccagcagccccgagaagatcgagatcctggccccccccaacggcagcgtgcccggcgacagaatcaccttcgacgccttccccggcgagcccgacaaggagctgaaccccaagaagaagatctgggagcagatccagcccgacctgcacaccaacgacgagtgcgtggccacctacaagggcgtgcccttcgaggtgaagggcaagggcgtgtgcagagcccagaccatgagcaacagcggcatcaagtag

SEQ ID NO: 53515 - DNA, 810 bp, Artificial Sequence
  derived and/or modified sequence
atggccaacaacgacgccgtgctgaagagactggagcagaagggcgccgaggccgaccagatcatcgagtacctgaagcagcaggtgagcctgctgaaggagaaggccatcctgcaggccaccctgagagaggagaagaagctgagagtggagaacgccaagctgaagaaggagatcgaggagctgaagcaggagctgatccaggccgagatccagaacggcgtgaagcagatccccttccccagcggcacccccctgcacgccaacagcatggtgagcgagaacgtgatccagagcaccgccgtgaccaccgtgagcagcggcaccaaggagcagatcaagggcggcaccggcgacgagaagaaggccaaggagaagatcgagaagaagggcgagaagaaggagaagaagcagcagagcatcgcccccagaaccgtggtgagcggcctggtgaaccacgtgcccctggagcagatgcagaacagaatggtgatcctgctgtgcaacctgaagcccgccaagatgagaggcgtgctgagccaggccatggtgatgtgcgccagcagccccgagaagatcgagatcctggccccccccaacggcagcgtgcccggcgacagaatcaccttcgacgccttccccggcgagcccgacaaggagctgaaccccaagaagaagatctgggagcagatccagcccgacctgcacaccaacgacgagtgcgtggccacctacaagggcgtgcccttcgaggtgaagggcaagggcgtgtgcagagcccagaccatgagcaacagcggcatcaagtag

SEQ ID NO: 53516 - DNA, 453 bp, Artificial Sequence
  derived and/or modified sequence
atggccaacaacgacgccgtgctgaagagactggagcagaagggcgccgaggccgaccagatcatcgagtacctgaagcagcaggtgagcctgctgaaggagaaggccatcctgcaggccaccctgagagaggagaagaagctgagagtggagaacgccaagctgaagaaggagatcgaggagctgaagcaggagctgatccaggccgagatccagaacggcgtgaagcagatccccttccccagcggcacccccctgcacgccaacagcatggtgagcgagaacgtgatccagagcaccgccgtgaccaccgtgagcagcggcaccaaggagcagatcaagggcggcaccggcgacgagaagaaggccaaggagaagatcgagaagaagggcgagaagaaggagaagaagcagcagagcatcgccggcagcgccgacagcaagcccatctag

SEQ ID NO: 53517 - protein, 312 aa, Artificial Sequence
  derived and/or modified sequence
MANNDAVLKRLEQKGAEADQIIEYLKQQVSLLKEKAILQATLREEKKLRVENAKLKKEIEELKQELIQAEIQNGVKQIPFPSGTPLHANSMVSENVIQSTAVTTVSSGTKEQIKGGTGDEKKAKEKIEKKGEKKEKKQQSIAGSADSKPIDVSRLDLRIGCIITARKHPDADSLYVEEVDVGEIAPRTVVSGLVNHVPLEQMQNRMVILLCNLKPAKMRGVLSQAMVMCASSPEKIEILAPPNGSVPGDRITFDAFPGEPDKELNPKKKIWEQIQPDLHTNDECVATYKGVPFEVKGKGVCRAQTMSNSGIK

SEQ ID NO: 53518 - protein, 336 aa, Artificial Sequence
  derived and/or modified sequence
MLPAVAVSEPVVLRFMIFCRLLAKMANNDAVLKRLEQKGAEADQIIEYLKQQVSLLKEKAILQATLREEKKLRVENAKLKKEIEELKQELIQAEIQNGVKQIPFPSGTPLHANSMVSENVIQSTAVTTVSSGTKEQIKGGTGDEKKAKEKIEKKGEKKEKKQQSIAGSADSKPIDVSRLDLRIGCIITARKHPDADSLYVEEVDVGEIAPRTVVSGLVNHVPLEQMQNRMVILLCNLKPAKMRGVLSQAMVMCASSPEKIEILAPPNGSVPGDRITFDAFPGEPDKELNPKKKIWEQIQPDLHTNDECVATYKGVPFEVKGKGVCRAQTMSNSGIK

SEQ ID NO: 53519 - protein, 269 aa, Artificial Sequence
  derived and/or modified sequence
MANNDAVLKRLEQKGAEADQIIEYLKQQVSLLKEKAILQATLREEKKLRVENAKLKKEIEELKQELIQAEIQNGVKQIPFPSGTPLHANSMVSENVIQSTAVTTVSSGTKEQIKGGTGDEKKAKEKIEKKGEKKEKKQQSIAPRTVVSGLVNHVPLEQMQNRMVILLCNLKPAKMRGVLSQAMVMCASSPEKIEILAPPNGSVPGDRITFDAFPGEPDKELNPKKKIWEQIQPDLHTNDECVATYKGVPFEVKGKGVCRAQTMSNSGIK

SEQ ID NO: 53520 - protein, 150 aa, Artificial Sequence
  derived and/or modified sequence
MANNDAVLKRLEQKGAEADQIIEYLKQQVSLLKEKAILQATLREEKKLRVENAKLKKEIEELKQELIQAEIQNGVKQIPFPSGTPLHANSMVSENVIQSTAVTTVSSGTKEQIKGGTGDEKKAKEKIEKKGEKKEKKQQSIAGSADSKPI

SEQ ID NO: 53521 - DNA, 1011 bp, Artificial Sequence
  derived and/or modified sequence
atgcttcccgcagtagctgtgtccgagccggttgtgcttagatttatgatcttttgcagattgctcgccaagatggcaaacaacgatgccgtactgaaaagactggaacaaaaaggtgcagaagccgatcagatcatcgagtaccttaagcagcaggttagcttactgaaagaaaaagctatcctgcaggccaccttgcgagaggagaaaaaactgcgggtggaaaatgcaaaattgaagaaagagatcgaggagctgaagcaggagctcatccaggctgaaattcagaacggcgttaaacagataccattccccagcggtactcctctccacgccaactccatggtgagtgagaacgtgatccagtccacagcagtcaccactgtgagtagcggcacaaaggagcagataaaaggaggtacaggcgacgaaaagaaagcaaaggaaaagatcgaaaagaagggggagaagaaggagaaaaagcagcaaagtatcgcgggtagtgccgattcgaagccaatcgacgtgtctcgcctagacttacgcatagggtgtattattaccgctcgcaagcatccggatgcagactctttatatgtggaagaggtcgacgttggtgaaatcgcaccacggactgtcgtatctggcctggtaaaccacgtgcccctggagcagatgcaaaaccggatggttatcttgctgtgtaacctcaagccagctaagatgcggggcgttttatcccaggccatggttatgtgtgcatcatcccctgagaaaattgaaatcctcgctcccccgaatggcagtgtccccggggaccgcattacttttgacgcttttcctggagagccagataaggagttgaaccctaagaaaaaaatctgggagcaaattcagccagacctccacacaaatgatgagtgtgtggctacatataaaggcgtgcccttcgaagtgaaaggtaagggcgtctgccgagctcagacgatgagtaattccggtataaagtag

SEQ ID NO: 53522 - DNA, 1011 bp, Artificial Sequence
  derived and/or modified sequence
atgctgcctgctgtggccgtgtctgagcctgtggtgctgcgcttcatgatcttctgccgcctgctggccaagatggccaacaatgatgctgtgctgaagaggctggagcagaagggagctgaggccgaccagatcatcgagtacctgaagcagcaggtgtccctgctgaaggagaaggccatcctgcaggccaccctgcgggaggagaagaagctgcgggtggagaatgccaagctgaagaaggagattgaggagctgaagcaggagctgatccaggccgagatccagaatggagtgaagcagatccccttccccagcggcacccccctgcacgccaacagcatggtgtctgaaaatgtcatccagagcacagctgtgaccaccgtgagcagcggcaccaaggagcagatcaagggcggcactggagatgagaagaaggccaaggagaagattgagaagaagggggagaagaaggagaagaagcagcagagcattgctggcagcgctgacagcaagcccattgatgtgtcccggctggacctgagaattggctgcatcatcacagccaggaagcacccagatgctgacagcctgtatgtggaggaggtggatgtgggggagatcgcccccaggacagtggtgtctggcctggtgaaccacgtgcccctggagcagatgcagaacaggatggtgatcctgctgtgcaacctgaagccagccaagatgaggggcgtgctgagccaggccatggtgatgtgtgccagcagccctgagaagattgagatcctggcccccccaaatggatctgtgcctggggaccgcatcacctttgatgccttccctggagagccagacaaggagctgaaccccaagaagaagatctgggagcagatccagcctgacctgcacaccaatgatgaatgtgtggccacctacaagggcgtgccctttgaggtgaagggcaagggcgtgtgccgggcccagaccatgagcaacagcggcatcaagtag

SEQ ID NO: 53523 - DNA, 2412 bp, Artificial Sequence
  derived and/or modified sequence
agtgacagagcgattactaagcctacggttcccaaacgactcaggtgaacctgatttacaggaaaggcgggctgtagctagggatggagacagtacctatcagcaagcggctccacagctcggttctctatctattctgaagacatgcggggccactcactgctcctgatagtcctctacctcccacagaccccacccactacgacacggaaaactggattacccaaatacctgcctctgagtctggggacgcaggcaagcacaaagacaagggggatggagcttctacacagggccccagcgctgtcgctgtggctgctgctgccgctacggcttagtgcaccagacgctgcatttcaggtgctcctacaaaagaggccactcctggaacgccgggagctcagacgctgccctttgctcgcgagccaagtcagccaaggttaaccttcgcggaacccggcgaggagcgcaagcctggccttccccaaacacagatccgagcttttcaccctctaccctcccctcagcctggccttttcttccgccctcacagccaccgcgacccaacgctgaggaaagaccccgacttgtggtgtccttccccttgcccaaactggccacgaaaggacatatagcgagagagaaagaggattttctgccgtctcttggcaaaaatggcaaataatgatgctgttctgaagagactggagcagaagggtgcagaggcagatcaaatcattgaatatcttaagcagcaagtttctctacttaaggagaaagcaattttgcaggcaactttgagggaagagaagaaacttcgagttgaaaatgctaaactgaagaaagaaattgaagaactgaaacaagagctaattcaggcagaaattcaaaatggagtgaagcaaataccatttccatctggtactccactgcacgctaattctatggtttctgaaaatgtgatacagtctacagcagtaacaaccgtatcttctggtaccaaagaacagataaaaggaggaacaggagacgaaaagaaagcgaaagagaaaattgaaaagaaaggagagaagaaggagaaaaaacagcaatcaatagctggaagtgccgactctaagccaatagatgtttcccgtctggatcttcgaattggttgcatcataactgctagaaaacaccctgatgcagattctttgtatgtggaagaagtagatgtcggagaaatagccccaaggacagttgtcagtggcctggtgaatcatgttcctcttgaacagatgcaaaatcggatggtgattttactttgtaacctgaaacctgcaaagatgaggggagtattatctcaagcaatggtcatgtgtgctagttcaccagagaaaattgaaatcttggctcctccaaatgggtctgttcctggagacagaattacttttgatgctttcccaggagagcctgacaaggagctgaatcctaagaagaagatttgggagcagatccagcctgatcttcacactaatgatgagtgtgtggctacatacaaaggagttccctttgaggtgaaagggaagggagtatgtagggctcaaaccatgagcaacagtggaatcaaataaaatgcttccactaccaaaagacattagagaaaaccttaaaagtaataaagagaaatatatttgtcacttatacctaaaatatgagtggctcatttttgcattactctcttctagacttgactagtcatttacttggtatatattgttttcattgattggggaaacactagatttttacctcggtttttgatcatttataatggagagaggaagttgcctatgttttgtaataatttattttttagcaggaatattgattagcagcttttttttctttatacacatagataactaactagattaatgtttagtttcttatttgtaggcacaggatgcatgaaatttcaagctctgggattttttgtatattgtgtatctgtatcaaaaatatcctctccttttcaaaaatgacaggttggaaaatgtttgtcagacttattaactggtcatattataataatactgataatgaccaactgctcattctgaaagccaaacataaaagctaggagaagtggcatctgaacatttttgctttgctgccagagtaaccctgactaataatacaataacagcaatttttttaaaaaactgagatttcctactggcttgaagtttttctatttagcaaaataattagtaataagttttgactaggtctaaagaatgaacacattgtaaacagttgccacagtagtttctaataaattgatcataaaagcagctatcctttttttttttaattctagcttctttttaaagattatttgggtacctaataaaggataatttatatctt

SEQ ID NO: 53524 - DNA, 2586 bp, Artificial Sequence
  derived and/or modified sequence
gtcctttctcactgctatagtacgcgggtggctggacctacatgcttcctgctgtggctgtctcggaacccgtggtcctccgcttcatgattttctgccgtctcttggcaaaaatggcaaataatgatgctgttctgaagagactggagcagaagggtgcagaggcagatcaaatcattgaatatcttaagcagcaagtttctctacttaaggagaaagcaattttgcaggcaactttgagggaagagaagaaacttcgagttgaaaatgctaaactgaagaaagaaattgaagaactgaaacaagagctaattcaggcagaaattcaaaatggagtgaagcaaataccatttccatctggtactccactgcacgctaattctatggtttctgaaaatgtgatacagtctacagcagtaacaaccgtatcttctggtaccaaagaacagataaaaggaggaacaggagacgaaaagaaagcgaaagagaaaattgaaaagaaaggagagaagaaggagaaaaaacagcaatcaatagctggaagtgccgactctaagccaatagatgtttcccgtctggatcttcgaattggttgcatcataactgctagaaaacaccctgatgcagattctttgtatgtggaagaagtagatgtcggagaaatagccccaaggacagttgtcagtggcctggtgaatcatgttcctcttgaacagatgcaaaatcggatggtgattttactttgtaacctgaaacctgcaaagatgaggggagtattatctcaagcaatggtcatgtgtgctagttcaccagagaaaattgaaatcttggctcctccaaatgggtctgttcctggagacagaattacttttgatgctttcccaggagagcctgacaaggagctgaatcctaagaagaagatttgggagcagatccagcctgatcttcacactaatgatgagtgtgtggctacatacaaaggagttccctttgaggtgaaagggaagggagtatgtagggctcaaaccatgagcaacagtggaatcaaataaaatgcttccactaccaaaagacattagagaaaaccttaaaagtaataaagagaaatatatttgtcacttatacctaaaatatgagtggctcatttttgcattactctcttctagacttgactagtcatttacttggtatatattgttttcattgattggggaaacactagatttttacctcggtttttgatcatttataatggagagaggaagttgcctatgttttgtaataatttattttttagcaggaatattgattagcagcttttttttctttatacacatagataactaactagattaatgtttagtttcttatttgtaggcacaggatgcatgaaatttcaagctctgggattttttgtatattgtgtatctgtatcaaaaatatcctctccttttcaaaaatgacaggttggaaaatgtttgtcagacttattaactggtcatattataataatactgataatgaccaactgctcattctgaaagccaaacataaaagctaggagaagtggcatctgaacatttttgctttgctgccagagtaaccctgactaataatacaataacagcaatttttttaaaaaactgagatttcctactggcttgaagtttttctatttagcaaaataattagtaataagttttgactaggtctaaagaatgaacacattgtaaacagttgccacagtagtttctaataaattgatcataaaagcagctatcctttttttttttaattctagcttctttttaaagattatttgggtacctaataaaggataatttatatcttattacagactgatattttgctttttcatgtgtcatcatactgtcagtatattaaaagaaattacagcctaaaacttaacatataccatacatatatattaaggtgtcaaatagctattctcactcatcttacaaatattgtaagagcaataaaaattaattgaggaattataagcctacaggtcatcagccttgaggtgattactgatgatttgggcttacacacatgtcagcaagatagggagtgtggataggggagggctggtagctaacaaggggcctcacagagaaatattagtgactttaaccaggtttcagaatctgggccttacctttacaggttcaacaaaagaatggcatcaatagaggcagaagtatagacattgttttaaaaatacacacatgcacacacacacaaaacattttagcattatagctgtctgaatccttcaataagaaggagaggcacacacaaatacacacactcacacaaaactcaacaaccataaaacaaccctgcatgttataaaaggcagaattaaattttatttatttaaatccatggaactctggtaggccaggatatattatagtaccattatcaatgtgatattctgaaaatatgaactgagcgtcattaacaattgttggtacctaaacacaaaatgaatttcaaaagttactttgttctcaagatatgtcattcttttgggaataaatacttctggtgacaaag

SEQ ID NO: 53525 - DNA, 1129 bp, Artificial Sequence
  derived and/or modified sequence
aaagcaaaattctgcctccaaggattttctgccgtctcttggcaaaaatggcaaataatgatgctgttctgaagagactggagcagaagggtgcagaggcagatcaaatcattgaatatcttaagcagcaagtttctctacttaaggagaaagcaattttgcaggcaactttgagggaagagaagaaacttcgagttgaaaatgctaaactgaagaaagaaattgaagaactgaaacaagagctaattcaggcagaaattcaaaatggagtgaagcaaataccatttccatctggtactccactgcacgctaattctatggtttctgaaaatgtgatacagtctacagcagtaacaaccgtatcttctggtaccaaagaacagataaaaggaggaacaggagacgaaaagaaagcgaaagagaaaattgaaaagaaaggagagaagaaggagaaaaaacagcaatcaatagccccaaggacagttgtcagtggcctggtgaatcatgttcctcttgaacagatgcaaaatcggatggtgattttactttgtaacctgaaacctgcaaagatgaggggagtattatctcaagcaatggtcatgtgtgctagttcaccagagaaaattgaaatcttggctcctccaaatgggtctgttcctggagacagaattacttttgatgctttcccaggagagcctgacaaggagctgaatcctaagaagaagatttgggagcagatccagcctgatcttcacactaatgatgagtgtgtggctacatacaaaggagttccctttgaggtgaaagggaagggagtatgtagggctcaaaccatgagcaacagtggaatcaaataaaatgcttccactaccaaaagacattagagaaaaccttaaaagtaataaagagaaatatatttgtcacttatacctaaaatatgagtggctcatttttgcattactctcttctagacttgactagtcatttacttggtatatattgttttcattgattggggaaacactagatttttacctcggtttttgatcatttataatggagagaggaagttgcctatgttttgtaataatttattttttagcaggaatattgattagcagcttttttt

SEQ ID NO: 53526 - DNA, 2519 bp, Artificial Sequence
  derived and/or modified sequence
aaaccaaagcaaaattctgcctccaaggattttctgccgtctcttggcaaaaatggcaaataatgatgctgttctgaagagactggagcagaagggtgcagaggcagatcaaatcattgaatatcttaagcagcaagtttctctacttaaggagaaagcaattttgcaggcaactttgagggaagagaagaaacttcgagttgaaaatgctaaactgaagaaagaaattgaagaactgaaacaagagctaattcaggcagaaattcaaaatggagtgaagcaaataccatttccatctggtactccactgcacgctaattctatggtttctgaaaatgtgatacagtctacagcagtaacaaccgtatcttctggtaccaaagaacagataaaaggaggaacaggagacgaaaagaaagcgaaagagaaaattgaaaagaaaggagagaagaaggagaaaaaacagcaatcaatagctggaagtgccgactctaagccaatagatgtttcccgtctggatcttcgaattggttgcatcataactgctagaaaacaccctgatgcagattctttgtatgtggaagaagtagatgtcggagaaatagccccaaggacagttgtcagtggcctggtgaatcatgttcctcttgaacagatgcaaaatcggatggtgattttactttgtaacctgaaacctgcaaagatgaggggagtattatctcaagcaatggtcatgtgtgctagttcaccagagaaaattgaaatcttggctcctccaaatgggtctgttcctggagacagaattacttttgatgctttcccaggagagcctgacaaggagctgaatcctaagaagaagatttgggagcagatccagcctgatcttcacactaatgatgagtgtgtggctacatacaaaggagttccctttgaggtgaaagggaagggagtatgtagggctcaaaccatgagcaacagtggaatcaaataaaatgcttccactaccaaaagacattagagaaaaccttaaaagtaataaagagaaatatatttgtcacttatacctaaaatatgagtggctcatttttgcattactctcttctagacttgactagtcatttacttggtatatattgttttcattgattggggaaacactagatttttacctcggtttttgatcatttataatggagagaggaagttgcctatgttttgtaataatttattttttagcaggaatattgattagcagcttttttttctttatacacatagataactaactagattaatgtttagtttcttatttgtaggcacaggatgcatgaaatttcaagctctgggattttttgtatattgtgtatctgtatcaaaaatatcctctccttttcaaaaatgacaggttggaaaatgtttgtcagacttattaactggtcatattataataatactgataatgaccaactgctcattctgaaagccaaacataaaagctaggagaagtggcatctgaacatttttgctttgctgccagagtaaccctgactaataatacaataacagcaatttttttaaaaaactgagatttcctactggcttgaagtttttctatttagcaaaataattagtaataagttttgactaggtctaaagaatgaacacattgtaaacagttgccacagtagtttctaataaattgatcataaaagcagctatcctttttttttttaattctagcttctttttaaagattatttgggtacctaataaaggataatttatatcttattacagactgatattttgctttttcatgtgtcatcatactgtcagtatattaaaagaaattacagcctaaaacttaacatataccatacatatatattaaggtgtcaaatagctattctcactcatcttacaaatattgtaagagcaataaaaattaattgaggaattataagcctacaggtcatcagccttgaggtgattactgatgatttgggcttacacacatgtcagcaagatagggagtgtggataggggagggctggtagctaacaaggggcctcacagagaaatattagtgactttaaccaggtttcagaatctgggccttacctttacaggttcaacaaaagaatggcatcaatagaggcagaagtatagacattgttttaaaaatacacacatgcacacacacacaaaacattttagcattatagctgtctgaatccttcaataagaaggagaggcacacacaaatacacacactcacacaaaactcaacaaccataaaacaaccctgcatgttataaaaggcagaattaaattttatttatttaaatccatggaactctggtaggccaggatatattatagtaccattatcaatgtgatattctgaaaatatgaactgagcgtcattaacaattgttggtacctaaacacaaaatgaatttcaaaagttactttgttctcaagatatgtcattcttttgggaataaatacttctggtg

SEQ ID NO: 53527 - DNA, 568 bp, Artificial Sequence
  derived and/or modified sequence
actttctcctactgctcaagggggtgttacactttgacgactgactaaacctcgagggccagaaacaaaccaaagcaaaattctgcctccaaggattttctgccgtctcttggcaaaaatggcaaataatgatgctgttctgaagagactggagcagaagggtgcagaggcagatcaaatcattgaatatcttaagcagcaagtttctctacttaaggagaaagcaattttgcaggcaactttgagggaagagaagaaacttcgagttgaaaatgctaaactgaagaaagaaattgaagaactgaaacaagagctaattcaggcagaaattcaaaatggagtgaagcaaataccatttccatctggtactccactgcacgctaattctatggtttctgaaaatgtgatacagtctacagcagtaacaaccgtatcttctggtaccaaagaacagataaaaggaggaacaggagacgaaaagaaagcgaaagagaaaattgaaaagaaaggagagaagaaggagaaaaaacagcaatcaatagctggaagtgccgactctaagccaata

SEQ ID NO: 53528 - DNA, 1011 bp, Artificial Sequence
  derived and/or modified sequence
atgctgcccgccgtggccgtgagcgagcccgtggtgctgcggttcatgatattttgtcgactgctggctaaaatggcaaacaacgatgccgtgctaaagagacttgaacagaagggggctgaggccgatcagattatcgaatatctgaagcagcaggtgagtttactcaaggaaaaggccatcctccaggctacactgagggaggaaaaaaagttgcgtgtggagaacgccaagctcaagaaagagattgaagagctgaagcaagagctaatccaggcagaaatccagaacggcgttaagcagattccatttccctctggcacgcctttgcacgccaattctatggtatccgagaacgttatccaatccaccgccgtgaccaccgtctctagcggtactaaggagcaaatcaagggcggtacaggagacgagaaaaaggccaaagagaaaatcgaaaagaaaggggagaaaaaggagaaaaagcagcagtccattgcgggctctgccgattctaagccaatcgacgtttctcgcttagacctgaggatcggctgcatcattaccgcacgcaaacatccagacgccgattcactctacgtggaggaggtggacgtgggagagatcgccccccgtaccgttgttagcggcctcgtgaaccatgtaccactggaacagatgcagaaccgcatggttatcctgctatgcaatctaaaaccggcgaagatgcggggcgtgctttcccaagctatggtcatgtgtgccagtagtccagagaagatcgaaatccttgcgcccccgaacggttccgttcctggcgaccggattaccttcgacgccttcccaggggagccagataaggagcttaatccaaaaaaaaaaatctgggaacagatccagcctgatctgcatacgaatgatgagtgtgtagcaacatataagggcgtaccgttcgaggttaagggcaagggggtttgccgggctcagacaatgtccaatagcggaatcaaatag

SEQ ID NO: 53529 - DNA, 1011 bp, Artificial Sequence
  derived and/or modified sequence
atgctgccagctgtggcagtgagcgaaccagtagtccttcgcttcatgatattttgcaggctgcttgccaagatggctaataacgatgccgttttgaaaaggctagaacaaaagggagccgaagccgaccagattatcgagtacctgaaacagcaagtaagcctgctgaaagaaaaagccattcttcaggcgaccctgcgggaggagaaaaagctgagagttgagaatgctaagctgaagaaggagatcgaggaactgaagcaggagctgatccaggccgagatccaaaacggggttaagcagatccccttcccgagtggtacccccttacatgctaattcaatggtgtctgagaatgtcatccaaagcacagcagttacgacagtttcatccggcacaaaagaacaaattaaagggggaacaggtgacgagaagaaggctaaggaaaagatcgagaaaaaaggcgagaaaaaggagaaaaagcagcaaagtatcgccggttctgccgattcgaagccaatcgatgtgtccagattagatctgcggataggctgcataataactgctagaaaacacccagatgctgattccctctatgtggaggaagttgatgtcggcgagattgcgccacgcacggtcgtttctggcctcgtgaaccacgtgcccttggagcagatgcaaaatcgaatggtgatcctgctgtgtaacctcaagcccgcaaagatgcgtggcgtccttagtcaagccatggtgatgtgcgcttcatctccagagaagatcgagattctggcacccccaaatgggagtgttcctggcgatcgtataacctttgatgcttttcccggagagccagataaggaactcaatcctaagaagaagatttgggagcagatccagccagatttgcacaccaacgatgagtgtgtagctacatataaaggagtgccatttgaggttaagggcaagggagtctgtagggctcagactatgagcaattcaggtatcaaatag

SEQ ID NO: 53530 - DNA, 1011 bp, Artificial Sequence
  derived and/or modified sequence
atgctgcccgccgtggccgtgagcgagcccgtggtgctgagattcatgatcttctgcagactgctggccaagatggccaacaacgacgccgtgctgaagagactggagcagaagggcgccgaggccgaccagatcatcgagtacctgaagcagcaggtgagcctgctgaaggagaaggccatcctgcaggccaccctgagagaggagaagaagctgagagtggagaacgccaagctgaagaaggagatcgaggagctgaagcaggagctgatccaggccgagatccagaacggcgtgaagcagatccccttccccagcggcacccccctgcacgccaacagcatggtgagcgagaacgtgatccagagcaccgccgtgaccaccgtgagcagcggcaccaaggagcagatcaagggcggcaccggcgacgagaagaaggccaaggagaagatcgagaagaagggcgagaagaaggagaagaagcagcagagcatcgccggcagcgccgacagcaagcccatcgacgtgagcagactggacctgagaatcggctgcatcatcaccgccagaaagcaccccgacgccgacagcctgtacgtggaggaggtggacgtgggcgagatcgcccccagaaccgtggtgagcggcctggtgaaccacgtgcccctggagcagatgcagaacagaatggtgatcctgctgtgcaacctgaagcccgccaagatgagaggcgtgctgagccaggccatggtgatgtgcgccagcagccccgagaagatcgagatcctggccccccccaacggcagcgtgcccggcgacagaatcaccttcgacgccttccccggcgagcccgacaaggagctgaaccccaagaagaagatctgggagcagatccagcccgacctgcacaccaacgacgagtgcgtggccacctacaagggcgtgcccttcgaggtgaagggcaagggcgtgtgcagagcccagaccatgagcaacagcggcatcaagtag

SEQ ID NO: 53531 - protein, 849 aa, Artificial Sequence
  derived and/or modified sequence
MVQKESQATLEERESELSSNPAASAGASLEPPAAPAPGEDNPAGAGGAAVAGAAGGARRFLCGVVEGFYGRPWVMEQRKELFRRLQKWELNTYLYAPKDDYKHRMFWREMYSVEEAEQLMTLISAAREYEIEFIYAISPGLDITFSNPKEVSTLKRKLDQVSQFGCRSFALLFDDIDHNMCAADKEVFSSFAHAQVSITNEIYQYLGEPETFLFCPTEYCGTFCYPNVSQSPYLRTVGEKLLPGIEVLWTGPKVVSKEIPVESIEEVSKIIKRAPVIWDNIHANDYDQKRLFLGPYKGRSTELIPRLKGVLTNPNCEFEANYVAIHTLATWYKSNMNGVRKDVVMSRQVAHSGAKASVVDGTPLVAAPSLNATTVVTTVYQEPIMSQGAALSGEPTTLTKEEEKKQPDEEPMDMVVEKQEETDHKNDNQILSEIVEAKMAEELKPMDTDKESIAESKSPEMSMQEDCISDIAPMQTDEQTNKEQFVPGPNEKPLYTAEPVTLEDLQLLADLFYLPYEHGPKGAQMLREFQWLRANSSVVSVNCKGKDSEKIEEWRSRAAKFEEMCGLVMGMFTRLSNCANRTILYDMYSYVWDIKSIMSMVKSFVQWLGCRSHSSAQFLIGDQEPWAFRGGLAGEFQPPPLTPTSKVYTIRPYFPKDEASVYKICREMYDDGVGLPFQSQPDLIGDKLVGGLLSLSLDYCFVLEDEDGICGYALGTVDVTPFIKKCKISWIPFMQEKYTKPNGDKELSEAEKIMLSFHEEQEVLPETFLANFPSLIKMDIHKKVTDPSVAKSMMACLLSSLKANGSRGAFCEVRPDDKRILEFYSKLGCFEIAKMEGFPKDVVILGRSL

SEQ ID NO: 53532 - protein, 863 aa, Artificial Sequence
  derived and/or modified sequence
MVQKESQATLEERESELSSNPAASAGASLEPPAAPAPGEDNPAGAGGAAVAGAAGGARRFLCGVVEGFYGRPWVMEQRKELFRRLQKWELNTYLYAPKDDYKHRMFWREMYSVEEAEQLMTLISAAREYEIEFIYAISPGLDITFSNPKEVSTLKRKLDQVSQFGCRSFALLFDDIDHNMCAADKEVFSSFAHAQVSITNEIYQYLGEPETFLFCPTEYCGTFCYPNVSQSPYLRTVGEKLLPGIEVLWTGPKVVSKEIPVESIEEVSKIIKRAPVIWDNIHANDYDQKRLFLGPYKGRSTELIPRLKGVLTNPNCEFEANYVAIHTLATWYKSNMNGVRKDVVMSRQVAHSGAKASVVDGTPLVAAPSLNATTVVTTVYQEPIMSQGAALSGEPTTLTKEEEKKQPDEEPMDMVVEKQEETDHKNDNQILSEIVEAKMAEELKPMDTDKESIAESKSPEMSMQEDCISDIAPMQTDEQTNKEQFVPGPNEKPLYTAEPVTLEDLQLLADLFYLPYEHGPKGAQMLREFQWLRANSSVVSVNCKGKDSEKIEEWRSRAAKFEEMCGLVMGMFTRLSNCANRTILYDMYSYVWDIKSIMSMVKSFVQWLGCRSHSSAQFLIGDQEPWAFRGGLAGEFQRLLPIDGANDLFFQPPPLTPTSKVYTIRPYFPKDEASVYKICREMYDDGVGLPFQSQPDLIGDKLVGGLLSLSLDYCFVLEDEDGICGYALGTVDVTPFIKKCKISWIPFMQEKYTKPNGDKELSEAEKIMLSFHEEQEVLPETFLANFPSLIKMDIHKKVTDPSVAKSMMACLLSSLKANGSRGAFCEVRPDDKRILEFYSKLGCFEIAKMEGFPKDVVILGRSL

SEQ ID NO: 53533 - DNA, 2550 bp, Artificial Sequence
  derived and/or modified sequence
atggttcagaaggaatctcaggccacgctggaggagagagaaagcgagcttagttctaaccccgctgcatccgccggggcttctcttgagccgcctgccgcccctgctcctggagaggacaaccccgcgggggcaggtggagccgccgtcgccggtgcggctggcggcgcccgccggttcctgtgcggcgtggtagagggattttatggcagaccttgggtgatggagcaacgaaaggagctgtttcggagactgcaaaaatgggagctgaatacctacctgtacgccccgaaagacgactataagcatcgcatgttttggcgagagatgtattctgtcgaggaggccgagcagctgatgaccctaatcagcgcagcaagggagtacgagatcgagtttatctatgccattagtccagggctagacattacgttctcaaacccaaaggaagtgagcaccttaaagagaaagctagatcaagttagtcagtttgggtgtcgatcatttgctcttcttttcgacgacattgatcacaacatgtgtgccgccgataaagaggtgttcagctccttcgctcacgctcaggttagcattacaaacgagatctaccaatacctgggcgagcctgagacttttctattttgtccaacagaatactgtggcactttttgttacccaaacgtttcccaaagtccctacctgaggactgtgggagaaaaactgcttcccggcattgaggttctgtggacaggacctaaggtggtctctaaggagatcccagtggaatcaattgaagaagtcagcaaaattatcaaaagagccccagtgatctgggacaatatccacgccaacgactacgaccagaagcgcctgtttctaggaccctataaaggcaggagcaccgagctaattcctcggttaaaaggtgtacttaccaatccaaactgcgagtttgaggccaactacgtcgctatccacacccttgcaacttggtacaagtcaaacatgaacggggtcaggaaagacgtggtgatgagcaggcaggtggcccacagcggggcgaaagcctcggttgttgatggcacccccttggtcgctgcgccctctctgaatgctaccactgttgttacgacagtgtaccaagagcctatcatgagccagggcgccgcattaagtggcgagccgaccacccttaccaaagaagaagagaagaagcagcctgatgaggagcctatggacatggtggtggagaagcaagaggagacagaccacaagaatgataatcagattctatccgaaattgttgaggccaaaatggctgaagaactcaagccaatggacactgacaaggagagcatagccgagagtaagtcccctgaaatgtcaatgcaagaagactgtatctccgacatcgcacctatgcagaccgacgagcagactaataaggaacaatttgtacccggaccaaacgagaagcccctttacaccgcggagccagtgacactagaggatctccagctgctggccgatctgttctacctgccctacgaacacggccctaaaggagcccagatgcttcgggaatttcagtggttacgagccaatagctcagtcgtttccgtgaattgcaagggaaaagactccgagaagatcgaggagtggcgttccagggctgcgaaattcgaagagatgtgtggactggttatgggaatgtttacccgtctttccaattgtgccaaccgaactattctctacgatatgtacagttacgtgtgggatattaagtccattatgtcaatggtgaagtctttcgttcagtggcttgggtgtagaagtcattcgtccgcgcagtttttgattggcgaccaggagccgtgggcatttcgcggtggactggccggtgagtttcaacctccgcccctgactcctaccagtaaggtttatacaatccggccttacttccccaaagatgaggccagtgtttacaagatctgtcgagagatgtatgacgatggggtcgggctgccattccagagtcagcctgatttgatcggcgacaaactggtcgggggcctgctgtccctgtcccttgactattgctttgtgctggaagacgaagacgggatatgcgggtatgcactcggcacggtagacgtgacacctttcataaaaaaatgcaagatttcttggatccccttcatgcaggagaagtacacgaagcctaatggcgacaaggagctttctgaggctgagaagattatgctgtcattccatgaggagcaggaagtcctgccagagacttttctggccaattttcccagcctgatcaagatggatatacacaaaaaagtgacagatccctccgttgcgaaatccatgatggcatgtctcttgagcagcctaaaagctaacggtagccgcggggcattttgtgaagtgcggccagacgataagcggatcttggagttctacagcaagttgggctgttttgaaatcgctaagatggaaggttttcccaaggatgtggtcatcctgggacggagcctctag

SEQ ID NO: 53534 - DNA, 2592 bp, Artificial Sequence
  derived and/or modified sequence
atggttcagaaggagtcccaggcgacactggaagagcgggagagtgagctgagctctaaccctgcggccagcgcgggcgcctcattggaacctcctgctgcccccgcgcctggggaagacaaccccgctggggcaggtggagctgcagttgcaggagccgccgggggagctcgccgttttctctgcggcgtagtagagggcttttacggcagaccttgggtgatggaacagcggaaagaactatttcgtagactccagaagtgggaattaaatacttatctctacgctccaaaagatgattataaacatcgcatgttttggcgcgagatgtactctgtcgaggaagctgagcagctgatgacattgatctccgccgcaagggaatatgaaatcgagttcatttacgccataagcccggggctcgacatcaccttttcaaaccccaaggaggtcagtacgctgaagaggaagctcgatcaggtgagccagttcggttgccgtagtttcgcgctcctcttcgatgatatagatcataacatgtgcgcagctgataaagaagtgttctcttccttcgcacatgcacaggtgagcatcactaatgaaatataccagtaccttggggagccggaaacattcctcttttgtcctaccgaatattgcgggactttctgttaccccaatgtgtcacaatcgccatatctccggactgtcggtgagaaattacttcccggcattgaggttctctggacgggtccaaaggtggtatccaaggaaatcccagtggagagcatcgaggaggtgtcaaagattatcaagcgggcacccgtaatctgggataacatccacgcaaacgactatgaccaaaagcgcctgttcctgggcccatacaaaggacgctctacagaattgataccccggctgaaaggagtgcttaccaaccctaattgtgaattcgaagccaattatgttgccatacacacattggctacctggtataaatccaatatgaatggagttcgaaaagatgtcgtcatgtctagacaggtggcccattctggagccaaggcttccgtggtggatgggacccctctggttgccgcaccatccctaaacgcaacaactgtggtgacaacagtctaccaggagccgatcatgtctcagggcgctgcattgtccggcgaacccacgactctgacgaaagaagaggagaagaaacagcccgatgaagagcctatggatatggtagttgaaaaacaggaagaaacggatcacaagaacgacaaccagatcttgtccgagatcgtcgaagctaagatggccgaagagctcaaacccatggacacagacaaggagagcattgccgagagtaagtccccagagatgtccatgcaagaggattgcatctcagatattgcgcccatgcagaccgacgagcagaccaataaggagcagtttgtgccgggaccaaatgaaaagcccctgtataccgcggagccagtcactctcgaggacttacaactgcttgcggatctgttctacctgccatatgaacatggacctaaaggagcccagatgctgcgggagttccagtggctaagggccaactcctctgtggtcagcgtgaattgcaaggggaaagactcagaaaagattgaggaatggcgttcacgcgctgcaaagtttgaggaaatgtgtggcctggttatgggtatgttcactagactgtctaactgcgccaatcgcaccatcctttacgatatgtattcttacgtgtgggatattaaaagcattatgagtatggtgaaatcattcgtacaatggctgggatgcaggagccactcaagcgcccagttcctgattggagatcaggagccatgggcctttagaggagggctcgccggcgaatttcagaggttacttcctatcgatggggcaaatgatctgtttttccagcctccacctctgacgcctacatccaaggtttacacaattcgcccttatttccctaaggacgaagcgtcggtctacaagatctgccgcgagatgtatgatgatggtgttggcctacccttccagtcccagcccgatttgattggggataagctggtggggggcttgctctcactatcacttgattattgtttcgtgctcgaggacgaggacgggatctgtgggtatgccttaggaactgttgacgttacccccttcataaagaaatgcaagataagctggataccttttatgcaggagaagtataccaagcccaatggtgacaaggagctgtctgaagctgagaagatcatgttgtccttccacgaggagcaagaagtgctgccagaaacctttctggccaattttccatcgctgataaaaatggacattcacaagaaagtaaccgatccatctgtggccaagtctatgatggcatgcctgctgtcttccttaaaagctaatgggtcacgcggcgcattttgcgaagttcgaccggacgacaaacgcatcctcgagttctattctaaactggggtgcttcgaaatagcaaagatggaaggtttccctaaggacgtcgtgatcctggggagatctctttag

SEQ ID NO: 53535 - DNA, 2550 bp, Artificial Sequence
  derived and/or modified sequence
atggtgcagaaggagagccaggccaccctggaggagcgggagagcgagctgagcagcaacccagctgccagcgctggggccagcctggagcccccagctgccccagcccctggagaggacaacccagctggagctggaggagctgctgtggccggggccgccggcggggcccggcgcttcctgtgtggggtggtggagggcttctacggccggccctgggtgatggagcagaggaaggagctgttccggcggctgcagaagtgggagctgaacacctacctgtatgcccccaaggatgactacaagcacaggatgttctggagggagatgtacagcgtggaggaggccgagcagctgatgaccctcatctctgctgcccgggagtatgaaattgagttcatctatgccatcagccctggcctggacatcaccttcagcaaccccaaggaggtgtccaccctgaagaggaagctggaccaggtgtcccagtttggctgccgcagctttgccctgctgtttgatgacatcgaccacaacatgtgtgccgctgacaaggaggtgttcagcagctttgcccacgcccaggtgtccatcaccaatgagatctaccagtacctgggggagcctgagaccttcctgttctgccccacagagtactgcggcaccttctgctacccaaatgtgtcccagagcccctacctgaggacagtgggggagaagctgctgcccggcatcgaggtgctgtggacaggccccaaggtggtgtccaaggagatccctgtggagagcattgaggaggtgtccaagatcatcaagagggcccctgtgatctgggacaacatccacgccaatgactatgaccagaagaggctcttcctgggcccctacaagggccgcagcacagagctgatcccccggctgaagggcgtgctgaccaaccccaactgtgaatttgaggccaactacgtggccatccacaccctggccacctggtacaagagcaacatgaatggagtgaggaaggatgtggtgatgagccggcaggtggcccacagcggggccaaggcctctgtggtggatggcacccccctggtggccgcccccagcctgaatgccaccaccgtggtgaccaccgtgtaccaggagcccatcatgagccagggcgccgccctgagcggggagcccaccaccctgaccaaggaggaggagaagaagcagccagatgaggagcccatggacatggtggtggagaagcaggaggagacagaccacaagaatgacaaccagatcctgtctgagatcgtggaggccaagatggccgaggagctgaagcccatggacacagacaaggagagcattgctgagagcaagagccctgagatgtccatgcaggaggactgcatcagtgacatcgcccccatgcagacagatgagcagaccaacaaggagcagtttgtgcccggccccaatgagaagcccctgtacacagctgagcctgtgaccctggaggacctgcagctgctggccgacctcttctacctgccctatgagcacggccccaagggggcccagatgctgcgggagttccagtggctgcgggccaacagctctgtggtgtctgtgaactgcaagggcaaggacagcgagaagattgaggagtggaggagccgggccgccaagtttgaggagatgtgtggcctggtgatgggcatgttcacccggctgagcaactgtgccaacagaaccatcctgtatgacatgtacagctatgtgtgggacatcaagagcatcatgtccatggtgaagagctttgtgcagtggctgggctgccgcagccacagcagcgcccagttcctgattggagaccaggagccctgggccttccggggcggcctggccggggagttccagcccccacccctgacccccaccagcaaggtgtacaccatccggccctacttccccaaggatgaggcctctgtgtacaagatctgccgggagatgtatgatgatggagtgggcctgcccttccagagccagcctgacctgattggagacaagctggtgggcggcctgctgagcctgagcctggactactgctttgtgctggaggatgaagatggcatctgtggctacgccctgggcaccgtggatgtgacccccttcatcaagaagtgcaagatctcctggatccccttcatgcaggagaagtacaccaagcccaacggggacaaggagctgtctgaggccgagaagatcatgctgtccttccacgaggagcaggaggtgctgcctgagaccttcctggccaacttccccagcctcatcaagatggacatccacaagaaggtgacagaccccagcgtggccaagtccatgatggcctgcctgctgagcagcctgaaggccaacggcagcagaggagccttctgtgaggtgcggccagatgacaagaggatcctggagttctacagcaagctgggctgctttgagatcgccaagatggagggcttccccaaggatgtggtgatcctgggccgcagcctgtag

SEQ ID NO: 53536 - DNA, 2592 bp, Artificial Sequence
  derived and/or modified sequence
atggtgcagaaggagagccaggccaccctggaggagcgggagagcgagctgagcagcaacccagctgccagcgctggggccagcctggagcccccagctgccccagcccctggagaggacaacccagctggagctggaggagctgctgtggccggggccgccggcggggcccggcgcttcctgtgtggggtggtggagggcttctacggccggccctgggtgatggagcagaggaaggagctgttccggcggctgcagaagtgggagctgaacacctacctgtatgcccccaaggatgactacaagcacaggatgttctggagggagatgtacagcgtggaggaggccgagcagctgatgaccctcatctctgctgcccgggagtatgaaattgagttcatctatgccatcagccctggcctggacatcaccttcagcaaccccaaggaggtgtccaccctgaagaggaagctggaccaggtgtcccagtttggctgccgcagctttgccctgctgtttgatgacatcgaccacaacatgtgtgccgctgacaaggaggtgttcagcagctttgcccacgcccaggtgtccatcaccaatgagatctaccagtacctgggggagcctgagaccttcctgttctgccccacagagtactgcggcaccttctgctacccaaatgtgtcccagagcccctacctgaggacagtgggggagaagctgctgcccggcatcgaggtgctgtggacaggccccaaggtggtgtccaaggagatccctgtggagagcattgaggaggtgtccaagatcatcaagagggcccctgtgatctgggacaacatccacgccaatgactatgaccagaagaggctcttcctgggcccctacaagggccgcagcacagagctgatcccccggctgaagggcgtgctgaccaaccccaactgtgaatttgaggccaactacgtggccatccacaccctggccacctggtacaagagcaacatgaatggagtgaggaaggatgtggtgatgagccggcaggtggcccacagcggggccaaggcctctgtggtggatggcacccccctggtggccgcccccagcctgaatgccaccaccgtggtgaccaccgtgtaccaggagcccatcatgagccagggcgccgccctgagcggggagcccaccaccctgaccaaggaggaggagaagaagcagccagatgaggagcccatggacatggtggtggagaagcaggaggagacagaccacaagaatgacaaccagatcctgtctgagatcgtggaggccaagatggccgaggagctgaagcccatggacacagacaaggagagcattgctgagagcaagagccctgagatgtccatgcaggaggactgcatcagtgacatcgcccccatgcagacagatgagcagaccaacaaggagcagtttgtgcccggccccaatgagaagcccctgtacacagctgagcctgtgaccctggaggacctgcagctgctggccgacctcttctacctgccctatgagcacggccccaagggggcccagatgctgcgggagttccagtggctgcgggccaacagctctgtggtgtctgtgaactgcaagggcaaggacagcgagaagattgaggagtggaggagccgggccgccaagtttgaggagatgtgtggcctggtgatgggcatgttcacccggctgagcaactgtgccaacagaaccatcctgtatgacatgtacagctatgtgtgggacatcaagagcatcatgtccatggtgaagagctttgtgcagtggctgggctgccgcagccacagcagcgcccagttcctgattggagaccaggagccctgggccttccggggcggcctggccggggagttccagaggctgctgcccattgatggagccaatgacctcttcttccagcccccacccctgacccccaccagcaaggtgtacaccatccggccctacttccccaaggatgaggcctctgtgtacaagatctgccgggagatgtatgatgatggagtgggcctgcccttccagagccagcctgacctgattggagacaagctggtgggcggcctgctgagcctgagcctggactactgctttgtgctggaggatgaagatggcatctgtggctacgccctgggcaccgtggatgtgacccccttcatcaagaagtgcaagatctcctggatccccttcatgcaggagaagtacaccaagcccaacggggacaaggagctgtctgaggccgagaagatcatgctgtccttccacgaggagcaggaggtgctgcctgagaccttcctggccaacttccccagcctcatcaagatggacatccacaagaaggtgacagaccccagcgtggccaagtccatgatggcctgcctgctgagcagcctgaaggccaacggcagcagaggagccttctgtgaggtgcggccagatgacaagaggatcctggagttctacagcaagctgggctgctttgagatcgccaagatggagggcttccccaaggatgtggtgatcctgggccgcagcctgtag

SEQ ID NO: 53537 - DNA, 4945 bp, Artificial Sequence
  derived and/or modified sequence
aggcagcagcagagggagagctcggggcttggaggggaaacagcggaagacctaagattatcgggagggcagcagaggcagagaacgaggacaggacccttggccgtcttcttccagggaacgagaggtcacagcctcgctctccgcttaggcttctggcgccccagcttaaagccgaggctgcggctgacaaagggctcgcgccggtgccgccgcccttctcatccgggcattcgggtccctgcggagagggagggggaagggcagagggggaggggaaggagccggaggggcgcacacttggagctgaagccctctccagggctccgggccggtgccccaacggacagaggtcgaggaggacccgcagaggtggcagcggccgggggcaggaggatggtgcagaaggagagtcaagcgacgttggaggagcgggagagcgagctcagctccaaccctgccgcctctgcgggggcatcgctggagccgccggcagctccggcacccggagaagacaaccccgccggggctgggggagcggcggtggccggggctgcaggaggggctcggcggttcctctgcggtgtggtggaaggattttatggaagaccttgggttatggaacagagaaaagaactctttagaaggctccagaaatgggaattaaatacatacttgtatgccccaaaagatgactacaaacataggatgttttggcgagagatgtattcagtggaggaagctgagcaacttatgactctcatctctgctgcacgagaatatgagatagagttcatctatgcgatctcacctggattggatatcactttttctaaccccaaggaagtatccacattgaaacgtaaattggaccaggtttctcagtttgggtgcagatcatttgctttgctttttgatgatatagaccataatatgtgtgcagcagacaaagaggtattcagttcttttgctcatgcccaagtctccatcacaaatgaaatctatcagtacctaggagagccagaaactttcctcttctgtcccacagaatactgtggcactttctgttatccaaatgtgtctcagtctccatatttaaggactgtgggtgaaaagcttctacctggaattgaagtgctttggacaggtcccaaagttgtttctaaagaaattccagtagagtccatcgaagaggtttctaagattattaagagagctccagtaatctgggataacattcatgctaatgattatgatcagaagagactgtttctgggcccgtacaaaggaagatccacagaactcatcccacggttaaaaggagtcctcactaatccaaattgtgaatttgaagccaactacgttgctatccacacccttgccacctggtacaaatcaaacatgaatggagtgagaaaagatgtagtgatgagtaggcaagttgcacacagtggagctaaagcaagtgtagttgatgggactcctttagttgcagcaccctctttaaatgccacaaccgtagtaacaacagtttatcaggagcccattatgagccagggagcagccttgagtggtgagcctactactctgaccaaggaagaagaaaagaaacagcctgatgaagaacccatggacatggtggtggaaaaacaagaagaaacggaccacaagaatgacaatcaaatactgagtgaaattgttgaagcgaaaatggcagaggaattgaaaccaatggacactgataaagagagcatagctgaatcaaaatccccagagatgtccatgcaagaagattgtattagtgacattgcccccatgcaaactgatgaacagacaaacaaggagcagtttgtgccaggtccaaatgaaaagcctttgtacactgcggaaccagtgaccctggaggatttgcagttacttgctgatctattctaccttccttacgagcatggacccaaaggagcacagatgttacgggaatttcaatggcttcgagcaaatagtagtgttgtcagtgtcaattgcaaaggaaaagactctgaaaaaattgaagaatggcggtcacgagcagccaagtttgaagagatgtgtggactagtgatgggaatgttcactcggctctccaattgtgccaacaggacaattctttatgacatgtactcctatgtttgggatatcaagagtataatgtctatggtgaagtcttttgtacagtggttagggtgtcgtagtcattcttcagcacaattcttaattggagaccaagaaccctgggcctttagaggtggtctagcaggagagttccagccacctccactgactcctacctccaaagtttatactatcagaccttattttcctaaggatgaggcatccgtgtacaagatttgcagagaaatgtatgacgatggagtgggtttaccctttcaaagtcagcctgatcttattggagacaagttagtaggagggctgctttccctcagcctggattactgctttgtcctagaagatgaagatggcatatgtggttatgccttgggcactgtagatgtgaccccctttattaaaaaatgtaaaatttcctggatccccttcatgcaggagaagtataccaagccaaatggtgacaaggaactctctgaggctgagaaaataatgttgagtttccatgaagaacaggaagtactgccagaaactttccttgctaatttcccttctctgataaagatggacattcacaaaaaagtaactgacccaagtgtggccaaaagcatgatggcttgcctcctgtcttcactgaaggctaatggctcccggggagctttctgtgaagtgagaccagatgataaaagaattctggaattttacagcaagttaggatgttttgaaattgcaaaaatggaaggatttccaaaggatgtggttatacttggtcggagcctgtgacatttgttgacactgtgaactgtccaaaagtctcttaactgcaccttgtgaatggtagttgaggtcttcatacagttcagcctctagaatggtaacaaatcagccaattggattcgaaacaaagaagactatgtaaaactcacccatcacactttgagactactcactggttggaagaatatagtattgcagcaaatcctgtatgaaagagagatgtgggcttcctttttgagtcttgtgttaggtgctgagaccttttacatgggcttatacagggagagagtcttcaataaatgtagtcagcactattttctgcatccagtgtggttgcgtttctcacctgagagtaatcaagataacatctgtcatcttccttggtttattgagtgaaatgcctctcagtcttaggggacatggcagagatgaaagaaagaaagagtgggtttcagaagtgtcagggtggagtgattccaagtgggatggttgtggcattagtttaagctgaataaataatttcaatttggggcagttattctgctttttgtaaagccgtggccaattgtctcctgtaatgactgttggttcaggcatgttgtactttgtagggacaaatgtgcatttgtttgtggcaaaagcctacaattgacaaacttgtaaatttctttgtatataaactagctgtaacctgactatcctttgtgtttactgtttttgtaaatttttttcctctataaatgaaagggtgttggttcagaatggcactttgaataatgtaaaccagtgaaaagtggattttctttacttttgtctttgggtttggggttgtttttgttctttttgaagttttattatttttaaagtgcctcccacctaggcgtaggccatgaccatttggggtacgagagcctaattttgtaggacttaatctgttgaaaagtgcagttacttctggaaattaacctcaatattaggtcagcatgtgaaatgttggatttgacatgtcaggtagggttcagggactgattggtcccatttgccctcaggtcagttgtttaatctcaagacctgttactactgattttattaaatcagagtctttaattcttgcatgtttgtatctaatttctgaatgaatgagcacactttaaccagttatttacagttacctttttcctttaaccggattgtgaaagcttcatgtattttaatttagattctgtgtttttaagggttctgagcatgaagctggcagatagtcggcaggactcattttttcatcatggctggctgatttctccatagattgataacagtattttgttatcttgcttctctgtagttttgcatcagctgtttaactttgagctgagtgaggggagaggggtaaagagaaagaaacttaagttttctttcacagaactccaccattgtgggctttgagagagccctaaagcattgtacctagtggtacctagtgacttccaaccaaagcctttgagtatgcactaaataggtgagaagaaaggagagaaggtttttaggttagaaacctttaaccgatagaaggatatggtatgttgtaaagctggaaccaagtttgcatttttgagggcttgagatgaagggaagactcttaccagatagtaagacagctgagttttcctcagttttctcgtcttaacactagtggacaattctagcattttgtttggaggatttcagagttaacctcatggaattcaggattttttagcaagtttgcttttggttttatcttggcttttagtaatcatgttggctggtctggtcacaggtgactgtgaaacagatgccctggtcttgctttcatcactctaggatcatgaagtgctatgctatttcctggttatgaatattaaggttggaattacatttttattgattgtttggatcagagctcagttcctgtagaaaacgaactgtaaaagaccatgcaagaggcaaaataaaacttgaagtg

SEQ ID NO: 53538 - DNA, 5043 bp, Artificial Sequence
  derived and/or modified sequence
ggtctgcagcgcaagcgcagtgcggataaacaggaagcgggcggtggaggcagcagcagagggagagctcggggcttggaggggaaacagcggaagacctaagattatcgggagggcagcagaggcagagaacgaggacaggacccttggccgtcttcttccagggaacgagaggtcacagcctcgctctccgcttaggcttctggcgccccagcttaaagccgaggctgcggctgacaaagggctcgcgccggtgccgccgcccttctcatccgggcattcgggtccctgcggagagggagggggaagggcagagggggaggggaaggagccggaggggcgcacacttggagctgaagccctctccagggctccgggccggtgccccaacggacagaggtcgaggaggacccgcagaggtggcagcggccgggggcaggaggatggtgcagaaggagagtcaagcgacgttggaggagcgggagagcgagctcagctccaaccctgccgcctctgcgggggcatcgctggagccgccggcagctccggcacccggagaagacaaccccgccggggctgggggagcggcggtggccggggctgcaggaggggctcggcggttcctctgcggtgtggtggaaggattttatggaagaccttgggttatggaacagagaaaagaactctttagaaggctccagaaatgggaattaaatacatacttgtatgccccaaaagatgactacaaacataggatgttttggcgagagatgtattcagtggaggaagctgagcaacttatgactctcatctctgctgcacgagaatatgagatagagttcatctatgcgatctcacctggattggatatcactttttctaaccccaaggaagtatccacattgaaacgtaaattggaccaggtttctcagtttgggtgcagatcatttgctttgctttttgatgatatagaccataatatgtgtgcagcagacaaagaggtattcagttcttttgctcatgcccaagtctccatcacaaatgaaatctatcagtacctaggagagccagaaactttcctcttctgtcccacagaatactgtggcactttctgttatccaaatgtgtctcagtctccatatttaaggactgtgggtgaaaagcttctacctggaattgaagtgctttggacaggtcccaaagttgtttctaaagaaattccagtagagtccatcgaagaggtttctaagattattaagagagctccagtaatctgggataacattcatgctaatgattatgatcagaagagactgtttctgggcccgtacaaaggaagatccacagaactcatcccacggttaaaaggagtcctcactaatccaaattgtgaatttgaagccaactacgttgctatccacacccttgccacctggtacaaatcaaacatgaatggagtgagaaaagatgtagtgatgagtaggcaagttgcacacagtggagctaaagcaagtgtagttgatgggactcctttagttgcagcaccctctttaaatgccacaaccgtagtaacaacagtttatcaggagcccattatgagccagggagcagccttgagtggtgagcctactactctgaccaaggaagaagaaaagaaacagcctgatgaagaacccatggacatggtggtggaaaaacaagaagaaacggaccacaagaatgacaatcaaatactgagtgaaattgttgaagcgaaaatggcagaggaattgaaaccaatggacactgataaagagagcatagctgaatcaaaatccccagagatgtccatgcaagaagattgtattagtgacattgcccccatgcaaactgatgaacagacaaacaaggagcagtttgtgccaggtccaaatgaaaagcctttgtacactgcggaaccagtgaccctggaggatttgcagttacttgctgatctattctaccttccttacgagcatggacccaaaggagcacagatgttacgggaatttcaatggcttcgagcaaatagtagtgttgtcagtgtcaattgcaaaggaaaagactctgaaaaaattgaagaatggcggtcacgagcagccaagtttgaagagatgtgtggactagtgatgggaatgttcactcggctctccaattgtgccaacaggacaattctttatgacatgtactcctatgtttgggatatcaagagtataatgtctatggtgaagtcttttgtacagtggttagggtgtcgtagtcattcttcagcacaattcttaattggagaccaagaaccctgggcctttagaggtggtctagcaggagagttccagcgtttgctgccaattgatggggcaaatgatctcttttttcagccacctccactgactcctacctccaaagtttatactatcagaccttattttcctaaggatgaggcatccgtgtacaagatttgcagagaaatgtatgacgatggagtgggtttaccctttcaaagtcagcctgatcttattggagacaagttagtaggagggctgctttccctcagcctggattactgctttgtcctagaagatgaagatggcatatgtggttatgccttgggcactgtagatgtgaccccctttattaaaaaatgtaaaatttcctggatccccttcatgcaggagaagtataccaagccaaatggtgacaaggaactctctgaggctgagaaaataatgttgagtttccatgaagaacaggaagtactgccagaaactttccttgctaatttcccttctctgataaagatggacattcacaaaaaagtaactgacccaagtgtggccaaaagcatgatggcttgcctcctgtcttcactgaaggctaatggctcccggggagctttctgtgaagtgagaccagatgataaaagaattctggaattttacagcaagttaggatgttttgaaattgcaaaaatggaaggatttccaaaggatgtggttatacttggtcggagcctgtgacatttgttgacactgtgaactgtccaaaagtctcttaactgcaccttgtgaatggtagttgaggtcttcatacagttcagcctctagaatggtaacaaatcagccaattggattcgaaacaaagaagactatgtaaaactcacccatcacactttgagactactcactggttggaagaatatagtattgcagcaaatcctgtatgaaagagagatgtgggcttcctttttgagtcttgtgttaggtgctgagaccttttacatgggcttatacagggagagagtcttcaataaatgtagtcagcactattttctgcatccagtgtggttgcgtttctcacctgagagtaatcaagataacatctgtcatcttccttggtttattgagtgaaatgcctctcagtcttaggggacatggcagagatgaaagaaagaaagagtgggtttcagaagtgtcagggtggagtgattccaagtgggatggttgtggcattagtttaagctgaataaataatttcaatttggggcagttattctgctttttgtaaagccgtggccaattgtctcctgtaatgactgttggttcaggcatgttgtactttgtagggacaaatgtgcatttgtttgtggcaaaagcctacaattgacaaacttgtaaatttctttgtatataaactagctgtaacctgactatcctttgtgtttactgtttttgtaaatttttttcctctataaatgaaagggtgttggttcagaatggcactttgaataatgtaaaccagtgaaaagtggattttctttacttttgtctttgggtttggggttgtttttgttctttttgaagttttattatttttaaagtgcctcccacctaggcgtaggccatgaccatttggggtacgagagcctaattttgtaggacttaatctgttgaaaagtgcagttacttctggaaattaacctcaatattaggtcagcatgtgaaatgttggatttgacatgtcaggtagggttcagggactgattggtcccatttgccctcaggtcagttgtttaatctcaagacctgttactactgattttattaaatcagagtctttaattcttgcatgtttgtatctaatttctgaatgaatgagcacactttaaccagttatttacagttacctttttcctttaaccggattgtgaaagcttcatgtattttaatttagattctgtgtttttaagggttctgagcatgaagctggcagatagtcggcaggactcattttttcatcatggctggctgatttctccatagattgataacagtattttgttatcttgcttctctgtagttttgcatcagctgtttaactttgagctgagtgaggggagaggggtaaagagaaagaaacttaagttttctttcacagaactccaccattgtgggctttgagagagccctaaagcattgtacctagtggtacctagtgacttccaaccaaagcctttgagtatgcactaaataggtgagaagaaaggagagaaggtttttaggttagaaacctttaaccgatagaaggatatggtatgttgtaaagctggaaccaagtttgcatttttgagggcttgagatgaagggaagactcttaccagatagtaagacagctgagttttcctcagttttctcgtcttaacactagtggacaattctagcattttgtttggaggatttcagagttaacctcatggaattcaggattttttagcaagtttgcttttggttttatcttggcttttagtaatcatgttggctggtctggtcacaggtgactgtgaaacagatgccctggtcttgctttcatcactctaggatcatgaagtgctatgctatttcctggttatgaatattaaggttggaattacatttttattgattgtttggatcagagctcagttcctgtagaaaacgaactgtaaaagaccatgcaagaggcaaaataaaacttgaagtgaatgcttgt

SEQ ID NO: 53539 - DNA, 2550 bp, Artificial Sequence
  derived and/or modified sequence
atggtgcagaaggagagccaggccaccctggaggagcgggagagcgaactgtcctctaatcctgccgcctcagccggggcctcactggagccacccgccgcgcccgcgcccggcgaggataatcccgctggtgctggaggggccgccgtggcaggggcggccggaggcgcacgccgcttcctgtgcggcgtggtcgagggcttttatggaaggccctgggtcatggagcagcgaaaagaactcttccgtcggctgcagaaatgggaactcaacacttatctctatgcgccaaaggatgactataagcaccgaatgttttggagggagatgtacagcgtggaggaggccgagcagctcatgacgttgatatctgctgcgcgggagtacgagatagagtttatttacgcgatctctccgggcctggatattacctttagcaatccaaaggaggttagtacactgaaacggaaactggatcaggtatcccagtttggttgccggtcatttgccctgttatttgatgatatcgatcataacatgtgcgccgcggataaagaggtttttagtagctttgctcacgctcaagtgtcaatcacaaacgaaatttatcagtatctcggggaacccgaaacgttcctgttctgccctaccgaatactgcggcacattctgctaccccaatgttagccagagcccatacctgcgcacagtgggggagaagttgctgcctgggatagaagtgttgtggaccggccccaaagtggtgtccaaagaaatccccgtcgagtctattgaagaggtcagtaagattatcaaacgagcccccgttatttgggacaatattcacgccaacgactacgaccaaaagcggcttttccttggtccctacaaagggaggtcaaccgagcttatccctcgcctgaagggagttctcaccaatccaaactgtgagttcgaggctaattatgtcgctatccacactctggctacatggtacaaaagcaacatgaacggagtccgcaaggacgtggtgatgtcgcgtcaggtagcacactcaggcgccaaagcttcagtggtcgacggcacgcctctggtggccgccccctctctgaacgccactactgtggtgacgaccgtttaccaagagccaattatgtcccagggggccgctctgagcggagaacctaccactctgaccaaggaggaggaaaaaaagcaacccgatgaggaaccaatggacatggtcgttgagaagcaggaagaaacagatcataagaacgacaatcagatcctgagcgaaatcgtggaggccaaaatggcggaggagcttaagcctatggacaccgacaaagagtcgatcgctgagtccaaaagtcctgagatgtcgatgcaggaggactgcatctctgatatcgctcctatgcaaactgacgagcagactaacaaggagcaattcgtacccggtcctaatgaaaagccactgtacacagcggagcccgtaacattagaggacctgcagcttctcgccgacctgttttatcttccttacgagcacggtcccaagggcgctcaaatgctcagagagtttcagtggctgcgagcaaactcctccgtagtctctgtgaactgtaagggaaaagattctgagaagatagaggagtggaggagccgggccgccaaattcgaagagatgtgtggattggtcatgggtatgttcacaaggctatctaattgcgccaatcgtaccatcttgtatgatatgtactcgtatgtgtgggatattaagtctattatgtccatggtcaaatccttcgtacaatggctgggatgtagatcccacagctctgcccagttcctgatcggcgatcaggaaccatgggccttcagaggcggcctggcaggtgagttccagccaccccctcttacgccaactagcaaagtgtatacgatcaggccatatttccccaaggacgaagcatccgtttataagatctgccgagagatgtacgacgatggggtgggcctgccttttcagagtcagcctgatcttatcggagataaactggttggaggtctgttgagccttagcctcgattactgctttgtccttgaggatgaggacggtatctgtgggtatgccctgggcactgtggatgtgactccatttattaagaagtgcaagatctcctggatcccatttatgcaagaaaagtatacgaaacctaacggggataaggagttatctgaggccgagaaaataatgctcagttttcacgaggaacaggaggtgctccccgagacttttttggccaatttcccctccctgatcaagatggacatacacaagaaagtgaccgatccctctgttgccaaatcgatgatggcctgtctgctgagcagtttaaaggcaaatgggtccagaggtgctttctgcgaggtgcgcccagatgataagcggatactcgagttctacagtaagttgggctgctttgagatcgcaaagatggagggctttccaaaggacgtggtgatcctcggaagatccctgtag

SEQ ID NO: 53540 - DNA, 2592 bp, Artificial Sequence
  derived and/or modified sequence
atggtgcagaaggagagccaggccaccctggaggagcgggagagcgaactgtcctccaatcctgccgccagtgcaggcgctagtctcgagccgcctgccgcgcctgcacctggcgaagacaaccctgccggagccggtggggcagcggtcgcaggagccgccggcggagctaggcgatttctgtgcggtgtggtcgagggcttttacgggagaccctgggttatggagcagcggaaagagctgtttcgaagattgcagaaatgggaactgaatacatacctttacgcacccaaagacgactacaaacacaggatgttctggagagagatgtattctgtagaggaggcagagcagctcatgactttgataagtgctgcaagagagtatgagattgaatttatatatgcgattagtccaggtctcgacattacgttttcaaacccgaaagaggtcagtactctcaaaagaaagctggatcaggtctctcaattcgggtgccggtcgtttgctttgctgtttgacgatattgatcacaatatgtgcgctgcagacaaggaggtcttctcgtccttcgcccacgcccaggtgagtattacaaacgagatctatcagtatctgggggagcccgagacctttctgttttgccccactgaatactgtgggacattctgttatccaaatgtgagtcaatcaccatatctccggaccgtgggcgagaagctcctgccgggcatcgaagttctgtggactgggcccaaggttgtgtcgaaagagattcccgtcgagagtatagaggaagtttctaagattattaagcgagcaccagtgatctgggataatatccatgccaacgattacgatcagaaacgcctgttcctgggcccttacaagggcagatccactgagttaatccctcgtctgaaaggtgtgctgacaaaccccaattgtgaattcgaagctaattatgtcgcaattcatacactggctacttggtataagtctaacatgaatggcgtgagaaaggatgttgttatgtcgcggcaagtggcacactcaggggcgaaggcttctgtggtggacggtacgccactggtggctgccccgtctctaaacgctacaacagtcgtcaccaccgtgtatcaggaaccgatcatgtctcagggagcggccttaagcggggaacccaccaccctgaccaaggaagaagagaaaaagcagccggacgaggagcctatggatatggtcgtggaaaaacaagaagagactgatcataagaacgacaatcagatcttgtccgagattgttgaagccaagatggcggaggagctgaagccaatggacacagataaggagtctattgccgagagcaagtcacctgaaatgagcatgcaggaggattgtatcagcgacatcgcccccatgcagaccgacgaacagaccaataaggagcagttcgtgcccggacccaacgagaagcctttatataccgcagagcctgtcaccctggaggacttgcagcttttggcggacctgttttacttaccttatgagcacggccccaagggcgctcaaatgctgcgtgagttccagtggctccgggccaatagttccgtggtgagtgtaaactgtaagggtaaggattccgagaagatagaggaatggcggtcaagagcagccaagttcgaggagatgtgcggacttgtgatgggcatgttcacaagactgtccaactgtgccaatcgtacgattctgtacgatatgtatagttatgtctgggacattaagagtataatgagcatggtgaagtctttcgttcagtggctaggctgtcggtctcatagcagcgcccagttcctcatcggtgaccaggagccttgggccttccggggtggtcttgcaggcgaatttcagcgcttattgccaattgacggcgccaatgaccttttttttcagcccccaccgttaacgccgaccagcaaagtgtatacgatacgtccctactttcccaaggacgaggcttccgtttataagatatgtcgggagatgtacgatgacggggtaggactgccttttcagtcgcagcccgatctgattggcgacaaactcgtaggaggtctgctcagtctgagtcttgactattgtttcgtcctggaggacgaagacggcatttgcggttatgccctcggtacagtcgacgtgacaccattcattaaaaaatgtaaaatatcgtggattcccttcatgcaagaaaagtatactaagccgaacggagataaagagctttcagaggccgagaagatcatgctgagttttcacgaggagcaggaggtgctccccgagactttcctagctaatttccctagtctgatcaaaatggacatacacaaaaaggttacagacccatccgtggctaagagcatgatggcgtgcctcctaagcagtctgaaggccaacggttcgagaggggccttttgcgaagtccggcctgatgacaaacggattctggagttttactcaaagctgggctgctttgagatcgccaaaatggaggggttccccaaggacgtggtgattctcggacgatcactgtag

SEQ ID NO: 53541 - DNA, 2550 bp, Artificial Sequence
  derived and/or modified sequence
atggtccagaaggaaagtcaggccacccttgaggagagagaatccgagctatctagtaatcctgccgcttccgccggagcctctctggaaccccctgccgcacccgctcccggtgaagataaccccgcaggagcaggcggtgccgcagtcgcaggcgcagcaggcggagctcgtaggtttctttgtggggtggtggagggattctatggcagaccatgggtcatggaacaacgaaaggagctgttccgtagattgcagaaatgggagttgaacacttacctgtatgctcccaaggatgactacaagcatcgcatgttttggcgcgaaatgtactcggttgaggaggccgagcaacttatgacactcatctctgccgctcgggaatacgagatagaatttatctacgccatctcgcctgggttggacattacctttagcaatccaaaagaggtttccacactgaaacgaaagctcgatcaggtttctcagtttgggtgtagaagtttcgcacttttgtttgacgatattgaccataatatgtgcgctgccgacaaagaagtgtttagcagtttcgcccacgcccaggtatctataaccaacgaaatctatcagtacctgggagaaccagaaactttcttattttgtcccaccgagtattgcggcacattctgttaccctaacgtgtcacagtcaccctatttgcgtaccgttggggaaaagctcctgcccggaattgaggttctctggacaggccctaaggttgtatccaaagaaatccctgtggaatcaatcgaggaggtgtcaaagattatcaaacgcgcacccgtaatctgggataatattcacgccaacgattacgaccagaaaaggctattcctgggaccctacaagggcaggtccaccgagctgatcccccgattgaaaggcgtgctgaccaatcccaactgcgaattcgaggcaaactatgtcgcaatccatactctggctacctggtacaagagtaacatgaacggagtcaggaaggatgtggttatgagccgacaagttgcccattccggggcaaaagcctctgtcgttgatggtactcctttagtcgctgctccaagcttgaatgctaccacagtggtgacaacggtataccaggagcccataatgtcacaaggcgcagcattatctggggagcctactaccctcactaaggaagaggaaaagaagcaacctgatgaagagcctatggatatggtggttgagaagcaagaggaaacagatcataaaaacgacaaccagattttgtccgagatcgtagaggccaaaatggccgaggagcttaaaccgatggatacagataaagagtctatcgccgagtctaaaagcccagagatgtcaatgcaggaggattgcatttctgacatcgccccaatgcagacagacgaacagacaaacaaagaacaatttgttccaggacccaacgaaaagccactgtacaccgcagaacctgtgactctggaggacctgcagctcttagccgatcttttctacctaccttacgagcatggaccgaagggcgctcaaatgctgcgagaatttcagtggctacgcgcaaactcatccgtggtttctgtcaactgtaaaggaaaggattctgagaagatcgaagagtggaggtcaagggccgcaaaattcgaagaaatgtgtggcctggtgatgggaatgtttactaggctgagcaactgcgctaatagaacaatcctgtatgacatgtattcttacgtctgggacatcaaatcaattatgtcaatggtgaaaagcttcgtgcagtggcttggatgtaggagccactccagcgcccagttcctaattggcgaccaagaaccttgggccttccgcggaggactagctggagaattccagcctccgccactaactccaacttctaaagtatataccattcgcccatacttccccaaagatgaggctagcgtttataagatttgccgggaaatgtatgacgatggcgtaggactcccctttcagtcgcagcccgatctgatcggcgataaactggtgggtggacttttgagcctcagcctggattactgtttcgtattagaagacgaagacggtatttgcggatacgcactgggaacggttgatgtgacaccatttataaagaagtgtaaaatcagttggatcccttttatgcaggaaaaatataccaagccaaacggagacaaagagttgtccgaggctgaaaaaataatgctgtcatttcatgaagagcaggaagtgttgccagaaacttttctggccaattttcctagcctgatcaaaatggatatccacaaaaaagtgacagacccatccgtcgctaagagcatgatggcatgtttgctctcctcacttaaagctaacggatcccggggagcattttgcgaagttcgcccagatgataagcgaatactcgagttctattcgaagctgggttgtttcgagatagccaaaatggaaggctttcccaaagatgtggtgatcctgggccgttccctttag

SEQ ID NO: 53542 - DNA, 2592 bp, Artificial Sequence
  derived and/or modified sequence
atggtgcagaaggagtcccaggccacactggaggaacgcgaaagtgaactaagctctaatcccgctgcatccgccggagccagcctggagccacccgctgcccctgcacctggagaggataaccccgcaggggctggcggagcagccgtcgctggagctgccggaggggcacggcgattcttgtgtggagttgttgagggattctacggcagaccatgggtgatggaacagcgcaaggagctgtttaggagactccagaaatgggaactgaatacctatctttatgcacctaaagatgactacaagcaccggatgttctggcgggagatgtattctgtggaggaagctgagcaactgatgactcttatcagcgcagcacgcgagtatgagatcgagttcatctatgctatctccccaggtttagacatcaccttcagcaatcctaaggaggtctcaacactaaagagaaagttagatcaggtgtcccagtttggctgtcggtccttcgcactgctcttcgacgacatcgatcataatatgtgtgcagcagacaaggaagtgttttctagctttgcacatgctcaagtcagcataaccaatgagatttaccaatacctcggggagcccgaaactttcctgttctgcccaacagaatattgcggaacattctgctaccctaatgtgtcacaatccccttatctgcggactgtgggggaaaagctcctgccaggaatcgaggtactgtggacagggccaaaagtggtcagtaaggagatccccgtcgaaagcattgaagaagtgtcaaaaatcattaaacgcgctccggtgatatgggataatatccatgccaacgactatgaccagaaaaggctcttcttgggaccttataaaggaagaagcaccgagctgatccctagattgaagggcgtcttaaccaatcccaattgtgagtttgaagcgaactacgtggccatacacacgttggccacctggtacaagtccaatatgaacggagtacggaaagatgtagtgatgtctcgccaagtagcccactccggtgctaaggcttccgtagtggatggcacccctctcgtggccgctccctcattgaatgccacgaccgtggtgacgaccgtatatcaagaacccatcatgtcccagggggctgctctctctggggaaccaacaacgctaacgaaggaagaagaaaaaaagcaacccgacgaagaaccaatggacatggtcgtcgagaagcaggaagaaactgatcacaaaaacgataatcaaatccttagcgagatcgttgaagcaaaaatggcggaggagctaaaaccgatggataccgacaaggagagtatagcggagtcgaagagtcctgaaatgtccatgcaagaagactgtatctccgacatagccccaatgcagaccgacgaacagaccaacaaagagcaattcgtgcccggtcccaacgagaaaccactctacacagctgagcccgtcactctggaggaccttcagctcctcgccgaccttttttacctcccatatgagcatgggccaaagggcgcacagatgttacgtgaattccaatggctccgggctaattcatctgtcgtatcagtaaactgcaaaggcaaggacagcgaaaaaatcgaagagtggcgttcacgcgcagccaaattcgaggagatgtgcggacttgttatgggcatgtttacacgcctctcgaactgcgccaatcgaaccattctgtacgacatgtacagttatgtatgggatataaaaagcatcatgtcaatggtcaagtcattcgtgcagtggttagggtgccggagccactcctctgcgcagtttttaataggcgaccaagagccatgggccttcagaggaggactggcgggtgaatttcagcgtctgctgccaattgatggggcaaatgacctgttctttcagcccccacctctcaccccaacctccaaagtctacaccatcagaccctactttcctaaggatgaggcttccgtgtataagatttgcagagagatgtacgacgacggagtggggctgccctttcaatcgcaacccgacctgatcggcgataaactggtgggaggtctgctgtccctgtcactagactattgttttgtgctcgaggacgaagacggtatttgcggctacgccttaggcaccgttgatgtcactcccttcattaagaaatgcaagataagttggattccctttatgcaggagaaatatactaaaccaaacggtgacaaggagttaagcgaagctgagaagataatgctgagcttccatgaagaacaggaggttctcccagagaccttcctggctaactttccttctttaatcaagatggacatccacaaaaaagttaccgacccctctgtcgcaaaaagtatgatggcgtgcttgttgtcatctctgaaagcgaatggatccaggggtgcattttgtgaggtgagacctgatgacaaacggatactggagttttattcaaagctcggatgcttcgagattgccaaaatggagggattccccaaggacgtcgtgatactgggtagaagcctttag

SEQ ID NO: 53543 - DNA, 2550 bp, Artificial Sequence
  derived and/or modified sequence
atggtgcagaaggagagccaggccaccctggaggagagagagagcgagctgagcagcaaccccgccgccagcgccggcgccagcctggagccccccgccgcccccgcccccggcgaggacaaccccgccggcgccggcggcgccgccgtggccggcgccgccggcggcgccagaagattcctgtgcggcgtggtggagggcttctacggcagaccctgggtgatggagcagagaaaggagctgttcagaagactgcagaagtgggagctgaacacctacctgtacgcccccaaggacgactacaagcacagaatgttctggagagagatgtacagcgtggaggaggccgagcagctgatgaccctgatcagcgccgccagagagtacgagatcgagttcatctacgccatcagccccggcctggacatcaccttcagcaaccccaaggaggtgagcaccctgaagagaaagctggaccaggtgagccagttcggctgcagaagcttcgccctgctgttcgacgacatcgaccacaacatgtgcgccgccgacaaggaggtgttcagcagcttcgcccacgcccaggtgagcatcaccaacgagatctaccagtacctgggcgagcccgagaccttcctgttctgccccaccgagtactgcggcaccttctgctaccccaacgtgagccagagcccctacctgagaaccgtgggcgagaagctgctgcccggcatcgaggtgctgtggaccggccccaaggtggtgagcaaggagatccccgtggagagcatcgaggaggtgagcaagatcatcaagagagcccccgtgatctgggacaacatccacgccaacgactacgaccagaagagactgttcctgggcccctacaagggcagaagcaccgagctgatccccagactgaagggcgtgctgaccaaccccaactgcgagttcgaggccaactacgtggccatccacaccctggccacctggtacaagagcaacatgaacggcgtgagaaaggacgtggtgatgagcagacaggtggcccacagcggcgccaaggccagcgtggtggacggcacccccctggtggccgcccccagcctgaacgccaccaccgtggtgaccaccgtgtaccaggagcccatcatgagccagggcgccgccctgagcggcgagcccaccaccctgaccaaggaggaggagaagaagcagcccgacgaggagcccatggacatggtggtggagaagcaggaggagaccgaccacaagaacgacaaccagatcctgagcgagatcgtggaggccaagatggccgaggagctgaagcccatggacaccgacaaggagagcatcgccgagagcaagagccccgagatgagcatgcaggaggactgcatcagcgacatcgcccccatgcagaccgacgagcagaccaacaaggagcagttcgtgcccggccccaacgagaagcccctgtacaccgccgagcccgtgaccctggaggacctgcagctgctggccgacctgttctacctgccctacgagcacggccccaagggcgcccagatgctgagagagttccagtggctgagagccaacagcagcgtggtgagcgtgaactgcaagggcaaggacagcgagaagatcgaggagtggagaagcagagccgccaagttcgaggagatgtgcggcctggtgatgggcatgttcaccagactgagcaactgcgccaacagaaccatcctgtacgacatgtacagctacgtgtgggacatcaagagcatcatgagcatggtgaagagcttcgtgcagtggctgggctgcagaagccacagcagcgcccagttcctgatcggcgaccaggagccctgggccttcagaggcggcctggccggcgagttccagcccccccccctgacccccaccagcaaggtgtacaccatcagaccctacttccccaaggacgaggccagcgtgtacaagatctgcagagagatgtacgacgacggcgtgggcctgcccttccagagccagcccgacctgatcggcgacaagctggtgggcggcctgctgagcctgagcctggactactgcttcgtgctggaggacgaggacggcatctgcggctacgccctgggcaccgtggacgtgacccccttcatcaagaagtgcaagatcagctggatccccttcatgcaggagaagtacaccaagcccaacggcgacaaggagctgagcgaggccgagaagatcatgctgagcttccacgaggagcaggaggtgctgcccgagaccttcctggccaacttccccagcctgatcaagatggacatccacaagaaggtgaccgaccccagcgtggccaagagcatgatggcctgcctgctgagcagcctgaaggccaacggcagcagaggcgccttctgcgaggtgagacccgacgacaagagaatcctggagttctacagcaagctgggctgcttcgagatcgccaagatggagggcttccccaaggacgtggtgatcctgggcagaagcctgtag

SEQ ID NO: 53544 - DNA, 2592 bp, Artificial Sequence
  derived and/or modified sequence
atggtgcagaaggagagccaggccaccctggaggagagagagagcgagctgagcagcaaccccgccgccagcgccggcgccagcctggagccccccgccgcccccgcccccggcgaggacaaccccgccggcgccggcggcgccgccgtggccggcgccgccggcggcgccagaagattcctgtgcggcgtggtggagggcttctacggcagaccctgggtgatggagcagagaaaggagctgttcagaagactgcagaagtgggagctgaacacctacctgtacgcccccaaggacgactacaagcacagaatgttctggagagagatgtacagcgtggaggaggccgagcagctgatgaccctgatcagcgccgccagagagtacgagatcgagttcatctacgccatcagccccggcctggacatcaccttcagcaaccccaaggaggtgagcaccctgaagagaaagctggaccaggtgagccagttcggctgcagaagcttcgccctgctgttcgacgacatcgaccacaacatgtgcgccgccgacaaggaggtgttcagcagcttcgcccacgcccaggtgagcatcaccaacgagatctaccagtacctgggcgagcccgagaccttcctgttctgccccaccgagtactgcggcaccttctgctaccccaacgtgagccagagcccctacctgagaaccgtgggcgagaagctgctgcccggcatcgaggtgctgtggaccggccccaaggtggtgagcaaggagatccccgtggagagcatcgaggaggtgagcaagatcatcaagagagcccccgtgatctgggacaacatccacgccaacgactacgaccagaagagactgttcctgggcccctacaagggcagaagcaccgagctgatccccagactgaagggcgtgctgaccaaccccaactgcgagttcgaggccaactacgtggccatccacaccctggccacctggtacaagagcaacatgaacggcgtgagaaaggacgtggtgatgagcagacaggtggcccacagcggcgccaaggccagcgtggtggacggcacccccctggtggccgcccccagcctgaacgccaccaccgtggtgaccaccgtgtaccaggagcccatcatgagccagggcgccgccctgagcggcgagcccaccaccctgaccaaggaggaggagaagaagcagcccgacgaggagcccatggacatggtggtggagaagcaggaggagaccgaccacaagaacgacaaccagatcctgagcgagatcgtggaggccaagatggccgaggagctgaagcccatggacaccgacaaggagagcatcgccgagagcaagagccccgagatgagcatgcaggaggactgcatcagcgacatcgcccccatgcagaccgacgagcagaccaacaaggagcagttcgtgcccggccccaacgagaagcccctgtacaccgccgagcccgtgaccctggaggacctgcagctgctggccgacctgttctacctgccctacgagcacggccccaagggcgcccagatgctgagagagttccagtggctgagagccaacagcagcgtggtgagcgtgaactgcaagggcaaggacagcgagaagatcgaggagtggagaagcagagccgccaagttcgaggagatgtgcggcctggtgatgggcatgttcaccagactgagcaactgcgccaacagaaccatcctgtacgacatgtacagctacgtgtgggacatcaagagcatcatgagcatggtgaagagcttcgtgcagtggctgggctgcagaagccacagcagcgcccagttcctgatcggcgaccaggagccctgggccttcagaggcggcctggccggcgagttccagagactgctgcccatcgacggcgccaacgacctgttcttccagcccccccccctgacccccaccagcaaggtgtacaccatcagaccctacttccccaaggacgaggccagcgtgtacaagatctgcagagagatgtacgacgacggcgtgggcctgcccttccagagccagcccgacctgatcggcgacaagctggtgggcggcctgctgagcctgagcctggactactgcttcgtgctggaggacgaggacggcatctgcggctacgccctgggcaccgtggacgtgacccccttcatcaagaagtgcaagatcagctggatccccttcatgcaggagaagtacaccaagcccaacggcgacaaggagctgagcgaggccgagaagatcatgctgagcttccacgaggagcaggaggtgctgcccgagaccttcctggccaacttccccagcctgatcaagatggacatccacaagaaggtgaccgaccccagcgtggccaagagcatgatggcctgcctgctgagcagcctgaaggccaacggcagcagaggcgccttctgcgaggtgagacccgacgacaagagaatcctggagttctacagcaagctgggctgcttcgagatcgccaagatggagggcttccccaaggacgtggtgatcctgggcagaagcctgtag

SEQ ID NO: 53545 - protein, 156 aa, Artificial Sequence
  derived and/or modified sequence
MWTFVTQLLVTLVLLSFFLVSCQNVMHIVRGSLCFVLKHIHQELDKELGESEGLSDDEETISTRVVRRRVFLKGNEFQNIPGEQVTEEQFTDEQGNIVTKKIIRKVVRQIDLSSADAAQEHEEVTVEGPLEDPSELEVDIDYFMKHSKDHTSTPNP

SEQ ID NO: 53546 - DNA, 471 bp, Artificial Sequence
  derived and/or modified sequence
atgtggaccttcgtcacccagctcctggttacgcttgttctgctcagtttctttctggtctcatgtcagaacgtgatgcacatcgtgcggggctctttatgtttcgtgctgaaacatatccatcaggagcttgacaaagaattgggcgaaagtgaggggctttccgacgatgaagagacaatttctacacgtgtggtgcgccggagggtgtttcttaagggaaatgaatttcagaacattcctggggagcaggtgaccgaggaacagtttaccgacgagcagggcaatattgtcactaaaaagatcattaggaaggtcgttaggcaaattgatctcagctctgcagatgccgcccaggagcacgaggaagtgactgtggaaggtccactcgaggatcctagtgaattggaagttgacattgattattttatgaagcattccaaggatcatacctctacacctaatccttag

SEQ ID NO: 53547 - DNA, 471 bp, Artificial Sequence
  derived and/or modified sequence
atgtggacctttgtgacccagctgctggtgaccctggtgctgctgtccttcttcctggtgtcctgccagaatgtgatgcacatcgtgcggggcagcctgtgctttgtgctgaagcacatccaccaggagctggacaaggagctgggggagagcgagggcctgagtgatgatgaggagaccatcagcaccagggtggtgagaagaagagtcttcctgaagggaaatgagttccagaacatccctggagagcaggtgacagaggagcagttcacagatgagcagggcaacatcgtgaccaagaagatcatcaggaaggtggtgcggcagattgacctgagcagcgcagatgctgcccaggagcacgaggaggtgacagtggagggccccctggaggaccccagcgagctggaggtggacatcgactacttcatgaagcacagcaaggaccacaccagcacccccaacccctag

SEQ ID NO: 53548 - DNA, 471 bp, Artificial Sequence
  derived and/or modified sequence
atgtggaccttcgtgacccagctgctggtgaccctggtgctgctgtcctttttcttggtgagttgtcagaacgtcatgcacatcgtccgcggctcgctgtgctttgtgctcaaacacatacatcaggagctcgataaagaacttggtgaaagcgaaggcttgtcggacgacgaagagacaatcagtacccgtgtcgttcggaggagggtatttctgaagggcaatgagtttcagaatattcccggcgagcaagtgaccgaagaacagtttaccgatgaacagggaaatatcgtcacaaaaaagattattaggaaggtcgtcagacagattgatttatcatctgccgacgctgcccaggaacacgaagaagtaacagtggagggtccattggaggacccctctgaactcgaagtcgacattgattattttatgaaacacagtaaagaccacacaagcactcccaacccgtag

SEQ ID NO: 53549 - DNA, 1160 bp, Artificial Sequence
  derived and/or modified sequence
gtcacccgggccactcagggcagagcctggctgctgggcagaagggcacttgggccgggctgcttcagccgagagggccattcggtgtcctgcccacagagagagaaacagtgagagaccaagagagcaaaccagagagatagggagggggaatgcaaggggtccctgggggactcaggagtcccagtggagaatgagaggcaggccccccgtggtggccggggccctggctgccagaggaccgggctggtgaggaggcgaggatgtggactttcgtcacccagctgttggtcacgctggtgctgctgagcttcttcctggtcagctgtcagaacgtgatgcacattgtcagggggtccctgtgctttgtgctaaagcacatccaccaggagctggacaaggagctgggggagagcgagggcctcagtgacgacgaggagaccatctccaccagggtggtccggcggcgggtcttcctgaaggggaatgagtttcagaatattccaggggagcaggtgacagaggagcaattcacggatgagcagggcaacattgtcaccaagaagatcattcgcaaggtggttcgacagatagacttgtccagcgccgatgccgcccaggagcacgaggaggtgactgtagaggggcccctggaggatcccagtgagctggaggtcgatattgattactttatgaaacactccaaggatcacacctcgacacccaacccctgaaccccacacactctgccatgcacacaggaggagagctggacctgagggccaccgcagcggtgcacacattcctctgggctgacggcatgacctctgtaagggactcctgctagtcccctcttggcatgaatgactgactgtagacgcatgacctccaggcttcaatcctgcctcttgcaatgacagctgatctgtcggaaccaggacacaaaagcagcaagaagcggggagagagagggatagaaaacaagcgcaggagagcctgcgaacgcaaaagtgaatgagggctttttgtggctggggatgggttttggttttggggttttttttttaaattgttttgacttcgtacagggtactttttcccaacctcatctgtcagaaatccatgtgggcttcctggaaagaaaaaaaaaaaaaagaaaa

SEQ ID NO: 53550 - DNA, 471 bp, Artificial Sequence
  derived and/or modified sequence
atgtggaccttcgttactcaactgctggtcaccctcgtgctgctctcattcttcctggtgtcttgccagaatgtgatgcatatcgtgcgaggatccctctgcttcgtcttaaagcatatccaccaggaacttgataaggaattgggagagtccgaaggattaagcgatgacgaggagaccatcagcactcgggtggtccggaggcgcgtctttctgaaagggaatgaatttcagaatattccaggcgaacaggtgacggaggaacaatttactgatgaacagggtaatattgtgactaagaaaatcatcaggaaggtggtccgccagattgacctcagtagtgccgacgccgctcaggaacacgaagaggttaccgtagagggacccctggaagacccatcagagctcgaggtggacatcgattattttatgaagcattcaaaggaccatacctccacacctaatccgtag

SEQ ID NO: 53551 - DNA, 471 bp, Artificial Sequence
  derived and/or modified sequence
atgtggaccttcgtgacccagctgctggtgaccctggtgctgctgagcttcttcctggtgagctgccagaacgtgatgcacatcgtgagaggcagcctgtgcttcgtgctgaagcacatccaccaggagctggacaaggagctgggcgagagcgagggcctgagcgacgacgaggagaccatcagcaccagagtggtgagaagaagagtgttcctgaagggcaacgagttccagaacatccccggcgagcaggtgaccgaggagcagttcaccgacgagcagggcaacatcgtgaccaagaagatcatcagaaaggtggtgagacagatcgacctgagcagcgccgacgccgcccaggagcacgaggaggtgaccgtggagggccccctggaggaccccagcgagctggaggtggacatcgactacttcatgaagcacagcaaggaccacaccagcacccccaacccctag

SEQ ID NO: 53552 - protein, 1897 aa, Artificial Sequence
  derived and/or modified sequence
MAQAAKQLKKIKDIEAQALQEQKEKEESNRKRRNRSRDRKKKADAATSFLRAARSGNLDKALDHLRNGVDINTCNQNGLNGLHLASKEGHVKMVVELLHKEIILETTTKKGNTALHIAALAGQDEVVRELVNYGANVNAQSQKGFTPLYMAAQENHLEVVKFLLENGANQNVATEDGFTPLAVALQQGHENVVAHLINYGTKGKVRLPALHIAARNDDTRTAAVLLQNDPNPDVLSKTGFTPLHIAAHYENLNVAQLLLNRGASVNFTPQNGITPLHIASRRGNVIMVRLLLDRGAQIETKTKDELTPLHCAARNGHVRISEILLDHGAPIQAKTKNGLSPIHMAAQGDHLDCVRLLLQYDAEIDDITLDHLTPLHVAAHCGHHRVAKVLLDKGAKPNSRALNGFTPLHIACKKNHVRVMELLLKTGASIDAVTESGLTPLHVASFMGHLPIVKNLLQRGASPNVSNVKVETPLHMAARAGHTEVAKYLLQNKAKVNAKAKDDQTPLHCAARIGHTNMVKLLLENNANPNLATTAGHTPLHIAAREGHVETVLALLEKEASQACMTKKGFTPLHVAAKYGKVRVAELLLERDAHPNAAGKNGLTPLHVAVHHNNLDIVKLLLPRGGSPHSPAWNGYTPLHIAAKQNQVEVARSLLQYGGSANAESVQGVTPLHLAAQEGHAEMVALLLSKQANGNLGNKSGLTPLHLVAQEGHVPVADVLIKHGVMVDATTRMGYTPLHVASHYGNIKLVKFLLQHQADVNAKTKLGYSPLHQAAQQGHTDIVTLLLKNGASPNEVSSDGTTPLAIAKRLGYISVTDVLKVVTDETSFVLVSDKHRMSFPETVDEILDVSEDEGTAHITIMGEELISFKAERRDSRDVDEEKELLDFVPKLDQVVESPAIPRIPCAMPETVVIRSEEQEQASKEYDEDSLIPSSPATETSDNISPVASPVHTGFLVSFMVDARGGSMRGSRHNGLRVVIPPRTCAAPTRITCRLVKPQKLSTPPPLAEEEGLASRIIALGPTGAQFLSPVIVEIPHFASHGRGDRELVVLRSENGSVWKEHRSRYGESYLDQILNGMDEELGSLEELEKKRVCRIITTDFPLYFVIMSRLCQDYDTIGPEGGSLKSKLVPLVQATFPENAVTKRVKLALQAQPVPDELVTKLLGNQATFSPIVTVEPRRRKFHRPIGLRIPLPPSWTDNPRDSGEGDTTSLRLLCSVIGGTDQAQWEDITGTTKLVYANECANFTTNVSARFWLSDCPRTAEAVNFATLLYKELTAVPYMAKFVIFAKMNDPREGRLRCYCMTDDKVDKTLEQHENFVEVARSRDIEVLEGMSLFAELSGNLVPVKKAAQQRSFHFQSFRENRLAMPVKVRDSSREPGGSLSFLRKAMKYEDTQHILCHLNITMPPCAKGSGAEDRRRTPTPLALRYSILSESTPGSLSGTEQAEMKMAVISEHLGLSWAELARELQFSVEDINRIRVENPNSLLEQSVALLNLWVIREGQNANMENLYTALQSIDRGEIVNMLEGSGRQSRNLKPDRRHTDRDYSLSPSQMNGYSSLQDELLSPASLGCALSSPLRADQYWNEVAVLDAIPLAATEHDTMLEMSDMQVWSAGLTPSLVTAEDSSLECSKAEDSDATGHEWKLEGALSEEPRGPELGSLELVEDDTVDSDATNGLIDLLEQEEGQRSEEKLPGSKRQDDATGAGQDSENEVSLVSGHQRGQARITHSPTVSQVTERSQDRLQDWDADGSIVSYLQDAAQGSWQEEVTQGPHSFQGTSTMTEGLEPGGSQEYEKVLVSVSEHTWTEQPEAESSQADRDRRQQGQEEQVQEAKNTFTQVVQGNEFQNIPGEQVTEEQFTDEQGNIVTKKIIRKVVRQIDLSSADAAQEHEEDHTSTPNP

SEQ ID NO: 53553 - DNA, 5694 bp, Artificial Sequence
  derived and/or modified sequence
atggcccaggccgctaaacagctgaagaagattaaggatattgaagctcaggcacttcaagagcagaaagaaaaagaagagtcaaacaggaagcgccggaaccgcagccgcgaccgcaaaaaaaaagccgacgccgctacatcatttttacgggcggccagatcaggaaacctagataaggccctcgaccacctccgaaacggagtcgatatcaatacctgcaatcagaatggtctgaacgggcttcacctcgcttctaaagaaggacacgtgaagatggttgtggaactcttgcataaagagatcatcctggaaaccaccactaaaaaaggtaatacggcactgcacattgcggcactagcaggtcaggatgaagtggtgcgagagctcgtgaattacggggccaacgttaatgcacagagccagaaaggtttcacacccctttatatggccgcccaggagaaccatctcgaagtcgtcaagtttctgcttgagaacggagcaaatcaaaacgtggccacagaagacggattcactcctctggctgtggcgctccagcaaggtcacgagaacgtcgtcgcacatttgattaattatggaaccaaggggaaggtgcgcttgccagcccttcatattgcagctagaaacgatgataccagaaccgccgcagttctgctgcaaaacgatccgaacccagacgtcctgagcaagaccggctttacacctctgcacatcgccgctcactatgaaaacctgaatgtggcgcaactcctgctgaacaggggagcctcggtgaatttcacacctcagaacggcatcacccctttgcatatcgcttccaggaggggcaatgtgatcatggtgcggctcctcctggacagaggggcgcagattgagaccaagaccaaggatgagctcacccccttgcactgcgccgcgcggaacggacacgtgagaatcagcgagatcctgctggaccatggagcccccatccaagccaagacgaaaaatggattgtcccctattcatatggccgctcagggagatcacctcgactgcgttagactgttactgcagtacgacgctgagatcgatgacatcactttggaccacttgactcccttgcacgttgcagcccattgtggtcatcaccgggttgccaaagtgctgcttgataaaggcgccaaaccaaactcacgtgcattgaatggatttacacctcttcacatagcatgcaaaaagaaccacgtgagagttatggagctgctgttgaagaccggggctagcatcgacgcagttacagagtccggcctgaccccattacatgtggcctccttcatggggcacctgcctatcgtcaagaatctgttgcagcgtggggcgagccctaacgtgagcaatgtcaaagtcgaaacccctctccacatggccgccagagcaggccacaccgaagtcgcgaagtatttgttgcagaataaggcgaaagtgaacgccaaagctaaagatgaccagactccgttacattgcgcagcccggataggccacacaaatatggtgaaactcctcctcgagaacaacgccaatccaaatctggctacaacggcagggcacacccctcttcacatagccgcacgggaaggtcacgtagaaacggtgctcgcactgcttgaaaaagaagctagtcaggcttgcatgacaaaaaaggggtttaccccactgcatgtggccgccaaatacggtaaggtccgggtcgctgagctgctgctggagcgtgacgctcacccaaatgccgcgggaaagaatggtttgacccctcttcatgtggcagtacaccacaataatttggatattgtaaaactcctcctaccacggggaggaagtcctcattcccctgcctggaatggttatacacctctccatattgccgcgaagcaaaatcaggtggaagtggccagatccttactgcagtacggcggctctgctaacgccgagtcagttcaaggagtcacgccactacatttggccgcccaggagggacacgcagagatggtagccttgctgctgtccaagcaggctaacgggaatctggggaacaagtcaggcttaacccccttgcatctggtagcccaggagggtcacgttcctgtggcggatgtcctcataaaacatggagtgatggtggatgccacaacacggatgggttatacacccctgcacgtggcaagtcattacggcaacatcaaattggtcaagtttctgctacagcaccaggccgatgtaaacgctaagactaaactcggttactcaccgctgcaccaagcagcacaacagggtcacacagacattgtgaccctgttgctgaagaatggggcctctcccaatgaggtgagcagtgacgggactacaccccttgctatcgctaagcgcctggggtatatctccgttacagacgttctgaaagtcgtgaccgatgaaacgtcgttcgtgttggtcagtgataaacacaggatgtcttttcccgagactgtggacgagatattggacgtgtcggaggacgaaggcaccgctcatatcaccattatgggtgaggaactgatcagttttaaggccgagcgccgggactcccgggacgtggatgaagagaaagagctactcgatttcgtccctaagttggaccaagtggtggagtcgcccgctatcccaagaataccctgcgctatgccagagacagtggtcatacgtagcgaggagcaggaacaggcttccaaggagtacgatgaggattccctaatcccttccagtccagccaccgagacatcagacaacatttcgcccgtagcgagtccagtgcataccggtttcctagtgtctttcatggtggacgctagaggcggatcaatgaggggttccagacacaacggccttcgagtggtcatcccaccgcgtacttgcgctgctcccacaaggatcacttgtcgattggtgaagcctcaaaagctctcgacccccccccctttggccgaagaggaaggattggcgagcagaattatagcactgggcccaaccggagcgcagtttctgtctcccgttatcgtggaaattccacattttgccagccacgggcgtggcgaccgcgaattggtggttctgcgctccgaaaacgggagcgtctggaaggagcaccggtctagatatggggagtcttacttagaccagattctaaatggaatggacgaagaactgggcagtttggaggagttagaaaaaaaacgagtctgtagaatcatcaccaccgattttcccctctacttcgtcatcatgtctcggctttgtcaagactacgatacaataggacccgaaggcggctcgctgaaaagtaaactggtacctctcgtacaggccacctttccagagaacgctgtcacaaagcgggtgaagctcgctttgcaggcccagcctgtgcccgatgaactggtgaccaagttactgggaaatcaggctacctttagtcctatcgtaaccgtcgagccccggcgccggaaatttcatagaccaataggcctgagaattcctttgcctcctagttggaccgacaatcctcgggatagtggtgaaggagatactacatcgctccgcctgctgtgtagtgtgattggtggtaccgatcaggctcagtgggaagacatcaccggcaccactaagctcgtttacgcaaacgaatgcgccaactttactaccaatgtgagcgccagattctggttgtcagattgtccgcgcactgccgaagctgtgaactttgcaactttactgtacaaggagctgaccgcagttccgtacatggcgaaattcgtcatatttgccaagatgaatgaccctagagagggccgccttcgctgttactgtatgactgatgacaaggtcgataagacgcttgaacaacatgagaattttgtggaggttgcaaggtctcgggacattgaagtgctcgaggggatgtctctctttgctgaactttccggcaatttggtccctgtcaaaaaagcggcccagcagaggagcttccattttcagagctttcgggagaatagattggccatgcccgtgaaggtgagagacagttccagagagccgggggggagcctaagcttccttcgcaaggctatgaagtatgaagatactcagcacattctgtgccacctcaacattacaatgcctccatgtgccaaagggtctggcgcagaggatcggcggagaactccgacgccccttgccttaagatacagcatattgtcagaatccaccccaggatcattgagtggtaccgaacaagcagaaatgaagatggcagtcatcagcgagcatcttggactaagttgggctgagctcgcacgggagctgcagttttctgtggaggatattaacagaatcagagtcgaaaatcctaactcactgttagagcaatctgtggcactgctcaatctgtgggtgattagggaaggacagaacgccaacatggagaacctgtatactgccctgcagagcattgataggggagaaatcgtgaacatgttggagggaagtgggcggcagtcaaggaacttgaagcccgatcggcgccacacggacagagactacagtctgtctcccagtcagatgaacggttactcgtctctgcaggatgaactgctgtcccccgcctctctaggctgtgccctttcgagcccccttagggctgaccaatactggaatgaagtcgctgtgctagacgcgatccccctggcggccaccgagcacgacacaatgctcgaaatgtcagacatgcaggtctggtcagccggcttaacaccaagtctcgtgaccgcagaagatagcagtttagaatgtagcaaggccgaagattccgatgccactggacacgaatggaagctcgaaggagccctgagcgaagagcccaggggaccggagcttgggtctctagaattggtggaggacgacaccgttgatagcgacgctaccaacgggctgatcgatctcctggagcaggaagaaggacagcgcagcgaggaaaagctgccgggtagtaagcgccaggacgacgcaacgggggccggccaagactccgagaatgaggtttccctcgtgtccggccatcagaggggccaggctaggatcacacattctccgaccgtcagtcaagtaaccgaacgttcacaggataggctccaggactgggacgccgacggaagcatcgtttcttatctccaagatgccgcacagggctcttggcaagaagaagttacgcaaggaccccacagtttccaggggacttcaacaatgacggagggcttggaacccggtggctcacaggaatacgagaaggtccttgtctcagtatcggaacatacctggaccgaacagcccgaggctgagtcctcccaagcagaccgcgatcggaggcaacagggtcaagaggagcaggtgcaagaggccaagaacacgtttacccaggttgtacagggcaatgagttccaaaacatcccgggggagcaggtcactgaggagcagttcaccgacgagcaaggaaatatcgtgaccaagaaaatcatcagaaaggtggtgcggcagatcgacctgtcttctgcggatgcagcccaagagcatgaggaagatcacactagcaccccaaatccctag

SEQ ID NO: 53554 - DNA, 5694 bp, Artificial Sequence
  derived and/or modified sequence
atggcccaggccgccaagcagctgaagaagatcaaggacatcgaggcccaggccctgcaggagcagaaggagaaggaggagagcaacaggaagagaagaaacagaagccgggacaggaagaagaaggcagatgctgccaccagcttcctgcgggccgcccggagcggcaacctggacaaggccctggaccacctgagaaatggagtggacatcaacacctgcaaccagaatggcctgaatggcctgcacctggccagcaaggagggccacgtgaagatggtggtggagctgctgcacaaggagatcatcctggagaccaccaccaagaagggcaacacagccctgcacatcgccgccctggccggccaggatgaggtggtgcgggagctggtgaactatggagccaacgtgaatgcccagagccagaagggcttcacccccctgtacatggccgcccaggagaaccacctggaggtggtgaagttcctgctggagaatggagccaaccagaatgtggccacagaagatggcttcacccccctggccgtggccctgcagcagggccatgaaaatgtggtggcccacctgatcaactacggcaccaagggcaaggtgcggctgcctgccctgcacatcgccgccagaaatgatgacaccaggacagctgctgtgctgctgcagaatgaccccaacccagatgtgctgagcaagacaggcttcacccccctgcacatcgccgcccactatgagaacctgaatgtggcccagctgctgctgaacagaggagcctctgtgaacttcaccccccagaatggcatcacccccctgcacatcgccagcagaagaggaaatgtcatcatggtgcggctgctgctggacagaggagcccagatcgagaccaagaccaaggatgagctgacccccctgcactgtgccgccagaaatggacatgtgcgcatcagcgagatcctgctggaccatggagcccccatccaggccaagaccaagaatggcctgagccccatccacatggccgcccagggcgaccacctggactgtgtgcggctgctgctgcagtatgatgctgagattgatgacatcaccctggaccacctgacccccctgcacgtggccgcccactgcggccaccaccgggtggccaaggtgctgctggacaagggggccaagcccaacagccgggccctgaatggcttcacccccctgcacatcgcctgcaagaagaaccacgtgcgggtgatggagctgctgctgaagacaggagccagcattgatgctgtgacagagagcggcctgacccccctgcacgtggccagcttcatgggccacctgcccatcgtgaagaacctgctgcagagaggagccagccccaacgtgtccaatgtgaaggtggagacccccctgcacatggccgcccgggccggccacacagaggtggccaagtacctgctgcagaacaaggccaaggtgaatgccaaggccaaggatgaccagacccccctgcactgtgccgccagaattggccacaccaacatggtgaagctgctgctggagaacaatgccaaccccaacctggccaccacagctggccacacccccctgcacatcgccgcccgggagggccacgtggagaccgtgctggccctgctggagaaggaggccagccaggcctgcatgaccaagaagggcttcacccccctgcacgtggccgccaagtatggcaaggtgcgggtggccgagctgctgctggagagagatgcccaccccaatgctgctgggaagaatggcctgacccccctgcacgtggccgtgcaccacaacaacctggacatcgtgaagctgctgctgccccggggcggcagcccccacagccctgcctggaatggctacacccccctgcacatcgccgccaagcagaaccaggtggaggtggcccggagcctgctgcagtatggaggcagcgccaatgctgagagcgtgcagggcgtgacccccctgcacctggccgcccaggagggccatgctgagatggtggccctgctgctgagcaagcaggccaatggaaacctgggcaacaagagcggcctgacccccctgcacctggtggcccaggagggccacgtgcctgtggctgatgtgctgatcaagcatggagtgatggtggatgccaccaccaggatgggctacacccccctgcacgtggccagccactacggcaacatcaagctggtgaagttcctgctgcagcaccaggctgatgtgaatgccaagaccaagctgggctacagccccctgcaccaggccgcccagcagggccacacagacatcgtgaccctgctgctgaagaatggagccagccccaatgaggtgtccagtgatggcaccacccccctggccatcgccaagaggctgggctacatctctgtgacagatgtgctgaaggtggtgacagatgagaccagctttgtgctggtgtctgacaagcacaggatgtccttccctgagaccgtggatgagatcctggatgtgtctgaagatgagggcacagcccacatcaccatcatgggagaggagctgatctccttcaaggccgagcggcgggacagcagagatgtggatgaggagaaggagctgctggactttgtgcccaagctggaccaggtggtggagagccctgccatcccccgcatcccctgtgccatgcctgagaccgtggtgatccgctctgaggagcaggagcaggccagcaaggagtatgatgaggacagcctcatccccagcagccctgccacagagaccagtgacaacatcagccctgtggccagccctgtgcacacaggcttcctggtgtccttcatggtggatgcccggggcggctccatgaggggcagccgccacaacggcctgcgggtggtgatcccccccaggacctgtgccgcccccacccgcatcacctgccgcctggtgaagccccagaagctgagcaccccaccacccctggccgaggaggagggcctggccagccgcatcatcgccctgggccccaccggggcccagttcctgagccctgtgattgtggagatcccccactttgccagccacggccgcggggaccgggagctggtggtgctgcggagtgaaaatggatctgtgtggaaggagcacaggagccgctatggagagagctacctggaccagatcctgaatggcatggatgaggagctgggcagcctggaggagctggagaagaagagggtgtgccgcatcatcaccacagacttccccctgtacttcgtcatcatgagccggctgtgccaggactatgacaccatcggccctgagggcggcagcctgaagagcaagctggtgcccctggtgcaggccaccttcccagaaaatgctgtgaccaagagggtgaagctggccctgcaggcccagcctgtgcctgatgagctggtgaccaagctgctgggcaaccaggccaccttcagccccatcgtgacagtggagcccaggaggaggaagttccaccggcccatcggcctgcgcatccccctgcccccatcctggacagacaacccccgggacagcggggagggggacaccaccagcctgcggctgctgtgcagcgtcatcggcggcacagaccaggcccagtgggaggacatcaccggcaccaccaagctggtgtatgccaatgaatgtgccaacttcaccaccaacgtgtctgcccgcttctggctgagtgactgccccaggacagctgaggccgtgaactttgccaccctgctgtacaaggagctgacagctgtgccctacatggccaagtttgtgatctttgccaagatgaatgacccccgggagggccgcctgcgctgctactgcatgacagatgacaaggtggacaagaccctggagcagcatgaaaattttgtggaggtggcccggagccgggacatcgaggtgctggagggcatgagcctgtttgctgagctgagcggcaacctggtgcctgtgaagaaggccgcccagcagaggagcttccacttccagagcttcagagaaaatcggctggccatgcctgtgaaggtgcgggacagcagccgggagcccggcggcagcctgtccttcctgaggaaggccatgaagtatgaggacacccagcacatcctgtgccacctgaacatcaccatgccaccctgtgccaagggcagcggggctgaggacagaagaaggacccccacccccctggccctgcgctacagcatcctgtctgagagcaccccaggcagcctgtctggaacagagcaggccgagatgaagatggctgtgatcagcgagcacctgggcctgtcctgggccgagctggcccgggagctgcagttctctgtggaggacatcaaccgcatccgggtggagaaccccaacagcctgctggagcagagcgtggccctgctgaacctgtgggtgatccgggagggccagaatgccaacatggagaacctgtacacagccctgcagagcattgacagaggagagatcgtgaacatgctggagggcagcggccggcagagcaggaacctgaagccagaccggcggcacacagaccgggactacagcctgagccccagccagatgaatggctacagcagcctgcaggatgagctgctgagccctgccagcctgggctgtgccctgagcagccccctgcgggctgaccagtactggaatgaggtggccgtgctggatgccatccccctggccgccacagaacatgacaccatgctggagatgtctgacatgcaggtgtggagcgctggcctgacccccagcctggtgacagctgaggacagcagcctggagtgcagcaaggccgaggacagtgatgccactggacatgagtggaagctggagggcgccctgtctgaggagccccggggccctgagctgggcagcctggagctggtggaggatgacacagtggacagtgatgccaccaacggcctgattgacctgctggagcaggaggagggccagaggtctgaggagaagctgcccggcagcaagaggcaggatgatgccactggagctggccaggacagtgaaaatgaggtgtccctggtgtctggccaccagaggggccaggcccgcatcacccacagccccaccgtgtcccaggtgacagagaggagccaggaccggctgcaggactgggatgctgatggcagcatcgtgtcctacctgcaggatgctgcccagggctcctggcaggaggaggtgacccagggcccccacagcttccagggcaccagcaccatgacagagggcctggagcccggcggcagccaggagtatgagaaggtgctggtgtctgtgtctgagcacacctggacagagcagcctgaggccgagagcagccaggccgaccgggaccggcggcagcagggccaggaggagcaggtgcaggaggccaagaacaccttcacccaggtggtgcagggcaatgagttccagaacatccctggagagcaggtgacagaggagcagttcacagatgagcagggcaacatcgtgaccaagaagatcatcaggaaggtggtgcggcagattgacctgagcagcgcagatgctgcccaggagcacgaggaggaccacaccagcacccccaacccctag

SEQ ID NO: 53555 - DNA, 5694 bp, Artificial Sequence
  derived and/or modified sequence
atggcccaggccgccaagcagctgaagaagatcaaggacatcgaggcccaagcattacaggaacaaaaggaaaaggaggagagcaaccgaaagagaagaaacagatcccgcgatagaaaaaagaaagcggatgcagcaacgtcttttctgagagccgcgcgcagcggcaaccttgacaaagcactagaccatctgcgcaacggagttgacattaatacctgtaaccagaatgggctgaacggactgcacctggctagcaaagaaggacatgtcaaaatggtcgtggaactgctgcataaggagatcattctggagactacaacaaaaaaagggaatacagctctgcacatcgcggctttagcgggacaagatgaggtggtgagagagttggtcaactacggggccaacgtgaacgcgcagtctcaaaagggcttcacacctctgtacatggccgcccaggaaaaccacctcgaggtagtcaagttccttctcgaaaatggtgcaaaccagaacgtagcaacagaagacgggttcactccactggcagtcgccctccagcaggggcatgaaaatgttgttgctcacctgatcaattacgggacaaagggcaaagtgcgactacccgcccttcacatcgctgcacggaacgacgacactcgaacagccgcagtcttgcttcagaacgatcccaacccagatgtgttgagcaagaccggttttacacctctacatattgccgcccattacgagaacctgaacgtggcacagctattactgaaccggggagccagcgtgaattttaccccccagaacggaattaccccgctgcacatcgcctcacgccgtgggaacgtgattatggtacggttgctgctggatcgcggcgctcagattgagacgaaaacaaaagatgagttaacccccctacactgcgccgcccgcaatggacatgttcgcatcagcgaaatcctgctagatcatggcgcacccatccaggcgaaaaccaagaacggactgtcccctattcacatggccgcccagggggatcatctggactgcgtgaggctgctgctccagtacgatgctgagatcgacgacattaccttggatcaccttacccctctgcacgtggccgcccactgcgggcaccacagggttgccaaagttctgctggacaagggcgctaagcctaacagtcgggctttgaatggcttcactccactccacatagcttgcaagaagaaccacgtccgagtgatggagctgcttctcaaaacaggcgcgtccattgatgccgtgactgagagtggtctcaccccactgcatgttgccagcttcatgggacacctgcccatagtgaagaatttgctccagaggggggcatcaccaaatgtcagcaacgtcaaagtggaaacaccactgcatatggcagctcgggcagggcacactgaagtcgccaagtacttgctgcaaaataaggccaaggtaaatgcaaaggctaaggacgaccagacccccttacattgcgctgcccgcatcgggcataccaacatggtcaagttattacttgagaacaatgccaacccaaacttggccacgaccgctggccacactcccttacatatcgccgcccgtgagggccatgttgaaacagttctggccctgctcgagaaggaggcttcccaggcgtgcatgacaaagaagggattcacccctcttcacgtcgcagctaaatacggaaaagtgagagtggcagagttactgctggagagagacgctcaccctaacgcagccggcaaaaatggcttgacccccctgcacgtagccgttcatcataacaacctggatattgtgaaacttctactccctaggggagggagtccccattcccctgcttggaacgggtacacacctctgcacatcgcggcaaagcagaatcaagtggaagtggctcgttctttgcttcagtacggtgggtcagctaacgctgagagcgttcagggcgtcacccctctccacctcgccgcgcaggagggtcatgccgaaatggtcgctctgttgctaagcaaacaggcaaacggaaacctaggaaataaatccggactcaccccattgcatctcgtggcccaggaaggtcacgtcccggttgccgatgtcctgattaagcatggagtcatggtcgatgctacgacccgtatgggatacactcctctgcacgtagcttctcattatgggaacatcaagctggttaagttcctcctacagcaccaggctgacgtaaacgccaagacaaagctgggctacagtcctctgcatcaggccgcacaacagggtcacaccgacatcgttacgttgttgctgaaaaatggcgccagtcccaatgaggtttcatcagatggcacaactcctctggccattgctaagcgcctgggttatatctcagtgaccgatgtgctcaaagtggtgacagacgagacaagctttgtgttggtcagtgacaaacatagaatgtcgttccccgagaccgttgatgagatccttgatgtctccgaggatgaaggcactgcgcacattacgattatgggcgaggagctgatatccttcaaggcagagagacgggattcacgggacgttgacgaggagaaagagttgctcgacttcgttcctaagctggatcaagttgttgaaagccccgccatcccacgcattccctgtgctatgcccgagactgttgtaattaggagtgaggaacaagagcaggcctcgaaagagtatgatgaggactcacttatcccctcttcacccgctacagagacttccgataatatctcacctgttgctagtcccgtccatacaggctttctagtcagctttatggtagatgccaggggcggaagcatgcggggctcaaggcacaacggcttgcgggtggtgatccctccacggacctgcgctgctccaacaaggatcacttgccgtttggtcaagccacagaagctctccacaccaccccccctggccgaagaggaaggactggcatctagaatcatagcgctcggacccaccggagcccagtttctcagtcctgtcattgtggaaattccacactttgcttcacacggtcgcggcgaccgtgagttggtggtgctacgcagtgaaaatggctcggtctggaaagagcaccgaagtcggtacggcgaatcctatcttgaccaaatcctgaacggcatggatgaagaattaggaagcttggaggaattagagaaaaaacgcgtgtgccgaattataaccaccgacttccctctctactttgttatcatgagcagactgtgccaagactacgacaccattggaccagaaggtgggtccctgaagagtaaactggtccctctggtacaggcgacatttcctgaaaatgcagtgactaagcgagtgaaactggcacttcaagcacaacccgtgcccgacgagctggtaacaaaacttctgggtaatcaggctacgttcagccccatcgtcacagttgaaccccggaggcgtaaatttcaccggcctatcggtttgaggatcccactgcctccatcttggacggataacccaagggattctggggaaggtgacacgacgtctctaagactcctatgtagtgtgatcggagggaccgatcaggcccaatgggaggacattacaggaactacgaagctggtgtacgctaacgaatgtgcgaattttaccacaaatgtgtctgccaggttctggctttctgactgcccaagaactgccgaagctgtgaatttcgccacattgctgtataaagagctcacagcagtgccttatatggccaagttcgttattttcgctaagatgaacgaccccagggaagggcggctcaggtgttattgtatgactgacgacaaggtggacaaaacactcgagcaacatgaaaacttcgtcgaggtggcacgttcaagggatatcgaggtgctcgaagggatgagtctgtttgctgagctcagcggtaatctcgttcccgtcaagaaggccgcgcagcagcgatctttccactttcaatcttttcgcgaaaaccggcttgctatgcctgtgaaggtgagggactcatcgcgcgagcccggagggtcgctgagcttcctgcgaaaggctatgaagtatgaagacacacagcatattctctgccacctgaacattaccatgccaccatgcgccaagggttctggtgcagaagaccgacgccgcacccccactccactggccctaagatactccatcctgtcagagtctacgccgggaagcttgagcggcaccgaacaggcagaaatgaagatggctgtaatatctgagcatctcgggttaagctgggccgaactggcccgtgagctgcagttctccgtggaggatataaatcgcatccgggttgaaaacccaaactcattgcttgagcagtccgtagccttgttgaatctctgggtgattagagagggacagaatgcaaatatggaaaatctgtatacagcactccagtctatagacaggggagagattgtcaatatgctggaaggtagcggtagacagtcccgaaatcttaagcccgatcgcagacacacagacagggattattcgttaagtccatcacagatgaacgggtactcgagccttcaagatgaactgcttagccctgcaagtctgggatgcgccctgtccagccccctccgagcggaccagtactggaacgaagtcgcagttctagacgccattcctctggccgccactgagcacgatacaatgttggaaatgagcgacatgcaggtgtggtccgccggattgacaccgagtctggttaccgctgaagactcgtccctggagtgttctaaagccgaggacagcgatgccactggtcatgaatggaaactcgaaggggcactcagcgaggagccccgtggccccgagctcggatcactggaactggtagaagatgatacggtggatagcgacgcaaccaacggactgatcgatctgctggagcaagaggaaggtcagcggtcagaagaaaaactaccggggtccaagagacaagatgacgcaaccggtgctgggcaggacagtgaaaacgaggtgtcattagtgagcggacatcaacgagggcaggccaggatcacccattcaccaaccgtgagccaggtgactgaacgtagtcaggaccgactgcaggattgggacgccgacgggtccatcgtgtcctacctgcaggatgctgcccagggatcgtggcaggaggaggtcactcaaggcccacactcatttcagggaactagcaccatgaccgagggcctggagcctggcggatcccaggaatacgaaaaagttctggtgagcgtgtcagaacacacttggactgagcagccagaggcagagagctcacaggctgacagagaccgccgtcagcagggccaggaggaacaagtgcaggaagcaaagaatactttcacccaggtagtgcagggtaatgaatttcagaatatcccaggagaacaggttaccgaggaacagtttaccgacgagcaaggcaacattgtgaccaagaagatcattagaaaagtggttcgtcagattgatttgtcgtctgccgatgctgcacaggaacacgaagaagatcacacttcaacccccaacccatag

SEQ ID NO: 53556 - DNA, 6379 bp, Artificial Sequence
  derived and/or modified sequence
gggaggcggcgggccctgcccagagcccgtcccgggcgccggcaagcgagctccggccgcggcggcagcgccatcccgggccgcgggcagccgcccctcgccctccgcgtccggaactgccttcgccttcccgcgaccccgcagcagccggccctcggggcgccacgaacgctgtcccctctgtggagcagagacccccttccccttcttagggggtgtcgcctcggggatcgctgagcgctaggggtccaggaggcggggacgggagcgccgtgacccgccatggctcaagcggccaaacagctgaagaaaatcaaagacatcgaggcgcaggccctccaggagcagaaggagaaggaggaatccaacaggaagcggagaaaccgctcccgtgaccgaaagaagaaggccgatgctgctaccagctttctgagagcagcaagatcaggtaacttggacaaagctttggatcacctgcggaatggggtagatattaacacctgtaaccagaatgggttgaatggcttgcatctggcttctaaggaaggccatgtgaaaatggtggttgaacttctgcacaaagaaatcattctagaaacgacaaccaagaaggggaacacggccctgcacatcgctgctctagccgggcaggatgaggtggtccgggagcttgtcaactatggagccaacgtcaacgcccagtcacagaaaggttttacacccctgtacatggcagcacaagagaaccacttggaagtggttaagtttttactggaaaatggagctaaccagaatgtagccacagaagacggcttcacgcctctggcggtagccctgcagcagggccatgagaacgtcgtcgcgcacctcatcaactacggcaccaaggggaaggtgcgcctcccggccctgcacatcgcggcccgcaacgacgacacgcgcacggctgcggtgctgctgcagaacgaccccaacccggacgtgctttccaagacgggattcacgcccctgcacattgcggctcactacgagaacctcaacgtggcccagttgctcctcaacagaggagccagcgtcaatttcacaccacagaacggcatcacgccactgcacatcgcctcccgcaggggcaacgtgatcatggtgcggctgctgctggatcggggagcccagatagaaaccaagaccaaggacgaattgacacctctccactgtgcagctcgaaatgggcacgtgcgaatctcagagatcctgctggaccacggggcaccaatccaagccaaaaccaagaacggcctgtccccaattcacatggcggctcagggagaccacctcgactgtgtccggctcctgttgcaatacgacgcagagatagacgacatcaccctggaccacctgaccccactccacgtggctgcccactgtggacaccacagggtggctaaggtccttctggataaaggggccaaacccaactccagagccctgaatggctttacccccttacacatcgcctgcaaaaagaaccacgtccgtgtcatggagctgctgctgaagacgggagcctcgatcgacgcggtcaccgagtctggcctgacacctctccacgtggcctccttcatggggcaccttcccatcgtgaagaacctcctgcagcggggggcgtcgcccaacgtctccaacgtgaaagtggagaccccgctacacatggcagccagagccgggcacacggaagtggccaaatatttactccagaacaaagccaaagtcaatgccaaggccaaggatgaccagaccccacttcactgtgcagctcgcatcggccacacaaacatggtgaagctcctgctggaaaataacgccaaccccaacctggccaccaccgccgggcacacccccctgcacattgcagcccgtgagggccatgtggaaacagtcctggcccttctggaaaaggaagcatcccaggcctgcatgaccaagaaaggatttacccctctgcacgtggcggccaagtacgggaaggtgcgggtggcagagctgctgctggagcgggacgcacacccgaatgctgccggaaaaaatggcctgacccccctgcacgtggccgtccatcacaacaacctggacatcgtcaagctgctgcttccccggggcggctccccgcacagccctgcctggaatggctacacccctttgcacatcgctgccaagcagaaccaggtggaggtggcccgtagtctgctgcagtatgggggctcagcaaacgccgagtcggtgcaaggtgtgacgccccttcacctggccgcccaggagggccacgcagagatggtggctctgctgctctcgaaacaagccaatggcaacctggggaacaagagcggactcactcccctccatctggtagcacaagaaggccacgttccagtggcagatgtgctgatcaaacacggcgtcatggtggacgccaccacccggatgggctacactcccctccatgtggccagtcactatggaaacatcaagctggtgaagtttctgctgcagcaccaggcagatgtcaatgccaagaccaagctaggatacagccccctgcaccaggcagcccagcagggacacacagacatcgtgactctgcttctgaaaaacggtgcttccccaaacgaggtcagctcggatggaaccacacctctggccatagccaagcgcttgggctacatttctgtcaccgacgtgctcaaggtcgtcacggatgaaaccagtttcgtgttagtcagtgataagcatcgaatgagtttccctgagacagttgatgagatcctggatgtctcggaagatgaaggaactgctcatataactataatgggggaagaactcatcagcttcaaggctgagaggcgggattccagggatgttgatgaagagaaggagctgctggattttgtgccgaagctagaccaagtggtggaatctccagccatccccaggattccctgtgccatgcctgagacagtggtgatcaggtcagaagagcaggagcaggcatctaaagagtatgatgaggactccctcatccccagcagcccggccaccgagacctcagacaacatcagcccggtggccagcccggtgcatacagggtttctggtgagcttcatggttgacgcccggggtggttccatgagaggaagtcgccacaacggcctgcgagtggtgatcccgccacggacgtgcgcagcgcccacccgcatcacctgccgcctggtcaagccccagaagctcagcacgccgcccccactggccgaggaggagggcctggccagcaggatcatagcactggggcccacgggggcacagttcctgagccctgtaatcgtggagatcccgcactttgcctcccatggccgtggagaccgcgagctcgtggttctgaggagcgaaaacggctccgtgtggaaggagcacaggagccgctatggagagagctacctggatcagatcctcaacgggatggacgaagagctggggagcctggaggagctagagaagaagagggtgtgccgaatcatcaccaccgacttcccgctgtacttcgtgatcatgtcacggctctgccaggactacgacaccatcggtcccgaagggggctccctgaagagcaagctggtgcccctggtacaggcaacgttcccggagaatgccgtcaccaagagagtgaagctggctctgcaggcccagcctgtcccggatgagcttgtcactaagctcctgggcaaccaggccacattcagccccattgtcaccgtggagccccggcgccggaagttccaccgccccattgggcttcggatcccactacctccttcctggaccgacaacccgagggacagcggggagggagacaccaccagcctgcgcctgctttgcagcgtcattggaggaacagaccaagcccagtgggaagacataacaggaaccaccaaacttgtatatgccaacgagtgcgccaacttcaccaccaatgtctctgccaggttttggctgtcggactgtcctcggactgctgaggctgtgaactttgccaccctgctgtacaaagagctcactgcagtgccctacatggccaaattcgtcatctttgccaagatgaatgacccccgagaggggcgcctgcgctgctactgcatgacagatgataaagtggacaagaccctggagcagcatgagaacttcgtggaggtggcccggagcagggacatagaggtgttggaaggaatgtccctgtttgcagaactctctgggaacctggtgcctgtgaagaaagctgcccagcagcggagcttccacttccagtcatttcgggagaaccgtctggccatgcctgtaaaggtgagggacagcagtcgagagccgggagggtccctgtcgtttctgcgcaaggcgatgaagtacgaggacacccagcacattctctgccacctgaacatcaccatgcccccctgcgccaagggaagtggagccgaagataggagaaggaccccgacgcccctggccctgcgatacagcattctcagtgagtccacaccaggttctctcagtgggacagagcaggcagagatgaagatggctgttatctcagagcacctcggtctcagctgggcagagttggcccgggagctgcagttcagtgtggaagacatcaacaggatccgagtggaaaatcccaactccctgttggagcagagtgtggccttgctgaacctctgggtcatccgtgaaggccaaaacgcaaacatggagaatctgtacacagccctgcagagcattgaccgtggcgagatcgtgaacatgctggagggttccggccgacagagccgcaacttgaagccagacaggcggcacaccgaccgcgactactcgctgtcaccctcccagatgaatggttactcctcactgcaggacgagctgctgtcccctgcctccctgggctgtgcactttcctctccgctacgtgcagaccagtactggaatgaggtggccgtcctagacgccatccccttggcggccacggagcatgacaccatgctggagatgtctgacatgcaggtgtggtctgcgggcctcacgccttctctggtcactgctgaggactcctctctggagtgtagcaaggctgaggactctgatgccacaggtcacgagtggaagttggagggggcactctcagaggaaccgcggggccccgagttgggctctctggaacttgtggaggacgacacagtggattcagatgccacaaatggccttatcgatttgcttgaacaggaggaaggtcagaggtcagaagagaagctgccaggttctaagaggcaggatgacgcgacaggtgcagggcaggactcagagaatgaagtgtctcttgtttcaggccatcagagggggcaagcccgaatcacacattcccccaccgtgagtcaggtgacggagaggagtcaggacagactgcaggactgggatgcagacggctcgattgtctcatacctgcaagatgctgcacaaggttcctggcaagaggaggtcacgcaaggtccacactcattccagggaacaagtaccatgactgaagggctagagcccggtggatctcaggagtacgagaaggtcctggtgtctgtaagtgagcacacgtggacagaacagcccgaggctgagagctcccaggccgacagggaccggaggcagcaaggccaagaagagcaggtgcaggaggccaagaacaccttcacccaagtggtgcaggggaatgagtttcagaatattccaggggagcaggtgacagaggagcaattcacggatgagcagggcaacattgtcaccaagaagatcattcgcaaggtggttcgacagatagacttgtccagcgccgatgccgcccaggagcacgaggaggatcacacctcgacacccaacccctgaaccccacacactctgccatgcacacaggaggagagctggacctgagggccaccgcagcggtgcacacattcctctgggctgacggcatgacctctgtaagggactcctgctagtcccctcttggcatgaatgactgactgtagacgcatgacctccaggcttcaatcctgcctcttgcaatgacagctgatctgtcggaaccaggacacaaaagcagcaagaagcggggagagagagggatagaaaacaagcgcaggagagcctgcgaacgcaaaagtgaatgagggctttttgtggctggggatgggttttggttttggggttttttttttaaattgttttgacttcgtacagggtactttttcccaacctcatctgtcagaaatccatgtgggcttcctgg

SEQ ID NO: 53557 - DNA, 5694 bp, Artificial Sequence
  derived and/or modified sequence
atggcacaggcagcaaagcagctgaagaaaatcaaggacattgaagcccaggcgctgcaggaacagaaggaaaaagaggagtccaacaggaaaagaaggaaccggagcagagataggaaaaaaaaagccgatgccgcaaccagttttttaagggccgcaaggagtgggaacctcgacaaggcactggaccacctgagaaatggagtagacatcaatacatgcaaccagaacggcctgaacgggcttcatctcgcctccaaggaaggccatgttaaaatggtcgtcgaacttctgcataaggagatcattctggagacaacaaccaaaaaagggaatactgccttacatattgccgctcttgcaggccaagacgaagttgtacgagaacttgtgaactatggagccaacgtgaatgcacagtcacagaaggggtttacaccactctacatggcagctcaagagaaccatctcgaagtggtgaagtttctcctggagaacggggctaatcagaatgtggctacggaggacgggttcacgcctctggccgtggccttacaacagggccatgaaaacgtcgtcgcacacctgattaactacgggacgaagggaaaagtgagacttcccgcactgcacatcgccgctcgtaacgacgatacaaggacagctgctgtcctgctccagaacgatccaaaccccgacgtactgagtaaaactggatttacacccctgcatatcgcagctcactacgagaacctgaacgtggcccagctccttttaaacaggggcgcaagtgtgaacttcaccccccagaacgggatcactccacttcacatagcgtctaggagagggaacgtcatcatggtgaggctgctgctcgaccgtggagctcagatcgaaaccaaaacaaaggacgagctcacaccgctccattgtgctgcacgaaatggccacgtgcgtatctccgaaattctgcttgaccacggcgctcccatacaggcaaaaaccaagaatggtctgtccccaatacacatggctgcacagggagatcacctggactgcgtccgtctcctgctgcagtacgacgctgagatagacgacattacactcgatcaccttactcccttgcacgtggctgctcactgcggacaccatagagtggccaaggtgctcctggacaagggagcgaagccaaacagtcgggcactgaatggttttactcctctccacattgcctgcaaaaaaaaccacgtccgagttatggagctgttgctcaaaaccggtgccagcattgacgcagtcaccgaatcagggttgacacccctgcatgtggcctccttcatgggacatctccctattgtaaagaacctgttacagcgaggagcatccccaaatgtaagcaacgtgaaggtggagacaccgctgcatatggctgctcgagccggtcatactgaggttgcgaagtacttgctgcaaaacaaagccaaggttaacgcaaaagccaaagatgaccagacacctctgcattgcgccgctaggatcggtcatactaacatggtgaaactgctgctcgagaacaacgcaaacccaaacctggccacaaccgctgggcacactcccctgcatatcgccgctcgagaaggccatgtggagacagtgctcgcgctgctggagaaggaggccagccaggcttgtatgactaaaaagggctttacaccccttcatgttgccgctaagtatggcaaggtcagagtcgcggagctcctccttgaacgggatgcccacccaaacgccgctggcaaaaatggattaacccccctccacgtcgccgtgcaccacaataatttggacatcgtgaaactgttgctcccccgtggtggatctccccattccccggcatggaatggatacacccccctccatatcgctgcaaagcaaaaccaggtggaggtggctcgttctctccttcagtatggcggatccgccaatgcagagtcggtgcagggcgttacaccattgcatctcgccgctcaggagggtcacgcagagatggtggccttgctcttgtccaaacaagccaatggaaacctgggcaataaatctgggctgacccctctgcacctcgtggctcaagagggacacgtgcccgttgccgatgtgctcatcaagcatggggtaatggtcgacgcaacaactaggatgggctacacccctttgcacgttgcatcacattatggcaatattaaactcgtgaaatttcttttacagcaccaggcggatgtaaatgccaagaccaagttaggctatagccccctccatcaggctgcacagcagggacacacagatatagtaactctactattgaaaaatggcgcatctcctaacgaggtgtccagcgacggcacaacaccactcgctatcgccaaacggcttggttacatctcggttacggatgtacttaaagttgttaccgatgagacaagctttgtgctggtcagtgacaagcaccgcatgtcattcccggaaacagttgatgaaatacttgacgtctccgaggacgagggcaccgcacacataaccattatgggggaggagctgatcagctttaaggccgagagacgagattcccgtgatgttgacgaagagaaggagctccttgacttcgtgccaaagcttgaccaggtcgtggaaagccctgccataccaagaatcccatgcgccatgcccgagacagtagtgataagatccgaggaacaggaacaggcgagcaaggaatacgacgaggatagcctgatacccagtagcccagccaccgagactagcgacaacatcagcccagtggcatctccagtgcacaccggctttctcgtgtccttcatggttgatgctcgtgggggatctatgaggggctcacgccacaatggcttgagagtggtgataccccctcgaacatgtgctgctcccacaagaataacgtgtaggctcgtgaaaccccaaaaacttagcaccccaccgccactggcagaggaggaaggattggcctcccggattatagcactgggaccaactggtgcacagttcctgtcacctgtaatcgtcgagattccgcatttcgcatctcacgggcgtggagatcgagaactggtcgtactccgctctgagaacgggagcgtgtggaaggaacaccggagccgctatggtgagtcttacctagaccagatcctcaatggtatggacgaggaactggggtcccttgaggagctcgaaaagaaaagagtgtgtcgtatcataaccaccgattttccactctattttgtcataatgtcccgtctgtgccaggactacgacaccataggaccagagggtggcagcctcaagagtaagctggttccccttgtccaagcgaccttcccggagaatgccgttactaaaagagtgaaattagccctgcaggcgcagccagttcctgacgagctagtaacgaaattgttggggaatcaggcgacattctccccgattgtcactgtggaaccaaggcgacgaaagtttcaccgcccaatcgggctgcgaattcctctccctccttcctggaccgataacccacgggattcaggcgagggagatactaccagcctccgcctgctgtgctctgtaatcgggggtactgatcaggcacagtgggaagatatcaccggtaccactaaactcgtgtatgcaaatgagtgtgcgaatttcaccaccaatgtgagtgctcgcttttggctctcagactgtccccgaaccgcagaggccgtaaactttgccacccttctgtataaggaactcactgcagtcccatatatggccaaatttgtgattttcgctaaaatgaacgaccctcgcgagggcagactgaggtgctactgcatgacagacgacaaggttgacaaaactttggaacaacatgaaaactttgtcgaagtggcccgaagcagagatatagaggttctggagggtatgagcctgttcgcagaactgtctggcaatttagtgcccgtaaaaaaagccgcacaacagcggtccttccatttccagagcttccgcgagaaccgacttgcaatgcctgtgaaagttcgggattccagtcgagaacctgggggaagcttgtctttcctgcggaaagccatgaaatacgaagacacacaacatattctctgtcacctcaatattaccatgccaccctgcgctaagggctccggagccgaggatcggcgaaggactccgactccccttgctctaaggtacagtattctctcagagtctacacccggttctctttctgggactgagcaagccgaaatgaaaatggctgtgatctccgagcatttggggctgagttgggctgaactggcgcgtgagctacagttttcagtggaggacattaacaggataagggtggagaacccaaacagcttgttagagcagtccgtcgctctgctaaacttgtgggtgatccgagagggccaaaacgccaacatggagaacctttacaccgccttgcaatccatagaccgtggagagattgttaacatgctagagggtagcggacgccagtctaggaacttgaagccggatcgccgacacactgaccgggattatagtctttcaccctctcagatgaatggatacagctccttgcaggacgaactactttctcccgctagtcttggttgtgccttgtcctcccctcttcgcgctgaccaatattggaacgaggtggccgtgttagatgccattccgctggcagctacagagcatgatacaatgcttgagatgtctgacatgcaggtgtggagcgcgggtctaactccctcgctagtgaccgcagaagacagtagcctcgagtgtagtaaagccgaggactccgatgccactggccatgaatggaaacttgagggagcgttaagtgaagagccacgtggacccgagctgggctcactcgaactggtcgaagatgacacagtggacagcgatgctaccaacggactgattgacttgctggaacaggaggagggccaacgttctgaggagaagcttcccggaagcaaaagacaggacgatgctactggagccggacaggattccgagaatgaggtttctctcgtgagcggccaccaacggggacaagccagaatcactcattcacccacagtttcacaggtgaccgagaggtcccaggaccggctccaggactgggacgcggacggatctatcgtgtcctatctgcaggacgcggctcagggttcttggcaggaagaggttacacaggggcctcattcgtttcagggcacaagtacgatgacagaggggctggaaccgggaggcagccaggagtacgagaaggtgctggtgagcgtctccgaacacacttggactgaacagcctgaagctgagagtagccaggcagaccgggacaggaggcagcagggacaggaggagcaagtgcaggaggctaagaacacattcacacaagtggtgcaaggtaacgagttccagaatattccaggggaacaggtgaccgaggagcaatttactgacgaacagggcaacatcgtgacaaaaaagatcattagaaaggtggtgcggcagattgacctctcaagcgcggatgcagctcaagagcatgaagaagatcacacatcgacccccaatccctar

SEQ ID NO: 53558 - DNA, 5694 bp, Artificial Sequence
  derived and/or modified sequence
atggcccaggccgccaagcagctgaagaagatcaaggacatcgaggcccaggccctgcaggagcagaaggagaaggaggagagcaacagaaagagaagaaacagaagcagagacagaaagaagaaggccgacgccgccaccagcttcctgagagccgccagaagcggcaacctggacaaggccctggaccacctgagaaacggcgtggacatcaacacctgcaaccagaacggcctgaacggcctgcacctggccagcaaggagggccacgtgaagatggtggtggagctgctgcacaaggagatcatcctggagaccaccaccaagaagggcaacaccgccctgcacatcgccgccctggccggccaggacgaggtggtgagagagctggtgaactacggcgccaacgtgaacgcccagagccagaagggcttcacccccctgtacatggccgcccaggagaaccacctggaggtggtgaagttcctgctggagaacggcgccaaccagaacgtggccaccgaggacggcttcacccccctggccgtggccctgcagcagggccacgagaacgtggtggcccacctgatcaactacggcaccaagggcaaggtgagactgcccgccctgcacatcgccgccagaaacgacgacaccagaaccgccgccgtgctgctgcagaacgaccccaaccccgacgtgctgagcaagaccggcttcacccccctgcacatcgccgcccactacgagaacctgaacgtggcccagctgctgctgaacagaggcgccagcgtgaacttcaccccccagaacggcatcacccccctgcacatcgccagcagaagaggcaacgtgatcatggtgagactgctgctggacagaggcgcccagatcgagaccaagaccaaggacgagctgacccccctgcactgcgccgccagaaacggccacgtgagaatcagcgagatcctgctggaccacggcgcccccatccaggccaagaccaagaacggcctgagccccatccacatggccgcccagggcgaccacctggactgcgtgagactgctgctgcagtacgacgccgagatcgacgacatcaccctggaccacctgacccccctgcacgtggccgcccactgcggccaccacagagtggccaaggtgctgctggacaagggcgccaagcccaacagcagagccctgaacggcttcacccccctgcacatcgcctgcaagaagaaccacgtgagagtgatggagctgctgctgaagaccggcgccagcatcgacgccgtgaccgagagcggcctgacccccctgcacgtggccagcttcatgggccacctgcccatcgtgaagaacctgctgcagagaggcgccagccccaacgtgagcaacgtgaaggtggagacccccctgcacatggccgccagagccggccacaccgaggtggccaagtacctgctgcagaacaaggccaaggtgaacgccaaggccaaggacgaccagacccccctgcactgcgccgccagaatcggccacaccaacatggtgaagctgctgctggagaacaacgccaaccccaacctggccaccaccgccggccacacccccctgcacatcgccgccagagagggccacgtggagaccgtgctggccctgctggagaaggaggccagccaggcctgcatgaccaagaagggcttcacccccctgcacgtggccgccaagtacggcaaggtgagagtggccgagctgctgctggagagagacgcccaccccaacgccgccggcaagaacggcctgacccccctgcacgtggccgtgcaccacaacaacctggacatcgtgaagctgctgctgcccagaggcggcagcccccacagccccgcctggaacggctacacccccctgcacatcgccgccaagcagaaccaggtggaggtggccagaagcctgctgcagtacggcggcagcgccaacgccgagagcgtgcagggcgtgacccccctgcacctggccgcccaggagggccacgccgagatggtggccctgctgctgagcaagcaggccaacggcaacctgggcaacaagagcggcctgacccccctgcacctggtggcccaggagggccacgtgcccgtggccgacgtgctgatcaagcacggcgtgatggtggacgccaccaccagaatgggctacacccccctgcacgtggccagccactacggcaacatcaagctggtgaagttcctgctgcagcaccaggccgacgtgaacgccaagaccaagctgggctacagccccctgcaccaggccgcccagcagggccacaccgacatcgtgaccctgctgctgaagaacggcgccagccccaacgaggtgagcagcgacggcaccacccccctggccatcgccaagagactgggctacatcagcgtgaccgacgtgctgaaggtggtgaccgacgagaccagcttcgtgctggtgagcgacaagcacagaatgagcttccccgagaccgtggacgagatcctggacgtgagcgaggacgagggcaccgcccacatcaccatcatgggcgaggagctgatcagcttcaaggccgagagaagagacagcagagacgtggacgaggagaaggagctgctggacttcgtgcccaagctggaccaggtggtggagagccccgccatccccagaatcccctgcgccatgcccgagaccgtggtgatcagaagcgaggagcaggagcaggccagcaaggagtacgacgaggacagcctgatccccagcagccccgccaccgagaccagcgacaacatcagccccgtggccagccccgtgcacaccggcttcctggtgagcttcatggtggacgccagaggcggcagcatgagaggcagcagacacaacggcctgagagtggtgatcccccccagaacctgcgccgcccccaccagaatcacctgcagactggtgaagccccagaagctgagcacccccccccccctggccgaggaggagggcctggccagcagaatcatcgccctgggccccaccggcgcccagttcctgagccccgtgatcgtggagatcccccacttcgccagccacggcagaggcgacagagagctggtggtgctgagaagcgagaacggcagcgtgtggaaggagcacagaagcagatacggcgagagctacctggaccagatcctgaacggcatggacgaggagctgggcagcctggaggagctggagaagaagagagtgtgcagaatcatcaccaccgacttccccctgtacttcgtgatcatgagcagactgtgccaggactacgacaccatcggccccgagggcggcagcctgaagagcaagctggtgcccctggtgcaggccaccttccccgagaacgccgtgaccaagagagtgaagctggccctgcaggcccagcccgtgcccgacgagctggtgaccaagctgctgggcaaccaggccaccttcagccccatcgtgaccgtggagcccagaagaagaaagttccacagacccatcggcctgagaatccccctgccccccagctggaccgacaaccccagagacagcggcgagggcgacaccaccagcctgagactgctgtgcagcgtgatcggcggcaccgaccaggcccagtgggaggacatcaccggcaccaccaagctggtgtacgccaacgagtgcgccaacttcaccaccaacgtgagcgccagattctggctgagcgactgccccagaaccgccgaggccgtgaacttcgccaccctgctgtacaaggagctgaccgccgtgccctacatggccaagttcgtgatcttcgccaagatgaacgaccccagagagggcagactgagatgctactgcatgaccgacgacaaggtggacaagaccctggagcagcacgagaacttcgtggaggtggccagaagcagagacatcgaggtgctggagggcatgagcctgttcgccgagctgagcggcaacctggtgcccgtgaagaaggccgcccagcagagaagcttccacttccagagcttcagagagaacagactggccatgcccgtgaaggtgagagacagcagcagagagcccggcggcagcctgagcttcctgagaaaggccatgaagtacgaggacacccagcacatcctgtgccacctgaacatcaccatgcccccctgcgccaagggcagcggcgccgaggacagaagaagaacccccacccccctggccctgagatacagcatcctgagcgagagcacccccggcagcctgagcggcaccgagcaggccgagatgaagatggccgtgatcagcgagcacctgggcctgagctgggccgagctggccagagagctgcagttcagcgtggaggacatcaacagaatcagagtggagaaccccaacagcctgctggagcagagcgtggccctgctgaacctgtgggtgatcagagagggccagaacgccaacatggagaacctgtacaccgccctgcagagcatcgacagaggcgagatcgtgaacatgctggagggcagcggcagacagagcagaaacctgaagcccgacagaagacacaccgacagagactacagcctgagccccagccagatgaacggctacagcagcctgcaggacgagctgctgagccccgccagcctgggctgcgccctgagcagccccctgagagccgaccagtactggaacgaggtggccgtgctggacgccatccccctggccgccaccgagcacgacaccatgctggagatgagcgacatgcaggtgtggagcgccggcctgacccccagcctggtgaccgccgaggacagcagcctggagtgcagcaaggccgaggacagcgacgccaccggccacgagtggaagctggagggcgccctgagcgaggagcccagaggccccgagctgggcagcctggagctggtggaggacgacaccgtggacagcgacgccaccaacggcctgatcgacctgctggagcaggaggagggccagagaagcgaggagaagctgcccggcagcaagagacaggacgacgccaccggcgccggccaggacagcgagaacgaggtgagcctggtgagcggccaccagagaggccaggccagaatcacccacagccccaccgtgagccaggtgaccgagagaagccaggacagactgcaggactgggacgccgacggcagcatcgtgagctacctgcaggacgccgcccagggcagctggcaggaggaggtgacccagggcccccacagcttccagggcaccagcaccatgaccgagggcctggagcccggcggcagccaggagtacgagaaggtgctggtgagcgtgagcgagcacacctggaccgagcagcccgaggccgagagcagccaggccgacagagacagaagacagcagggccaggaggagcaggtgcaggaggccaagaacaccttcacccaggtggtgcagggcaacgagttccagaacatccccggcgagcaggtgaccgaggagcagttcaccgacgagcagggcaacatcgtgaccaagaagatcatcagaaaggtggtgagacagatcgacctgagcagcgccgacgccgcccaggagcacgaggaggaccacaccagcacccccaacccctag

SEQ ID NO: 53559 - protein, 454 aa, Artificial Sequence
  derived and/or modified sequence
MAGSDTAPFLSQADDPDDGPVPGTPGLPGSTGNPKSEEPEVPDQEGLQRITGLSPGRSALIVAVLCYINLLNYMDRFTVAVFISSYMVLAPVFGYLGDRYNRKYLMCGGIAFWSLVTLGSSFIPGEHFWLLLLTRGLVGVGEASYSTIAPTLIADLFVADQRSRMLSIFYFAIPVGSGLGYIAGSKVKDMAGDWHWALRVTPGLGVVAVLLLFLVVREPPRGAVERHSDLPPLNPTSWWADLRALARNLIFGLITCLTGVLGVGLGVEISRRLRHSNPRADPLVCATGLLGSAPFLFLSLACARGSIVATYIFIFIGETLLSMNWAIVADILLYVVIPTRRSTAEAFQIVLSHLLGDAGSPYLIGLISDRLRRNWPPSFLSEFRALQFSLMLCAFVGALGGAAFLGTAIFIEADRRRAQLHVQGLLHEAGSTDDRIVVPQRGRSTRVPVASVLI

SEQ ID NO: 53560 - DNA, 1365 bp, Artificial Sequence
  derived and/or modified sequence
atggccggcagcgacaccgcccccttcctgagccaggccgacgaccccgacgacggccccgtgcccggcacccccggcctgcccggcagcaccggcaaccccaagagcgaggagcccgaggtgcccgaccaggagggcctgcagagaatcaccggcctgagccccggcagaagcgccctgatcgtggccgtgctgtgctacatcaacctgctgaactacatggacagattcaccgtggccgtgttcatcagcagctacatggtgctggcccccgtgttcggctacctgggcgacagatacaacagaaagtacctgatgtgcggcggcatcgccttctggagcctggtgaccctgggcagcagcttcatccccggcgagcacttctggctgctgctgctgaccagaggcctggtgggcgtgggcgaggccagctacagcaccatcgcccccaccctgatcgccgacctgttcgtggccgaccagagaagcagaatgctgagcatcttctacttcgccatccccgtgggcagcggcctgggctacatcgccggcagcaaggtgaaggacatggccggcgactggcactgggccctgagagtgacccccggcctgggcgtggtggccgtgctgctgctgttcctggtggtgagagagccccccagaggcgccgtggagagacacagcgacctgccccccctgaaccccaccagctggtgggccgacctgagagccctggccagaaacctgatcttcggcctgatcacctgcctgaccggcgtgctgggcgtgggcctgggcgtggagatcagcagaagactgagacacagcaaccccagagccgaccccctggtgtgcgccaccggcctgctgggcagcgcccccttcctgttcctgagcctggcctgcgccagaggcagcatcgtggccacctacatcttcatcttcatcggcgagaccctgctgagcatgaactgggccatcgtggccgacatcctgctgtacgtggtgatccccaccagaagaagcaccgccgaggccttccagatcgtgctgagccacctgctgggcgacgccggcagcccctacctgatcggcctgatcagcgacagactgagaagaaactggccccccagcttcctgagcgagttcagagccctgcagttcagcctgatgctgtgcgccttcgtgggcgccctgggcggcgccgccttcctgggcaccgccatcttcatcgaggccgacagaagaagagcccagctgcacgtgcagggcctgctgcacgaggccggcagcaccgacgacagaatcgtggtgccccagagaggcagaagcaccagagtgcccgtggccagcgtgctgatctag

SEQ ID NO: 53561 - DNA, 1365 bp, Artificial Sequence
  derived and/or modified sequence
atggccggtagcgataccgctccttttctgtctcaggccgacgatccagacgacggtccagtgcctggcacccctgggctgcccggcagtaccggaaatcctaagtccgaagagccagaggtgcctgatcaggaaggactccagaggattacaggactgagtcctggccgcagcgctctgattgtggccgtcctatgctacatcaatctgcttaactacatggaccgtttcacggtggcggtgttcatctcatcatacatggtgttagctcccgtattcggctacttgggcgaccgctataataggaaatatttaatgtgtggtggaatcgccttttggagcttagtgacattaggttctagtttcattcccggtgagcacttctggctcctgctgctgaccaggggcctcgtgggagttggagaggcctcttacagtacaatcgccccaactctgatagccgatttattcgtcgccgatcagaggagtagaatgctcagcatcttctacttcgccatacccgtgggctccggcttgggctacattgccggttccaaagtgaaggacatggccggagactggcattgggccctgcgggtgacacccgggctgggtgtcgtggctgtgctcctgttgttcttggtggtgcgtgagccaccccgcggcgctgtggaaaggcattctgacctgccgccacttaacccaacgtcttggtgggctgatcttcgagccttagccagaaatcttatctttggccttatcacctgcctaaccggagtgctcggtgtgggtctgggggtggagattagtcggcgacttcgtcacagcaatccccgcgccgacccgctcgtttgcgcaactggtctactcgggagcgcacccttcctgtttctgtcacttgcctgtgcgaggggatctatcgtcgccacctatatattcatctttataggcgaaaccctgctgagcatgaactgggcaatcgtcgctgacatcttgttgtacgtggtcatccccaccagacggtctactgcggaggctttccagatagtcctgtctcaccttctgggagatgcaggatcgccatatcttatagggctgatcagcgatcggctccggcggaattggcctcccagtttcctgtctgagttcagagctctgcagttcagcttgatgctgtgtgcctttgtcggcgcactggggggagccgctttcttgggaaccgccatcttcatagaggcagaccgaagaagggcgcagctccacgtgcaaggtctgctccacgaagccggcagcacagatgatagaatcgtagtgccccagcgcggacgaagtacacgcgttcctgttgcatctgtgcttatctag

SEQ ID NO: 53562 - DNA, 1365 bp, Artificial Sequence
  derived and/or modified sequence
atggccggcagtgacacagcccccttcctgagccaggctgatgatcctgatgatggccctgtgcccggcaccccaggcctgcccggcagcactggaaaccccaagtctgaggagcctgaggtgcctgaccaggagggcctgcagaggatcaccggcctgagccctggccgcagcgccctgattgtggccgtgctgtgctacatcaacctgctgaactacatggaccgcttcaccgtggccgtgttcatcagcagctacatggtgctggcccctgtgtttggctacctgggggaccgctacaacaggaagtacctgatgtgtggcggcatcgccttctggagcctggtgaccctgggcagcagcttcatccctggagagcacttctggctgctgctgctgacccggggcctggtgggcgtgggggaggccagctacagcaccatcgcccccaccctgattgctgacctgtttgtggccgaccagaggagcaggatgctgagcatcttctactttgccatccctgtgggcagcggcctgggctacatcgccggcagcaaggtgaaggacatggccggggactggcactgggccctgcgggtgaccccaggcctgggcgtggtggccgtgctgctgctcttcctggtggtgcgggagcccccaagaggagctgtggagcggcacagcgacctgccccccctgaaccccacctcctggtgggccgacctgcgggccctggccaggaacctgatcttcggcctcatcacctgcctgactggagtgctgggcgtgggcctgggcgtggagatcagccggcggctgcggcacagcaaccccagggctgaccccctggtgtgtgccaccggcctgctgggcagcgcccccttcctgttcctgagcctggcctgtgcccggggcagcatcgtggccacctacatcttcatcttcatcggggagaccctgctgtccatgaactgggccatcgtggccgacatcctgctgtatgtggtgatccccacccggcgcagcacagctgaggccttccagatcgtgctgagccacctgctgggagatgctggcagcccctacctgattggcctcatcagtgaccggctgcggaggaactggccacccagcttcctgtctgagttccgggccctgcagttcagcctgatgctgtgtgcctttgtgggcgccctgggcggggccgccttcctgggcacagccatcttcattgaagctgacagaagaagagcccagctgcacgtgcagggcctgctgcatgaagctggcagcacagatgaccgcatcgtggtgccccagaggggccgcagcaccagggtgcctgtggcctctgtgctgatctag

SEQ ID NO: 53563 - DNA, 1365 bp, Artificial Sequence
  derived and/or modified sequence
atggccggcagcgacaccgcccccttcctgagccaggccgacgaccctgatgacggacccgtgcctggaacaccaggactccctggctcaactggaaacccaaagtcggaggagcccgaagtgccagatcaggaggggctacagagaatcaccggactgtctccaggacgtagcgccctgatcgtggcagttctctgttatataaatttattgaactacatggatcgtttcaccgttgctgtctttattagctcctacatggtgttggcacccgtctttggttacttaggggataggtacaataggaagtacctaatgtgcggcggtatcgcattctggagtcttgtgacactgggctctagcttcattcctggagagcacttttggctgttactactgactcgggggcttgtcggggtgggagaagcatcctactccacgattgccccgacattgattgccgatttattcgtggcggaccagcggagtagaatgctttccatcttctactttgccattcctgtgggctccggtttgggctacatcgccggatcaaaagttaaggacatggcgggagattggcactgggccttgcgagtgacacccgggcttggagtggtggccgtactgctactgttcctcgtggtgcgtgagccacctcgcggagccgtggagagacatagtgatctccctccccttaacccgacatcctggtgggctgacctgagggccctggcccggaacctgattttcggtctcatcacttgtctgactggtgtcctgggtgtgggcctgggggttgagatctccagacgactaagacactccaatcctcgggctgaccctttggtatgtgccaccggccttctgggctcagccccttttctgttcctttcccttgcttgcgcgcgggggagcatcgtggcgacatacatttttatattcattggggaaaccctactctctatgaactgggccatagtagccgacattctgctgtacgtggtgattcctacccgtcggagcaccgctgaggcctttcaaattgtattgagtcacctgttgggcgacgcagggtccccctatcttatcggcctgatctcagacaggcttcggcgcaattggccacctagcttccttagcgaatttcgtgctctgcagttttccctaatgctatgcgcattcgtgggggctcttggaggagccgctttcctaggcacagcaatctttatcgaggcagacaggaggagagcccagctacacgtacaagggttactgcatgaagccggaagtactgatgaccgcattgtcgtgccccagaggggacggtccaccagagtgcccgtggcctcagttcttatttag

SEQ ID NO: 53564 - DNA, 1365 bp, Artificial Sequence
  derived and/or modified sequence
atggctggatcagacacggcgcctttccttagccaggctgacgatccagacgacggcccagtccccggaacacccggtctgcccggttcaaccggtaaccccaaaagcgaagaacccgaggtgcctgatcaggagggcctgcagcgtattacgggattgtcacctggtagaagtgccctcattgtcgccgtcctctgctacattaacctcttgaactacatggacaggttcactgtcgcagtcttcatcagttcctatatggtgctcgcccctgttttcggctacttaggggatcgttacaatcgcaaatacctgatgtgcggagggatcgctttttggtccctcgtgacactgggctcgtcctttatcccaggagagcacttctggctcctcttgttaactcgtggtcttgtgggcgtgggagaagccagctactcaaccatagctccaacgctgatcgctgatctgtttgtcgcagaccaaagatcccgtatgctttctatcttttacttcgcaatacccgttgggtcagggctcggatatatagccggatcaaaagtaaaggacatggccggagactggcattgggccctccgagtcacccctggccttggggttgtggcagtcttactcctctttcttgtggtacgagaaccgccaaggggagctgtggagagacacagcgacttaccacctctaaacccaacctcatggtgggccgacctgcgagctctggcgaggaatttgattttcggccttattacatgtctgacaggggtcctcggagtggggttgggggtcgagataagtaggagactgcggcacagcaaccccagggctgaccctttggtttgcgctactggcctcttggggtctgccccattcctgttcctttcgctggcatgtgctcgcggaagcattgtggcaacatacatattcatcttcataggagagacactcctgtccatgaactgggctattgttgctgatatactgctgtacgtcgtgattccaactcgtagatccacggccgaggcctttcagatcgtgctgagccatctgctgggagatgctggctcaccctaccttattgggttgattagcgatcgcctgcgcagaaattggccacccagcttcttgagtgagtttcgggcattacagtttagcctcatgctgtgtgccttcgtgggggcactcggcggagccgcattcttgggcacagccatcttcattgaggctgaccggcgtcgcgcacagctccatgtgcaggggctcctgcacgaggccggatctactgatgatcggattgtcgtgccacaaaggggccgaagtactcgcgtgccagtggcctctgttctaatctag

SEQ ID NO: 53565 - protein, 455 aa, Artificial Sequence
  derived and/or modified sequence
MDRFTVAGVLPDIEQFFNIGDSSSGLIQTVFISSYMVLAPVFGYLGDRYNRKYLMCGGIAFWSLVTLGSSFIPGEHFWLLLLTRGLVGVGEASYSTIAPTLIADLFVADQRSRMLSIFYFAIPVGSGLGYIAGSKVKDMAGDWHWALRVTPGLGVVAVLLLFLVVREPPRGAVERHSDLPPLNPTSWWADLRALARNPSFVLSSLGFTAVAFVTGSLALWAPAFLLRSRVVLGETPPCLPGDSCSSSDSLIFGLITCLTGVLGVGLGVEISRRLRHSNPRADPLVCATGLLGSAPFLFLSLACARGSIVATYIFIFIGETLLSMNWAIVADILLYVVIPTRRSTAEAFQIVLSHLLGDAGSPYLIGLISDRLRRNWPPSFLSEFRALQFSLMLCAFVGALGGAAFLGTAIFIEADRRRAQLHVQGLLHEAGSTDDRIVVPQRGRSTRVPVASVLI

SEQ ID NO: 53566 - DNA, 1368 bp, Artificial Sequence
  derived and/or modified sequence
atggacagattcaccgtggccggcgtgctgcccgacatcgagcagttcttcaacatcggcgacagcagcagcggcctgatccagaccgtgttcatcagcagctacatggtgctggcccccgtgttcggctacctgggcgacagatacaacagaaagtacctgatgtgcggcggcatcgccttctggagcctggtgaccctgggcagcagcttcatccccggcgagcacttctggctgctgctgctgaccagaggcctggtgggcgtgggcgaggccagctacagcaccatcgcccccaccctgatcgccgacctgttcgtggccgaccagagaagcagaatgctgagcatcttctacttcgccatccccgtgggcagcggcctgggctacatcgccggcagcaaggtgaaggacatggccggcgactggcactgggccctgagagtgacccccggcctgggcgtggtggccgtgctgctgctgttcctggtggtgagagagccccccagaggcgccgtggagagacacagcgacctgccccccctgaaccccaccagctggtgggccgacctgagagccctggccagaaaccccagcttcgtgctgagcagcctgggcttcaccgccgtggccttcgtgaccggcagcctggccctgtgggcccccgccttcctgctgagaagcagagtggtgctgggcgagacccccccctgcctgcccggcgacagctgcagcagcagcgacagcctgatcttcggcctgatcacctgcctgaccggcgtgctgggcgtgggcctgggcgtggagatcagcagaagactgagacacagcaaccccagagccgaccccctggtgtgcgccaccggcctgctgggcagcgcccccttcctgttcctgagcctggcctgcgccagaggcagcatcgtggccacctacatcttcatcttcatcggcgagaccctgctgagcatgaactgggccatcgtggccgacatcctgctgtacgtggtgatccccaccagaagaagcaccgccgaggccttccagatcgtgctgagccacctgctgggcgacgccggcagcccctacctgatcggcctgatcagcgacagactgagaagaaactggccccccagcttcctgagcgagttcagagccctgcagttcagcctgatgctgtgcgccttcgtgggcgccctgggcggcgccgccttcctgggcaccgccatcttcatcgaggccgacagaagaagagcccagctgcacgtgcagggcctgctgcacgaggccggcagcaccgacgacagaatcgtggtgccccagagaggcagaagcaccagagtgcccgtggccagcgtgctgatctag

SEQ ID NO: 53567 - DNA, 1368 bp, Artificial Sequence
  derived and/or modified sequence
atggatcggtttacagtagccggagtattacccgacattgagcagttcttcaacattggggactcttcttcagggttgatccagaccgtgttcataagcagctatatggtcctggctcctgtgtttggctatcttggcgataggtacaaccggaaatatctcatgtgcgggggaatcgcattctggtctctcgtcaccctagggtctagttttatacctggcgagcatttctggttacttttactgactcgtggtctggtgggagtgggagaggcttcctacagcaccattgctcccacactgatcgcggacctcttcgtggccgaccagcggtcaaggatgctttcgattttttacttcgcgattcctgtgggctccgggttaggctatatcgccggctccaaagtaaaggacatggccggcgactggcactgggcactgcgggtcacacctggccttggagtagtcgcagtgctgctgctctttctagtggtgcgagaacctccacggggcgcggtcgagcgacacagtgacctgcctcccctgaaccctacctcatggtgggctgatcttcgcgcgcttgcacgaaatccctcttttgtgctgtcttctttgggcttcacagcggttgctttcgtgactggaagcctcgctctgtgggctcctgcatttttgttgaggagtcgagttgttcttggagagacaccaccttgcctgcccggcgactcatgcagttcttcagatagcttgattttcgggctgatcacgtgcctgacaggcgttctgggagtgggtctgggggtggagatttcccgcaggttacggcacagcaacccaagggcggatcccctcgtgtgtgccaccggtctgctgggttcagccccatttctcttcctgtcgttagcttgtgcccgcggtagcatcgtagctacgtatatatttatctttattggagagacgcttctgagcatgaattgggcgatcgtcgccgacattctgctgtacgttgtcattccaacgcggcggtcgacggcagaagcctttcagatagtgctcagccacctccttggcgacgctggaagtccatacctgataggcctgatttccgatcgcctcaggcgcaactggccacccagttttttgtctgagttcagagccctccaatttagtctaatgctgtgtgcctttgtcggcgccctcggcggcgcagccttccttggcactgcgatctttatagaggccgataggcgaagagcccagctgcatgttcagggattattacacgaggctgggtccacggatgataggatagtcgtgccccaaagaggaaggtccacacgggttcctgtggccagtgtgcttatctag

SEQ ID NO: 53568 - DNA, 1368 bp, Artificial Sequence
  derived and/or modified sequence
atggaccgcttcaccgtggccggcgtgctgcctgacatcgagcagttcttcaacattggagacagcagcagcggcctcatccagacagtgttcatcagcagctacatggtgctggcccctgtgtttggctacctgggggaccgctacaacaggaagtacctgatgtgtggcggcatcgccttctggagcctggtgaccctgggcagcagcttcatccctggagagcacttctggctgctgctgctgacccggggcctggtgggcgtgggggaggccagctacagcaccatcgcccccaccctgattgctgacctgtttgtggccgaccagaggagcaggatgctgagcatcttctactttgccatccctgtgggcagcggcctgggctacatcgccggcagcaaggtgaaggacatggccggggactggcactgggccctgcgggtgaccccaggcctgggcgtggtggccgtgctgctgctcttcctggtggtgcgggagcccccaagaggagctgtggagcggcacagcgacctgccccccctgaaccccacctcctggtgggccgacctgcgggccctggccaggaaccccagctttgtgctgagcagcctgggcttcaccgctgtggcctttgtgacaggcagcctggccctgtgggccccagccttcctgctgcggagccgggtggtgctgggggagaccccaccctgcctgcccggggacagctgcagcagcagtgacagcctcatcttcggcctcatcacctgcctgactggagtgctgggcgtgggcctgggcgtggagatcagccggcggctgcggcacagcaaccccagggctgaccccctggtgtgtgccaccggcctgctgggcagcgcccccttcctgttcctgagcctggcctgtgcccggggcagcatcgtggccacctacatcttcatcttcatcggggagaccctgctgtccatgaactgggccatcgtggccgacatcctgctgtatgtggtgatccccaccaggaggagcacagctgaggccttccagatcgtgctgagccacctgctgggagatgctggcagcccctacctgattggcctcatcagtgaccggctgcggaggaactggcccccatccttcctgtctgagttccgggccctgcagttcagcctgatgctgtgtgcctttgtgggcgccctgggcggggccgccttcctgggcacagccatcttcatcgaggccgacagaagaagagcccagctgcacgtgcagggcctgctgcacgaggccggcagcacagatgacagaattgtggtgccccagaggggccgcagcaccagggtgcctgtggcctctgtgctgatctag

SEQ ID NO: 53569 - DNA, 1368 bp, Artificial Sequence
  derived and/or modified sequence
atggaccggttcaccgtggccggcgtgctgcccgacatcgagcagttcttcaatataggggacagcagttccggactaatccagacagtgtttatctcctcctatatggtcttggcaccagtcttcggctatttgggcgatcgctacaatcgaaaatacctaatgtgtggcggcatcgccttctggtctctcgtcactctgggatcatctttcattcccggagagcatttttggcttctgctcctgacgagaggcctggtcggggtgggagaggcctcttactcaacaatcgctccaacgcttatcgcggatcttttcgtggccgatcagcgctccagaatgctgtccatattttatttcgcaatccctgttggctctggcttgggttatatcgcaggttccaaggtgaaggatatggccggtgattggcattgggcactcagggtgacccctggacttggcgttgtggcggtactgttgctgttcctcgttgtgcgagaaccgcctaggggcgccgtcgagcgccactcagacctcccccccctgaatccaacatcttggtgggcggatcttcgtgctttggccaggaatcccagcttcgtgctgtcttctctgggctttactgccgttgcttttgtgacaggcagtctggccctgtgggcccctgctttcctgctaaggagtagagtggtgctgggtgagacccctccctgcctgcccggcgattcttgttcttcctccgattcactgatttttggcttaataacatgtctcactggcgtgctcggtgtaggcctcggggtggaaatatcccggcgcttgcgtcattctaacccccgcgccgaccccctggtgtgcgccactggtctgctgggatccgccccgttcctgttcctgtcactggcttgtgccagaggctccattgtagccacatacatattcatatttatcggcgaaaccctcctgagtatgaattgggcaatagttgccgatatcctattgtacgtggtaatacctacaagacggagtacggccgaggcgtttcagatcgtgctgtctcatctacttggagacgccggttccccctaccttatcggcctgatcagcgatcgattgagacgcaactggcctccctccttccttagcgagtttcgtgccctgcagttctcgctgatgctgtgtgcattcgtgggggcactaggtggggctgcatttctcggaacagctatctttatcgaagctgataggaggcgggcacagcttcacgtccaagggttgctgcacgaagccggttctaccgatgaccgcatagtggtccctcagaggggtcggtccactagagtcccagtcgcttcagtcctgatctag

SEQ ID NO: 53570 - DNA, 1368 bp, Artificial Sequence
  derived and/or modified sequence
atggacagatttaccgtcgcgggtgttcttcctgacatcgagcagttcttcaatatcggcgattcaagcagcggtctgattcagacagtctttatatcttcttacatggtgctggcgccagtgttcgggtacctcggtgaccgctataacaggaagtatctgatgtgcggcggaattgccttttggtccctggttacgctgggcagctcttttataccgggagagcacttctggctcctactgctgacacggggactggtcggggttggtgaagcctcttactcgaccattgccccaacattaatagctgacctgtttgtggccgaccagagatcccggatgctgtcaatcttttatttcgctattcctgtgggctctggtctgggctacatcgcaggttctaaagttaaagacatggctggcgactggcactgggctctccgggtcacgccaggactgggagtcgttgcggtcctgctgttatttcttgttgttagagaaccccctagaggggctgtggagcgtcattcagacctgcccccactcaatcccaccagttggtgggccgacctcagggccctagctcgtaatccttcctttgttttgtcgagtctgggcttcaccgccgtggctttcgtgacgggcagtctggctttgtgggcacctgctttcctcctgagaagccgagtggtgctcggtgaaacgccgccatgcttaccgggagatagctgtagttcttccgactctcttatttttggtttaatcacatgcctgacaggagttctcggggtgggcctgggggtggaaatatcgagacgcctaagacatagcaacccacgagccgatccgctcgtgtgcgctacaggactgctcggctcggctccattcctctttttaagcctggcttgtgcacgaggttctatagtggccacatatattttcattttcattggggagactctgctgagcatgaactgggccattgtggcagatattttactctatgtcgtcattcctactagacgtagcacagccgaggcctttcagattgtgctttctcacttgctaggagacgcaggatccccgtatttgatcggtctgatttcagatagactcagacgcaactggcccccttcattcctttctgagttccgtgctcttcagttctcactgatgctgtgcgcgttcgtgggggctctcggaggcgcagcctttttgggtacggccatcttcatcgaggccgacagacggagagcacagcttcacgtgcaaggcctgctgcatgaagcaggctccacggacgaccggatcgtggtcccccagagggggagatccactagagtgcctgtggctagtgtacttatctag

SEQ ID NO: 53571 - protein, 476 aa, Artificial Sequence
  derived and/or modified sequence
MAGSDTAPFLSQADDPDDGPVPGTPGLPGSTGNPKSEEPEVPDQEGLQRITGLSPGRSALIVAVLCYINLLNYMDRFTVAGVLPDIEQFFNIGDSSSGLIQTVFISSYMVLAPVFGYLGDRYNRKYLMCGGIAFWSLVTLGSSFIPGEHFWLLLLTRGLVGVGEASYSTIAPTLIADLFVADQRSRMLSIFYFAIPVGSGLGYIAGSKVKDMAGDWHWALRVTPGLGVVAVLLLFLVVREPPRGAVERHSDLPPLNPTSWWADLRALARNLIFGLITCLTGVLGVGLGVEISRRLRHSNPRADPLVCATGLLGSAPFLFLSLACARGSIVATYIFIFIGETLLSMNWAIVADILLYVVIPTRRSTAEAFQIVLSHLLGDAGSPYLIGLISDRLRRNWPPSFLSEFRALQFSLMLCAFVGALGGAAFLGTAIFIEADRRRAQLHVQGLLHEAGSTDDRIVVPQRGRSTRVPVASVLI

SEQ ID NO: 53572 - DNA, 1431 bp, Artificial Sequence
  derived and/or modified sequence
atggccggcagcgacaccgcccccttcctgagccaggccgacgaccccgacgacggccccgtgcccggcacccccggcctgcccggcagcaccggcaaccccaagagcgaggagcccgaggtgcccgaccaggagggcctgcagagaatcaccggcctgagccccggcagaagcgccctgatcgtggccgtgctgtgctacatcaacctgctgaactacatggacagattcaccgtggccggcgtgctgcccgacatcgagcagttcttcaacatcggcgacagcagcagcggcctgatccagaccgtgttcatcagcagctacatggtgctggcccccgtgttcggctacctgggcgacagatacaacagaaagtacctgatgtgcggcggcatcgccttctggagcctggtgaccctgggcagcagcttcatccccggcgagcacttctggctgctgctgctgaccagaggcctggtgggcgtgggcgaggccagctacagcaccatcgcccccaccctgatcgccgacctgttcgtggccgaccagagaagcagaatgctgagcatcttctacttcgccatccccgtgggcagcggcctgggctacatcgccggcagcaaggtgaaggacatggccggcgactggcactgggccctgagagtgacccccggcctgggcgtggtggccgtgctgctgctgttcctggtggtgagagagccccccagaggcgccgtggagagacacagcgacctgccccccctgaaccccaccagctggtgggccgacctgagagccctggccagaaacctgatcttcggcctgatcacctgcctgaccggcgtgctgggcgtgggcctgggcgtggagatcagcagaagactgagacacagcaaccccagagccgaccccctggtgtgcgccaccggcctgctgggcagcgcccccttcctgttcctgagcctggcctgcgccagaggcagcatcgtggccacctacatcttcatcttcatcggcgagaccctgctgagcatgaactgggccatcgtggccgacatcctgctgtacgtggtgatccccaccagaagaagcaccgccgaggccttccagatcgtgctgagccacctgctgggcgacgccggcagcccctacctgatcggcctgatcagcgacagactgagaagaaactggccccccagcttcctgagcgagttcagagccctgcagttcagcctgatgctgtgcgccttcgtgggcgccctgggcggcgccgccttcctgggcaccgccatcttcatcgaggccgacagaagaagagcccagctgcacgtgcagggcctgctgcacgaggccggcagcaccgacgacagaatcgtggtgccccagagaggcagaagcaccagagtgcccgtggccagcgtgctgatctag

SEQ ID NO: 53573 - DNA, 1431 bp, Artificial Sequence
  derived and/or modified sequence
atggccggcagcgatactgcgccgtttctgagtcaggctgatgatcccgacgatgggccagtccccgggaccccagggctgcccgggtccaccggaaatcccaaaagtgaagaacccgaggtgcctgatcaggaggggctgcaacgaatcaccggcctgtctcccggacgctctgccctcatcgttgcggttttatgctatatcaatctcctcaattatatggacagattcaccgtggctggagtgcttcctgacatcgaacagtttttcaatataggcgactcctctagcgggcttatccagacagtgtttatctctagctatatggtcttagcccctgtttttggctacctgggcgatcgttacaatagaaagtatctaatgtgtgggggtatcgcgttctggtcgctggttacacttggaagctccttcattcctggggagcatttttggctgctactcctgactaggggccttgtgggggtcggagaggcgagttattctacaatagccccaacactgattgccgacctgttcgtagcagaccagagaagccgtatgttatcaattttttacttcgccatccccgttggatccggtcttgggtacatcgctggttctaaggtgaaggacatggcaggtgactggcactgggccctcagggtcacccccggtctcggcgtcgttgcggtgcttcttttatttctcgttgtcagagaaccaccacggggggccgtggagcgacacagcgatttgcccccgttgaacccgacttcctggtgggctgatctgcgtgccctcgccagaaatctgatctttggtctcatcacttgtctgactggggtactgggtgtgggcttgggggtggagatcagccggagactgcgccactccaatccccgagctgacccattagtgtgcgcaactggcctacttggctcagccccattcctcttcctgtcgcttgcctgtgcgagagggagcatcgtagccacctacattttcattttcataggtgagacacttctgagtatgaattgggcaatagtcgcggatatcctcctctatgttgtgataccgactaggagatctactgccgaggcctttcagattgtcttaagtcatctgttgggggatgcaggttcgccttatctgataggcttgattagtgacaggctgaggcggaattggcctccgtcctttcttagcgagttcagagcattgcaattcagtctgatgttgtgcgccttcgtgggggctctaggaggcgccgcttttttaggcactgcgattttcattgaggctgaccgccgcagagctcagctgcacgtgcagggactgctgcacgaggcagggtccactgatgatagaatcgttgtcccccaaaggggtcggtctacacgggtacccgtggccagcgtgcttatttag

SEQ ID NO: 53574 - DNA, 1431 bp, Artificial Sequence
  derived and/or modified sequence
atggccggcagtgacacagcccccttcctgagccaggctgatgatcctgatgatggccctgtgcccggcaccccaggcctgcccggcagcactggaaaccccaagtctgaggagcctgaggtgcctgaccaggagggcctgcagaggatcaccggcctgagccctggccgcagcgccctgattgtggccgtgctgtgctacatcaacctgctgaactacatggaccgcttcaccgtggccggcgtgctgcctgacatcgagcagttcttcaacatcggggacagcagcagcggcctcatccagaccgtcttcatcagcagctacatggtgctggcccctgtgtttggctacctgggggaccgctacaacaggaagtacctgatgtgtggcggcatcgccttctggagcctggtgaccctgggcagcagcttcatccctggagagcacttctggctgctgctgctgacccggggcctggtgggcgtgggggaggccagctacagcaccatcgcccccaccctgattgctgacctgtttgtggccgaccagaggagcaggatgctgagcatcttctactttgccatccctgtgggcagcggcctgggctacatcgccggcagcaaggtgaaggacatggccggggactggcactgggccctgcgggtgaccccaggcctgggcgtggtggccgtgctgctgctcttcctggtggtgcgggagcccccaagaggagctgtggagcggcacagcgacctgccccccctgaaccccacctcctggtgggccgacctgcgggccctggccaggaacctgatcttcggcctcatcacctgcctgactggagtgctgggcgtgggcctgggcgtggagatcagccggcggctgcggcacagcaaccccagggctgaccccctggtgtgtgccaccggcctgctgggcagcgcccccttcctgttcctgagcctggcctgtgcccggggcagcatcgtggccacctacatcttcatcttcatcggggagaccctgctgtccatgaactgggccatcgtggccgacatcctgctgtatgtggtgatccccacccggcgcagcacagctgaggccttccagatcgtgctgagccacctgctgggagatgctggcagcccctacctgattggcctcatcagtgaccggctgcggaggaactggccacccagcttcctgtctgagttccgggccctgcagttcagcctgatgctgtgtgcctttgtgggcgccctgggcggggccgccttcctgggcacagccatcttcattgaagctgacagaagaagagcccagctgcacgtgcagggcctgctgcatgaagctggcagcacagatgaccgcatcgtggtgccccagaggggccgcagcaccagggtgcctgtggcctctgtgctgatctag

SEQ ID NO: 53575 - DNA, 1431 bp, Artificial Sequence
  derived and/or modified sequence
atggccggcagcgacaccgcccccttcctgagccaggccgacgacccagacgacggtcctgtgccagggactccaggcctccctggaagtactggaaaccctaagtcagaggagccagaggtgcccgatcaggagggtctgcagcgtatcaccggcctgtccccgggaagaagcgctctgatcgttgccgtgctgtgctacatcaacctgctgaactatatggatagatttaccgtggctggcgtgctgcccgacatcgagcagtttttcaatatcggggacagcagctccggcctgatacagacagtgttcatcagttcttatatggtcctagcacctgttttcggatacctcggcgaccgttacaacagaaagtacctcatgtgcggaggcatcgcattttggtcactggtgacgctgggaagctcctttatacccggggaacatttttggttattgctgctaaccagagggctggtgggagtcggcgaggcctcatattccacaattgccccgaccctgatcgcagacctgttcgtagccgatcagcgcagccgtatgctgagtatcttttattttgctattcccgtggggagcgggctggggtacatcgctggatccaaggtgaaagatatggccggggactggcattgggctttgcgcgtcacgcctgggcttggcgtggtggccgtccttttgctgttcttagtagtccgggagcctccccgaggagccgtcgaacggcatagcgacctgccgcctctgaatcctacctcctggtgggctgaccttcgcgctctggcccgcaacctgatctttggtctcataacttgcctaacgggcgtactgggcgtaggccttggagtggaaatctctcgtaggctgcggcattctaatccccgggccgatcctttggtgtgcgcaaccgggctcctggggagcgccccttttctcttcctgtcacttgcctgcgccagggggagcatcgtcgccacatacatattcatttttattggagagacactactgtctatgaactgggccattgtagccgatattctgctctatgtagtgatccccacaagacgaagcactgcagaagcgttccagatcgttctgtctcacctcctgggcgacgccgggagcccgtacctgatcggcttgatatcagatcgcttgaggaggaattggccaccaagttttttgtccgaatttagggcactacaattctctctcatgttgtgtgcatttgtcggcgcattaggaggggcagccttcctgggcacagccatcttcattgaggccgacaggcggcgtgctcagctgcatgtccagggcttgctacacgaagccggaagtaccgatgacaggattgtggttcctcagagggggagaagcactcgcgtgcccgttgccagtgtcctgatttag

SEQ ID NO: 53576 - DNA, 1431 bp, Artificial Sequence
  derived and/or modified sequence
atggctggaagcgacacagctcccttcttatctcaggccgacgacccagacgacggtcccgtgcccggaacccccggactaccaggaagcaccgggaatccaaagagtgaggaacccgaagtaccggaccaggaaggactgcagcggatcaccggactctctcccggaagaagcgctctcatcgttgcggtgctgtgctacataaatctccttaattacatggatcgcttcaccgtcgctggcgttctccccgacatcgagcaattcttcaatatcggggattcctcatctggactcattcaaacggtttttatttcatcatatatggttttggcccctgtctttggctatctgggcgataggtacaatcggaagtatttaatgtgcggtgggattgctttctggtccctagtcactctcgggtctagcttcattccgggagaacatttttggctcctgttacttacacgcggactcgtcggtgtgggggaggcgtcttattctacaatcgccccaacactgatagctgaccttttcgttgccgaccaacgatcccgcatgttgtcaatcttctatttcgcaatccctgtgggctctgggctgggctatattgctggatccaaagtgaaggatatggcaggcgattggcactgggcattgcgagtgacgccaggtctcggagtcgtcgccgtcctgctcctgttcttagtggttcgagagccccctcggggtgcggtggagcggcactcagatctgcccccactgaatcccacctcatggtgggcggatcttcgggctttggcacgtaacctaatttttggactgatcacatgtctgaccggggttcttggcgtgggtctgggtgtggaaatatctcgccgactacggcactcgaaccccagggctgaccccctcgtgtgtgctactggtctccttggcagtgctccttttctgtttttatctttggcctgcgctcggggatctatcgtggccacatatatctttatcttcataggtgagaccttgctgtccatgaattgggccattgtggctgatatactactatacgtggtcattcccacgcgcagaagcactgccgaggcttttcagattgtcctctcacatctcctgggcgatgccggatcaccttatcttatcgggctcatcagtgatcgactgcgcaggaactggcctccaagcttccttagcgagttccgtgctcttcagttctccctgatgctttgcgcgttcgtcggtgctcttggcggtgcggcattcttgggcactgcaatcttcattgaagccgaccggcgacgcgctcaactacacgtgcagggcctgctgcacgaagctgggtctactgacgaccggattgtcgttccacagcgtggaaggtcgacacgcgtccccgtggcatccgtgctgatctag

SEQ ID NO: 53577 - protein, 467 aa, Artificial Sequence
  derived and/or modified sequence
MLMSWSPEECKGQGEPLDDRHPLCARLVEKPSRGSEEHLKSGPGPIVTRTASGPALAFWQAVLAGDVGCVSRILADSSTGLAPDSVFDTSDPERWRDFRFNIRALRLWSLTYEEELTTPLHVAASRGHTEVLRLLLRRRARPDSAPGGRTALHEACAAGHTACVHVLLVAGADPNIADQDGKRPLHLCRGPGTLECAELLLRFGARVDGRSEEEEETPLHVAARLGHVELADLLLRRGACPDARNAEGWTPLLAACDVRCQSITDAEATTARCLQLCSLLLSAGADADAADQDKQRPLHLACRRGHAAVVELLLSCGVSANTMDYGGHTPLHCALQGPAAALAQSPEHVVRALLNHGAVRVWPGALPKVLERWSTCPRTIEVLMNTYSVVQLPEEAVGLVTPETLQKHQRFYSSLFALVRQPRSLQHLSRCALRSHLEGSLPQALPRLPLPPRLLRYLQLDFEGVLY

SEQ ID NO: 53578 - protein, 512 aa, Artificial Sequence
  derived and/or modified sequence
MRGQVSLGAWDTGAFCLSVFPSCSLSLSLPLAYTSPPPHSPFPAHMLMSWSPEECKGQGEPLDDRHPLCARLVEKPSRGSEEHLKSGPGPIVTRTASGPALAFWQAVLAGDVGCVSRILADSSTGLAPDSVFDTSDPERWRDFRFNIRALRLWSLTYEEELTTPLHVAASRGHTEVLRLLLRRRARPDSAPGGRTALHEACAAGHTACVHVLLVAGADPNIADQDGKRPLHLCRGPGTLECAELLLRFGARVDGRSEEEEETPLHVAARLGHVELADLLLRRGACPDARNAEGWTPLLAACDVRCQSITDAEATTARCLQLCSLLLSAGADADAADQDKQRPLHLACRRGHAAVVELLLSCGVSANTMDYGGHTPLHCALQGPAAALAQSPEHVVRALLNHGAVRVWPGALPKVLERWSTCPRTIEVLMNTYSVVQLPEEAVGLVTPETLQKHQRFYSSLFALVRQPRSLQHLSRCALRSHLEGSLPQALPRLPLPPRLLRYLQLDFEGVLY

SEQ ID NO: 53579 - DNA, 1404 bp, Artificial Sequence
  derived and/or modified sequence
atgctgatgagctggagccccgaggagtgcaagggccagggcgagcccctggacgacagacaccccctgtgcgccagactggtggagaagcccagcagaggcagcgaggagcacctgaagagcggccccggccccatcgtgaccagaaccgccagcggccccgccctggccttctggcaggccgtgctggccggcgacgtgggctgcgtgagcagaatcctggccgacagcagcaccggcctggcccccgacagcgtgttcgacaccagcgaccccgagagatggagagacttcagattcaacatcagagccctgagactgtggagcctgacctacgaggaggagctgaccacccccctgcacgtggccgccagcagaggccacaccgaggtgctgagactgctgctgagaagaagagccagacccgacagcgcccccggcggcagaaccgccctgcacgaggcctgcgccgccggccacaccgcctgcgtgcacgtgctgctggtggccggcgccgaccccaacatcgccgaccaggacggcaagagacccctgcacctgtgcagaggccccggcaccctggagtgcgccgagctgctgctgagattcggcgccagagtggacggcagaagcgaggaggaggaggagacccccctgcacgtggccgccagactgggccacgtggagctggccgacctgctgctgagaagaggcgcctgccccgacgccagaaacgccgagggctggacccccctgctggccgcctgcgacgtgagatgccagagcatcaccgacgccgaggccaccaccgccagatgcctgcagctgtgcagcctgctgctgagcgccggcgccgacgccgacgccgccgaccaggacaagcagagacccctgcacctggcctgcagaagaggccacgccgccgtggtggagctgctgctgagctgcggcgtgagcgccaacaccatggactacggcggccacacccccctgcactgcgccctgcagggccccgccgccgccctggcccagagccccgagcacgtggtgagagccctgctgaaccacggcgccgtgagagtgtggcccggcgccctgcccaaggtgctggagagatggagcacctgccccagaaccatcgaggtgctgatgaacacctacagcgtggtgcagctgcccgaggaggccgtgggcctggtgacccccgagaccctgcagaagcaccagagattctacagcagcctgttcgccctggtgagacagcccagaagcctgcagcacctgagcagatgcgccctgagaagccacctggagggcagcctgccccaggccctgcccagactgcccctgccccccagactgctgagatacctgcagctggacttcgagggcgtgctgtactag

SEQ ID NO: 53580 - DNA, 1539 bp, Artificial Sequence
  derived and/or modified sequence
atgagaggccaggtgagcctgggcgcctgggacaccggcgccttctgcctgagcgtgttccccagctgcagcctgagcctgagcctgcccctggcctacaccagcccccccccccacagccccttccccgcccacatgctgatgagctggagccccgaggagtgcaagggccagggcgagcccctggacgacagacaccccctgtgcgccagactggtggagaagcccagcagaggcagcgaggagcacctgaagagcggccccggccccatcgtgaccagaaccgccagcggccccgccctggccttctggcaggccgtgctggccggcgacgtgggctgcgtgagcagaatcctggccgacagcagcaccggcctggcccccgacagcgtgttcgacaccagcgaccccgagagatggagagacttcagattcaacatcagagccctgagactgtggagcctgacctacgaggaggagctgaccacccccctgcacgtggccgccagcagaggccacaccgaggtgctgagactgctgctgagaagaagagccagacccgacagcgcccccggcggcagaaccgccctgcacgaggcctgcgccgccggccacaccgcctgcgtgcacgtgctgctggtggccggcgccgaccccaacatcgccgaccaggacggcaagagacccctgcacctgtgcagaggccccggcaccctggagtgcgccgagctgctgctgagattcggcgccagagtggacggcagaagcgaggaggaggaggagacccccctgcacgtggccgccagactgggccacgtggagctggccgacctgctgctgagaagaggcgcctgccccgacgccagaaacgccgagggctggacccccctgctggccgcctgcgacgtgagatgccagagcatcaccgacgccgaggccaccaccgccagatgcctgcagctgtgcagcctgctgctgagcgccggcgccgacgccgacgccgccgaccaggacaagcagagacccctgcacctggcctgcagaagaggccacgccgccgtggtggagctgctgctgagctgcggcgtgagcgccaacaccatggactacggcggccacacccccctgcactgcgccctgcagggccccgccgccgccctggcccagagccccgagcacgtggtgagagccctgctgaaccacggcgccgtgagagtgtggcccggcgccctgcccaaggtgctggagagatggagcacctgccccagaaccatcgaggtgctgatgaacacctacagcgtggtgcagctgcccgaggaggccgtgggcctggtgacccccgagaccctgcagaagcaccagagattctacagcagcctgttcgccctggtgagacagcccagaagcctgcagcacctgagcagatgcgccctgagaagccacctggagggcagcctgccccaggccctgcccagactgcccctgccccccagactgctgagatacctgcagctggacttcgagggcgtgctgtactag

SEQ ID NO: 53581 - DNA, 1404 bp, Artificial Sequence
  derived and/or modified sequence
atgcttatgagctggtccccggaagagtgcaagggacaaggagaacccttggacgacagacatccactctgcgcaaggcttgtcgagaagccgtccaggggatctgaagagcacctgaagagcgggccggggccgatcgtgacgagaacagcctccgggcccgctctggctttctggcaggccgtgcttgccggcgacgtgggctgtgtaagccgcattctagccgactccagcactgggctcgccccagactccgtgttcgacacttccgacccagagaggtggagagatttcagattcaatattcgagcgctgcggctgtggtccctgacttatgaggaagaattgacaactcccctgcacgtggcagcctctcggggccacaccgaggttctcaggctgctgcttaggcgcagagcacgccccgattcagcacctgggggacgtacagcactccatgaagcttgcgccgctggtcacaccgcttgtgtccacgttctgttagtcgccggtgccgatcctaatattgcggaccaggacggcaagcggcctcttcacttgtgccgtggacccggcacactggagtgtgctgagcttctgctgcgcttcggagcacgggtcgatggtcggtcagaggaggaagaggagacccccttgcatgtcgccgcccggctcggccatgtcgaactggccgacctcctactcagaagaggcgcctgccctgatgcccggaatgcagaaggttggacaccacttctggctgcgtgcgatgttcgttgtcaatcaatcactgatgcggaggcgactacagctagatgcttgcagctgtgctccctgctcctctcagctggcgctgatgccgacgctgccgatcaagataaacagcgacccttgcacctggcctgtcgtaggggacacgccgcagtggtcgaattactcctctcttgtggagtgagtgctaataccatggattatggaggtcatacccccctgcattgtgcgctgcagggccctgctgctgccctggcacaaagccctgagcacgtggtgagggccttgctgaatcacggcgcagttcgtgtatggcccggagccttgcctaaagtgctcgagaggtggtctacctgccctagaacgatagaagtactgatgaatacttatagtgtggtccagcttccagaggaggctgtgggtttggttactccggagaccctacagaaacatcagcggttctattcatccttgttcgcgctggtgcgacagccccgctctttgcaacacctgagccgctgcgcactgcggtcgcatctggagggatccctaccccaggccctgccccgcttgcccctcccccccagacttttgcggtacctgcagcttgatttcgagggagtcttgtactag

SEQ ID NO: 53582 - DNA, 1539 bp, Artificial Sequence
  derived and/or modified sequence
atgaggggacaggtcagcctaggcgcttgggatacaggtgccttttgtttgtcagtgttcccttcatgctcactgagtctgagtctccccctcgcttatactagtcctcctccacactccccgtttcccgcccacatgctcatgtcatggagccccgaggagtgtaaggggcagggtgagccactcgatgaccggcatccactctgcgctaggctggttgagaagccctccagaggaagtgaggaacacttaaaatctgggccaggaccgatcgtaactcgcaccgcatctggacctgccctggctttttggcaggccgtcctcgctggggatgtgggatgcgtgtctcgcatattagccgacagctctaccggactcgcacccgactccgtcttcgatacatctgaccccgagcgatggcgagacttcaggttcaatattcgcgcgctccggctgtggtcattaacatacgaggaagaacttaccacgcccttgcacgtggcagcctcacgcggacacacggaagtattaagactcttactgagacgccgagctcggccagattccgcacctggtgggcgcacagctttgcacgaagcctgcgccgccggacacaccgcctgcgtccacgtgctgctggtcgccggcgcagatcccaacattgctgatcaggacggcaagcgacctttacatctttgcagagggcctggtacacttgaatgcgctgagcttctgctccgctttggcgctcgcgtggatggcaggagcgaggaggaggaggagaccccactgcacgtcgcagcccgattggggcatgtggagcttgcagacttattgcttaggaggggcgcttgccccgacgcacgaaacgccgaagggtggacccctttactggctgcctgcgacgtaaggtgccagagtataacggatgctgaagctactaccgctcggtgcttacagctgtgcagtctgcttctgagcgcgggtgccgacgcagacgccgccgatcaggacaagcagaggcctctccatctggcgtgtcggcgcggacatgccgccgtagtcgagctgctgctgtcttgcggagtcagcgcgaatactatggattatggggggcacacacctcttcattgtgcactgcagggcccagctgctgctcttgctcagtcgccggaacacgttgtcagagcacttctcaatcatggagccgttcgtgtgtggccaggggccctgcccaaagtgctcgaacggtggagtacatgccctaggaccatcgaggttctgatgaacacatattcggtcgtacaattgcctgaagaggccgtgggacttgttaccccggagacgcttcagaaacaccagagattctatagctccctgttcgccttggtcaggcagcccaggagtcttcagcacttgtctcgctgtgccctgaggagtcacctggagggcagcttgccgcaagctctgcccagactgccactgcccccgaggttactccgctacttgcagctggattttgagggagtgctgtactag

SEQ ID NO: 53583 - DNA, 1694 bp, Artificial Sequence
  derived and/or modified sequence
tccccactcccctttccctgcccacatgctcatgagttggtctccagaagagtgcaaggggcagggagagcccctcgatgacagacaccccctctgtgccaggctggtggagaagcccagcagagggtctgaggagcacctcaagtctggcccgggacccatcgtcacccgcacagcctcaggacctgcccttgccttctggcaggcagtgctggctggggacgtgggctgtgtctcccgcatcctcgcggactccagtactggcctggctcctgattccgtctttgataccagcgacccagagcgatggagggatttccgcttcaacatccgtgctctgagactctggtctctgacatacgaagaggagctgaccaccccactgcatgtggcagccagccgtggccacacggaagtcctgcggctgctgctgaggcggcgagcaaggccagacagtgcccctgggggccgcaccgccctgcacgaggcctgtgctgcaggccacactgcctgtgttcatgtgctgctggtggcaggagccgaccccaacatcgctgaccaggatgggaaacgccccctgcatctctgccgggggcctggcacccttgagtgtgcggagctgctcctcaggtttggagcgagagtggatggtcggtccgaggaagaagaggagacccctttgcatgtggccgcccggcttggccatgtggagctggcagatctgcttctaagacggggggcatgtcctgatgcccgcaatgccgaaggctggaccccactgctggctgcctgtgacgtccgctgccagtccatcaccgatgccgaggccaccaccgcccgctgcctgcagctgtgcagcttgctgctttcagctggagcagacgctgatgctgcggaccaggacaagcagcgacccctgcacctggcctgccgccgtggccatgcagctgtcgtggagctgctcctgtcctgtggtgtcagcgccaacaccatggactatgggggacacacgcccctgcactgtgctctgcagggcccagctgcagccctggcccagagccccgagcacgtggttcgggctctgctcaaccatggcgccgtccgtgtctggccaggggccctccccaaggtgctggagcgctggagcacgtgccctcggaccatcgaggtcctgatgaacacctacagtgttgtgcagcttcccgaggaggccgtcggcctggtgactcctgaaactctgcagaaacatcagcgtttctactcctccctcttcgccttggtgaggcagcccaggtcgctgcagcatttgagccgctgtgcgctccgctcccacctggagggcagcctgccccaagcgctgccccgcctccccctgccaccgcgcctgctccgctacctgcagctggattttgagggcgtgctctactagatgtccatggccttttgagagggcctgaaagcagatgccccagcctgcagagggcgcgcctctgcactaactcaggccaggtagccctggcagcaggaggcccagctccgcaggcaggtgtggatgctgcaattcccaatgcagagaagcggaccgacagcggcagccgggtgatgtctgatgaagacacactcctactggggctctcctgaggcccccttctagcctgtgcaaaccctgtatgtgcattaaaaatctccaggtc

SEQ ID NO: 53584 - DNA, 1934 bp, Artificial Sequence
  derived and/or modified sequence
aggtcctaagggcttgagtgaaaggagaagcccccggctgtttctccccgacctcaaagcttgcccaatagcctacaccttggcccaagaacacagtcatgtggagcccagaatagctcctgctggatgcgtggccaggtcagcctcggagcgtgggacacaggggccttctgtctgtctgtatttccctcctgctctctctctctctctctgcctttggcatatacctctcctcctccccactcccctttccctgcccacatgctcatgagttggtctccagaagagtgcaaggggcagggagagcccctcgatgacagacaccccctctgtgccaggctggtggagaagcccagcagagggtctgaggagcacctcaagtctggcccgggacccatcgtcacccgcacagcctcaggacctgcccttgccttctggcaggcagtgctggctggggacgtgggctgtgtctcccgcatcctcgcggactccagtactggcctggctcctgattccgtctttgataccagcgacccagagcgatggagggatttccgcttcaacatccgtgctctgagactctggtctctgacatacgaagaggagctgaccaccccactgcatgtggcagccagccgtggccacacggaagtcctgcggctgctgctgaggcggcgagcaaggccagacagtgcccctgggggccgcaccgccctgcacgaggcctgtgctgcaggccacactgcctgtgttcatgtgctgctggtggcaggagccgaccccaacatcgctgaccaggatgggaaacgccccctgcatctctgccgggggcctggcacccttgagtgtgcggagctgctcctcaggtttggagcgagagtggatggtcggtccgaggaagaagaggagacccctttgcatgtggccgcccggcttggccatgtggagctggcagatctgcttctaagacggggggcatgtcctgatgcccgcaatgccgaaggctggaccccactgctggctgcctgtgacgtccgctgccagtccatcaccgatgccgaggccaccaccgcccgctgcctgcagctgtgcagcttgctgctttcagctggagcagacgctgatgctgcggaccaggacaagcagcgacccctgcacctggcctgccgccgtggccatgcagctgtcgtggagctgctcctgtcctgtggtgtcagcgccaacaccatggactatgggggacacacgcccctgcactgtgctctgcagggcccagctgcagccctggcccagagccccgagcacgtggttcgggctctgctcaaccatggcgccgtccgtgtctggccaggggccctccccaaggtgctggagcgctggagcacgtgccctcggaccatcgaggtcctgatgaacacctacagtgttgtgcagcttcccgaggaggccgtcggcctggtgactcctgaaactctgcagaaacatcagcgtttctactcctccctcttcgccttggtgaggcagcccaggtcgctgcagcatttgagccgctgtgcgctccgctcccacctggagggcagcctgccccaagcgctgccccgcctccccctgccaccgcgcctgctccgctacctgcagctggattttgagggcgtgctctactagatgtccatggccttttgagagggcctgaaagcagatgccccagcctgcagagggcgcgcctctgcactaactcaggccaggtagccctggcagcaggaggcccagctccgcaggcaggtgtggatgctgcaattcccaatgcagagaagcggaccgacagcggcagccgggtgatgtctgatgaagacacactcctactggggctctcctgaggcccccttctagcctgtgcaaaccctgtatgtgcattaaaaatctccaggtctgtg

SEQ ID NO: 53585 - DNA, 1404 bp, Artificial Sequence
  derived and/or modified sequence
atgctgatgtcctggagcccagaagaatgtaaaggccagggcgagcccctggatgacagacaccccctgtgtgcccggctggtggagaagcccagccggggcagcgaggagcacctgaagagcggccctggccccatcgtgaccaggacagccagcggccctgccctggccttctggcaggccgtgctggccggagatgtgggctgtgtgagccgcatcctggccgacagcagcacaggcctggccccagattctgtgtttgacaccagtgaccctgagcgctggagggacttccgcttcaacatccgggccctgcggctgtggagcctgacctatgaggaggagctgaccacccccctgcacgtggccgccagccggggccacacagaggtgctgcggctgctgctgcggcggcgggcccggccagacagcgcccctgggggccgcacagccctgcacgaggcctgtgccgccggccacacagcctgtgtgcacgtgctgctggtggccggggctgaccccaacattgctgaccaggacggcaagaggcccctgcacctgtgccggggccctggcaccctggagtgtgccgagctgctgctgcgctttggagcccgggtggatggccgctctgaggaggaggaggagacccccctgcacgtggccgcccggctgggccacgtggagctggccgacctgctgctgcggcggggggcctgcccagatgccagaaatgctgagggctggacccccctgctggccgcctgtgatgtgcgctgccagagcatcacagatgctgaggccaccacagcccgctgcctgcagctgtgcagcctgctgctgtctgctggagcagatgctgatgctgctgaccaggacaagcagaggcccctgcacctggcctgcagaagaggacatgctgctgtggtggagctgctgctgagctgtggggtgtctgccaacaccatggactatggaggccacacccccctgcactgtgccctgcagggccctgctgctgccctggcccagagccctgagcacgtggtgcgggccctgctgaaccacggggctgtgcgggtgtggccaggggccctgcccaaggtgctggagcgctggagcacctgccccaggaccatcgaggtgctgatgaacacctacagcgtggtgcagctgcctgaggaggccgtgggcctggtgaccccagagaccctgcagaagcaccagcgcttctacagcagcctgtttgccctggtgcggcagcccaggagcctgcagcacctgagccgctgtgccctgcggagccacctggagggcagcctgccccaggccctgccccggctgcccctgcccccccggctgctgcgctacctgcagctggactttgagggcgtgctgtactag

SEQ ID NO: 53586 - DNA, 1539 bp, Artificial Sequence
  derived and/or modified sequence
atgaggggccaggtgtccctgggcgcctgggacaccggggccttctgcctgagcgtcttccccagctgcagcctgagcctgagcctgcccctggcctacaccagccccccaccccacagccccttccctgcccacatgctgatgtcctggagccctgaggagtgcaagggccagggcgagcccctggatgacagacaccccctgtgtgcccggctggtggagaagcccagccggggcagcgaggagcacctgaagagcggccctggccccatcgtgaccaggacagccagcggccctgccctggccttctggcaggccgtgctggccggagatgtgggctgtgtgagccgcatcctggccgacagcagcacaggcctggccccagacagcgtgtttgacaccagtgaccctgagcgctggagggacttccgcttcaacatccgggccctgcggctgtggagcctgacctatgaggaggagctgaccacccccctgcacgtggccgccagccggggccacacagaggtgctgcggctgctgctgcggcggcgggcccggccagattctgcccctgggggccgcacagccctgcacgaggcctgtgccgccggccacacagcctgtgtgcacgtgctgctggtggccggggctgaccccaacattgctgaccaggacggcaagaggcccctgcacctgtgccggggccctggcaccctggagtgtgccgagctgctgctgcgctttggagcccgggtggatggccgctctgaggaggaggaggagacccccctgcacgtggccgcccggctgggccacgtggagctggccgacctgctgctgcggcggggggcctgcccagatgccagaaatgctgagggctggacccccctgctggccgcctgtgatgtgcgctgccagagcatcacagatgctgaggccaccacagcccgctgcctgcagctgtgcagcctgctgctgtctgctggagcagatgctgatgctgctgaccaggacaagcagaggcccctgcacctggcctgccggcggggccacgccgctgtggtggagctgctgctgagctgtggggtgtctgccaacaccatggactatggaggccacacccccctgcactgtgccctgcagggccctgctgctgccctggcccagagccctgagcacgtggtgcgggccctgctgaaccacggggctgtgcgggtgtggccaggggccctgcccaaggtgctggagcgctggagcacctgccccaggaccatcgaggtgctgatgaacacctacagcgtggtgcagctgcctgaggaggccgtgggcctggtgaccccagagaccctgcagaagcaccagcgcttctacagcagcctgtttgccctggtgcggcagcccaggagcctgcagcacctgagccgctgtgccctgcggagccacctggagggcagcctgccccaggccctgccccggctgcccctgcccccccggctgctgcgctacctgcagctggactttgaaggagtgctgtactag

SEQ ID NO: 53587 - DNA, 1404 bp, Artificial Sequence
  derived and/or modified sequence
atgctgatgagctggagccccgaggagtgcaagggccagggcgagcccctcgacgatagacatccattgtgtgcacggctggttgagaaaccttcccgcggcagcgaagaacatctgaaatctggccctggcccgattgtaaccagaactgcatccggacctgccctggccttctggcaggccgtgctcgccggcgacgtaggatgcgtttccagaatacttgccgactcctccacagggctggccccagattccgtgtttgacacaagcgatcccgaaagatggcgggatttccgcttcaacattagagcattgcgcctctggagcctgacgtacgaggaggaattgactacacctcttcacgtcgccgcatccaggggccataccgaagtgttgagactgctattacgccggagagcgagacccgactctgcaccaggcgggagaaccgctctgcacgaagcttgtgccgccggacacaccgcatgcgtacacgtacttttggtggccggcgccgacccaaacatcgcggaccaggatggcaagcggcccctgcacctctgcagaggccccgggaccctcgagtgtgctgagctgctcctgcgcttcggcgctcgcgtggatggccggtccgaggaagaagaagagacgccattacatgttgctgctcgcctgggccatgttgagcttgctgacctgcttctgcggcgcggcgcttgcccagacgctagaaatgccgagggatggacacccctgctggccgcctgtgacgtccgatgccaatctatcactgacgctgaggctactactgcgcgttgtttgcagctgtgctccctgctgttatcagccggagctgatgctgacgctgccgaccaggataagcagcgccccttacatcttgcttgtcgccggggccatgccgccgtcgtagaactgctgttgagctgcggggtctctgccaatacaatggattacggcggacacaccccgctccactgcgccctgcagggaccagctgccgccctagctcagtcccctgaacacgtggtgagggctctgctgaaccatggcgctgtccgggtctggccaggggctctccctaaggtcttggaaaggtggagcacgtgccctcgcacaatcgaggttttgatgaacacatatagtgtggtccaacttccggaagaggcggtcgggctcgtaacaccggaaactttgcagaagcatcagagattctacagttctctttttgctctggttcgacagccacggtcgctgcagcacctgtctcggtgcgcactgcggtcgcatctcgaaggctccctacctcaggctctcccaaggttacccctgccacctcggctgctgagatatctgcagctggacttcgaaggggtgctgtattag

SEQ ID NO: 53588 - DNA, 1539 bp, Artificial Sequence
  derived and/or modified sequence
atgcggggccaggtgagcctgggcgcctgggacaccggcgccttctgcctctctgtgtttccttcctgctcactgtctctttcactcccacttgcctatactagtcctccccctcactcaccattccctgcacacatgcttatgtcctggagtcccgaggaatgtaaggggcagggagaaccactcgatgacaggcaccctctgtgcgccaggcttgttgagaagccctcccggggctccgaggagcatttaaaaagcggacctggccctattgtgactcggacagcttccgggcctgcgttggctttctggcaagctgtgctggccggagatgtgggctgtgtttctaggattctggcggactcttccacagggttggctccagactccgtctttgacacatctgaccctgaaagatggagggacttccggttcaatattcgtgccctgcgcctatggtccttgacatatgaagaggaactcactacaccactgcatgtggccgcaagtcggggccataccgaagtattacggcttctccttcgtaggcgtgctaggcccgattcagcacccggcgggcggacagccttgcacgaggcatgcgcggcaggacatacggcttgtgtccacgtactccttgtggccggtgccgacccgaatatagctgaccaggatggcaaaaggcccttacatttgtgtcgggggcccggcacactggagtgcgccgaattactgctcagatttggagccagggttgacggtagatcagaggaagaggaggagaccccacttcacgtcgctgcgcgtctggggcacgttgaattagcggatcttctgttacggcggggcgcttgcccagatgctaggaacgccgaaggctggacaccactgctcgcggcctgtgatgtgaggtgtcagtccattactgacgcagaggccacaaccgctcgctgtctccagctgtgcagccttctgttgtccgctggcgcagatgcggacgcggccgatcaagataagcaacggccccttcacctggcctgccgaaggggacacgcggcagtggtcgagcttttgctgagctgcggggtttcagcaaacaccatggactacggaggtcatacacccctgcattgcgcgctgcagggtccagccgccgctctagcacagagtcctgagcacgtggtcagggccctgctgaatcacggtgcggtgagagtctggcctggggcgctgcctaaagtgttagaacggtggtccacatgtccccgaacaatcgaggtgctgatgaacacctatagcgttgtccagctccctgaggaggccgttggattggtaactcctgagacattacagaagcaccagcggttttatagcagcttatttgctttagtaaggcagccaagatcacttcagcacctatctcggtgtgctctgagaagccacctggagggcagcctgcctcaagccctacctagactccccctgccacctcgcttgctccgatacctacagctggattttgagggggtactctactag

SEQ ID NO: 53589 - DNA, 1404 bp, Artificial Sequence
  derived and/or modified sequence
atgctgatgtcttggtctccagaagagtgcaagggccaaggagagcctcttgatgacaggcatcctttatgcgctcggctggtggagaagccgtcccggggatctgaagagcatctgaagtccggcccaggtcctatcgtgaccaggacagcatctggaccggctctcgcattctggcaggcagtcttggctggcgacgtggggtgcgtgagtcgcattctcgccgactcaagcaccggcctcgcgcctgattcagtcttcgatacctctgatcccgagcgctggagggacttccgctttaacattagggccctccgcctgtggagccttacctacgaagaggagctgaccacgcccctccacgtggccgcaagcagagggcatacggaggtcttgcgactgttactccgacgcagagcacgcccagactccgctccaggcggacgcaccgcactgcatgaagcatgtgccgcaggtcatacagcttgtgtgcacgttttgctggtagctggagccgaccctaacatagcggatcaggatggcaagagacccctgcatctctgtaggggaccgggaacgttagagtgtgctgagctactgttaagattcggggctagagttgatggcaggtcggaggaagaagaagaaacccctttgcatgtagccgcacgtctggggcacgtcgagctggcagacctcctcctccggaggggggcatgcccagacgctcgaaacgcagagggatggactcctttgctggccgcttgtgatgtgaggtgccagagtattacagacgcggaggctaccacagcacggtgcctacagctttgttccctccttctgtctgcaggtgccgatgccgacgcagctgatcaggataaacaacgtcctctgcacctagcctgccggaggggacacgccgcagtagttgagctccttctttcatgtggtgtaagtgctaatacgatggactatggcggtcacaccccgctgcattgtgctttgcagggacctgccgcagctctcgcccagtcccccgagcatgtggtgcgggcactcctgaaccacggggcagtgcgagtttggcccggagcactcccaaaggtacttgagcgttggtccacttgtcctcgcactattgaagtattgatgaacacttatagcgtggtgcagctgcccgaggaagctgtgggattagtaacccctgagactctgcagaagcaccagcgcttctattcctccctctttgcactcgttagacagccgaggagcttgcaacacctttctcggtgcgccctcagatcccaccttgagggaagtctgcctcaagctctacctcgcctccctctgcccccacggctgttgcgctacctccagttagactttgagggcgtgttatactag

SEQ ID NO: 53590 - DNA, 1539 bp, Artificial Sequence
  derived and/or modified sequence
atgagaggccaggtgtcactgggcgcatgggataccggagcattttgcctctccgtgtttccctcatgtagtctttccctgtcacttcctttggcgtatacctccccccctccccacagtccctttcccgctcatatgttaatgtcctggagtcccgaagaatgtaaaggacaaggtgaaccactcgacgataggcacccgctgtgtgctaggctcgtcgaaaagcccagccgcggatcagaagaacatctgaagtctggtcccggacccatcgtcaccaggactgcatccggcccagcgctggccttctggcaggctgtgctcgccggagatgttggctgcgtcagtcgcatcctggctgactcctcaactgggctggcccctgactccgtgttcgataccagcgaccctgaacgctggagagacttccgttttaacatccgggcactgcgcctgtggagcttgacttatgaagaggaattaacgaccccccttcatgtcgcggcttcacgaggccataccgaagtgttgcgcctgctgctccggagaagagcccgtcctgactctgcccctggcggtaggaccgctctgcacgaggcttgtgcagcagggcatacagcctgtgtgcacgtattgctggttgcaggggctgacccaaacatcgcggatcaagacggcaaaaggcctttgcacctgtgtcgcggacctgggactctggaatgtgctgaattgctgctgcggttcggcgctcgtgtcgatggtcgtagcgaggaggaggaggagaccccactccatgtggccgcaagacttggtcacgtcgagttagcagatctgctgctcaggcgtggcgcttgccccgatgccagaaacgctgaggggtggaccccacttctagccgcatgtgacgttagatgccagagcatcaccgatgcagaggctactacagcccgatgcctacagctttgctccctactcctttcagccggagcagacgcggatgccgctgatcaggacaaacagcggccactccacctggcctgtcgccgtggtcacgccgcagtggtagagctcctgctctcctgcggggtgtcggctaatacaatggattacgggggtcacacgcccctccactgtgccctgcaggggcctgccgcagcacttgcccagagcccagagcacgtggtacgagcactgctgaatcatggagctgttcgggtgtggccgggagccctgcccaaggtgctggaaagatggtccacctgcccgcgaaccatagaggtgctgatgaacacttacagcgtggttcagctccccgaagaggctgttggtcttgtaacccctgagactttgcagaaacatcagcggttctacagctctctgttcgcccttgtgcggcagccaagaagtcttcagcatctttcccggtgcgctctgcgcagtcatttggagggctccttgccgcaggcactccctcgtctgcctcttccacctcggctcctgagatatttacagctggactttgagggtgtactgtattag

SEQ ID NO: 53591 - protein, 429 aa, Artificial Sequence
  derived and/or modified sequence
MLMSWSPEECKGQGEPLDDRHPLCARLVEKPSRGSEEHLKSGPGPIVTRTASGPALAFWQAVLAGDVGCVSRILADSSTGLAPDSVFDTSDPERWRDFRFNIRALRLWSLTYEEELTTPLHVAASRGHTEVLRLLLRRRARPDSAPGGRTALHEACAAGHTACVHVLLVAGADPNIADQDGKRPLHLCRGPGTLECAELLLRFGARVDGRSEEEEETPLHVAARLGHVELADLLLRRGACPDARNAEGWTPLLAACDVRCQSITDAEATTARCLQLCSLLLSAGADADAADQDKQRPLHLACRRGHAAVVELLLSCGVSANTMDYGGHTPLHCALQGPAAALAQSPEHVVRALLNHGAVRVWPGALPKKHQRFYSSLFALVRQPRSLQHLSRCALRSHLEGSLPQALPRLPLPPRLLRYLQLDFEGVLY

SEQ ID NO: 53592 - protein, 474 aa, Artificial Sequence
  derived and/or modified sequence
MRGQVSLGAWDTGAFCLSVFPSCSLSLSLPLAYTSPPPHSPFPAHMLMSWSPEECKGQGEPLDDRHPLCARLVEKPSRGSEEHLKSGPGPIVTRTASGPALAFWQAVLAGDVGCVSRILADSSTGLAPDSVFDTSDPERWRDFRFNIRALRLWSLTYEEELTTPLHVAASRGHTEVLRLLLRRRARPDSAPGGRTALHEACAAGHTACVHVLLVAGADPNIADQDGKRPLHLCRGPGTLECAELLLRFGARVDGRSEEEEETPLHVAARLGHVELADLLLRRGACPDARNAEGWTPLLAACDVRCQSITDAEATTARCLQLCSLLLSAGADADAADQDKQRPLHLACRRGHAAVVELLLSCGVSANTMDYGGHTPLHCALQGPAAALAQSPEHVVRALLNHGAVRVWPGALPKKHQRFYSSLFALVRQPRSLQHLSRCALRSHLEGSLPQALPRLPLPPRLLRYLQLDFEGVLY

SEQ ID NO: 53593 - DNA, 1290 bp, Artificial Sequence
  derived and/or modified sequence
atgctgatgagctggagccccgaggagtgcaagggccagggcgagcccctggacgacagacaccccctgtgcgccagactggtggagaagcccagcagaggcagcgaggagcacctgaagagcggccccggccccatcgtgaccagaaccgccagcggccccgccctggccttctggcaggccgtgctggccggcgacgtgggctgcgtgagcagaatcctggccgacagcagcaccggcctggcccccgacagcgtgttcgacaccagcgaccccgagagatggagagacttcagattcaacatcagagccctgagactgtggagcctgacctacgaggaggagctgaccacccccctgcacgtggccgccagcagaggccacaccgaggtgctgagactgctgctgagaagaagagccagacccgacagcgcccccggcggcagaaccgccctgcacgaggcctgcgccgccggccacaccgcctgcgtgcacgtgctgctggtggccggcgccgaccccaacatcgccgaccaggacggcaagagacccctgcacctgtgcagaggccccggcaccctggagtgcgccgagctgctgctgagattcggcgccagagtggacggcagaagcgaggaggaggaggagacccccctgcacgtggccgccagactgggccacgtggagctggccgacctgctgctgagaagaggcgcctgccccgacgccagaaacgccgagggctggacccccctgctggccgcctgcgacgtgagatgccagagcatcaccgacgccgaggccaccaccgccagatgcctgcagctgtgcagcctgctgctgagcgccggcgccgacgccgacgccgccgaccaggacaagcagagacccctgcacctggcctgcagaagaggccacgccgccgtggtggagctgctgctgagctgcggcgtgagcgccaacaccatggactacggcggccacacccccctgcactgcgccctgcagggccccgccgccgccctggcccagagccccgagcacgtggtgagagccctgctgaaccacggcgccgtgagagtgtggcccggcgccctgcccaagaagcaccagagattctacagcagcctgttcgccctggtgagacagcccagaagcctgcagcacctgagcagatgcgccctgagaagccacctggagggcagcctgccccaggccctgcccagactgcccctgccccccagactgctgagatacctgcagctggacttcgagggcgtgctgtactag

SEQ ID NO: 53594 - DNA, 1425 bp, Artificial Sequence
  derived and/or modified sequence
atgagaggccaggtgagcctgggcgcctgggacaccggcgccttctgcctgagcgtgttccccagctgcagcctgagcctgagcctgcccctggcctacaccagcccccccccccacagccccttccccgcccacatgctgatgagctggagccccgaggagtgcaagggccagggcgagcccctggacgacagacaccccctgtgcgccagactggtggagaagcccagcagaggcagcgaggagcacctgaagagcggccccggccccatcgtgaccagaaccgccagcggccccgccctggccttctggcaggccgtgctggccggcgacgtgggctgcgtgagcagaatcctggccgacagcagcaccggcctggcccccgacagcgtgttcgacaccagcgaccccgagagatggagagacttcagattcaacatcagagccctgagactgtggagcctgacctacgaggaggagctgaccacccccctgcacgtggccgccagcagaggccacaccgaggtgctgagactgctgctgagaagaagagccagacccgacagcgcccccggcggcagaaccgccctgcacgaggcctgcgccgccggccacaccgcctgcgtgcacgtgctgctggtggccggcgccgaccccaacatcgccgaccaggacggcaagagacccctgcacctgtgcagaggccccggcaccctggagtgcgccgagctgctgctgagattcggcgccagagtggacggcagaagcgaggaggaggaggagacccccctgcacgtggccgccagactgggccacgtggagctggccgacctgctgctgagaagaggcgcctgccccgacgccagaaacgccgagggctggacccccctgctggccgcctgcgacgtgagatgccagagcatcaccgacgccgaggccaccaccgccagatgcctgcagctgtgcagcctgctgctgagcgccggcgccgacgccgacgccgccgaccaggacaagcagagacccctgcacctggcctgcagaagaggccacgccgccgtggtggagctgctgctgagctgcggcgtgagcgccaacaccatggactacggcggccacacccccctgcactgcgccctgcagggccccgccgccgccctggcccagagccccgagcacgtggtgagagccctgctgaaccacggcgccgtgagagtgtggcccggcgccctgcccaagaagcaccagagattctacagcagcctgttcgccctggtgagacagcccagaagcctgcagcacctgagcagatgcgccctgagaagccacctggagggcagcctgccccaggccctgcccagactgcccctgccccccagactgctgagatacctgcagctggacttcgagggcgtgctgtactag

SEQ ID NO: 53595 - DNA, 1290 bp, Artificial Sequence
  derived and/or modified sequence
atgttgatgtcctggtctcccgaggaatgtaaaggacagggagaaccactcgacgatagacaccctctgtgcgctagactcgtggagaagccttctagaggaagtgaggaacacctcaagagcgggcctggtcctatagtgacaaggacggcttccgggcctgcattggctttttggcaggccgtgctagcaggcgacgttggatgcgtgtctaggatccttgccgactcctctaccggactggctccagattccgtgttcgatactagtgacccagagcgctggagggactttcgctttaatatccgcgccttgagattatggtctttgacatatgaagaggagttgacaactccgctgcatgtggcagccagtagaggacataccgaggttctccggctgctgctgcgccgaagagcacggcctgattccgcccccggaggacgtaccgcactacacgaggcctgcgcagcaggacacacagcatgtgtgcacgtgctgctggtggccggggcagacccaaacatcgctgatcaagatggaaagcgccccctgcacctgtgtcgggggccaggtactctggaatgcgctgaattgctgctgaggtttggagcgcgagtcgacggtagaagtgaggaagaagaggagactccacttcacgttgctgctcgcttgggccacgtcgaactggccgacctgctcctgcgtagaggggcctgtcccgacgctcgcaacgctgagggctggacgcctctcctggcagcctgcgatgtgagatgccagagtattacagatgcagaggcaacaacagcacgctgcctccagctgtgctcactgctgctgtcagcaggggcagacgccgacgctgccgaccaggataagcagagaccattacatctggcctgccggagagggcatgctgcggtagtcgaacttttattgagctgcggagtcagcgctaatacaatggactacggtggacatacccctctacattgcgctctccagggtcccgccgctgcactcgctcagagtccagagcacgttgtgcgcgccctcctcaatcacggcgcagtccgagtttggccaggagcacttcccaagaagcaccagaggttttatagctcattgttcgccctggtaaggcagccgcggtcccttcaacatcttagccgttgtgctctccgctcccatctcgaaggcagtctccctcaagcactgccccgccttcccctacccccgaggctcctccgttatctccaattggattttgaaggggttctgtattag

SEQ ID NO: 53596 - DNA, 1425 bp, Artificial Sequence
  derived and/or modified sequence
atgcgcgggcaggtgagcctgggcgcctgggataccggggccttttgcctctccgtttttccatcatgttcccttagcttgagcctgcctctggcctatacgtctcccccaccacactctccattccccgcccacatgctcatgtcatggagtccagaggagtgtaagggacagggggaacccctggacgacaggcaccccctgtgtgctcgccttgtcgaaaaacctagccgcggaagtgaagagcatcttaaatcaggaccaggcccgattgtgactagaacagcctccggccctgcactcgctttctggcaggccgttctggccggggatgtgggctgcgtttcccgtattctcgccgactcctccactggactcgcgccagacagcgttttcgacacctcggatccggagagatggcgggatttccggttcaatattcgagcgttgcgtctgtggtccctgacctacgaggaggaacttacaacccccctccacgtagcagcgtcacgggggcacacagaggtactgaggctcctgttgcggcggcgcgctagacccgactctgctcctggcggccgcacagctctgcacgaggcttgcgctgcagggcataccgcttgtgtgcacgtgctactggtggccggtgctgatccgaatattgcagatcaggacggcaagcgacctttgcacttgtgccgagggcctggcaccttagagtgcgcagaactgctgctccggtttggggcacgcgtggatgggaggtccgaggaggaggaggagacacctctgcacgtcgctgctcgtctcggtcatgtagaactggccgatcttctactgcgaagaggcgcatgcccagatgctaggaatgcagaggggtggacgcctctgctggcagcttgcgacgtcaggtgtcagtcaattactgatgcagaagcaaccaccgctaggtgtctgcaattgtgctctctactgctgagcgcgggagcagacgctgacgcggcagatcaggataagcaaaggccattgcacttagcttgtagacgtgggcacgctgctgtcgtggaattgcttctgtcctgcggtgtaagtgccaatactatggactatgggggacatacgcctctgcactgcgctctgcaagggcccgccgcggctctcgctcagtcccccgaacacgtggtacgcgccctgctcaaccatggtgccgtgcgggtttggccaggggcgctccccaaaaaacatcagcgcttctactcctctctctttgcacttgtacggcagcccaggagcctgcagcatttatcacgttgcgctctgagaagccatcttgagggttcccttccccaggcactgccccggctgcccctgcccccaagactgctccggtatctgcagttagatttcgagggcgtgctgtattag

SEQ ID NO: 53597 - DNA, 1820 bp, Artificial Sequence
  derived and/or modified sequence
aggtcctaagggcttgagtgaaaggagaagcccccggctgtttctccccgacctcaaagcttgcccaatagcctacaccttggcccaagaacacagtcatgtggagcccagaatagctcctgctggatgcgtggccaggtcagcctcggagcgtgggacacaggggccttctgtctgtctgtatttccctcctgctctctctctctctctctgcctttggcatatacctctcctcctccccactcccctttccctgcccacatgctcatgagttggtctccagaagagtgcaaggggcagggagagcccctcgatgacagacaccccctctgtgccaggctggtggagaagcccagcagagggtctgaggagcacctcaagtctggcccgggacccatcgtcacccgcacagcctcaggacctgcccttgccttctggcaggcagtgctggctggggacgtgggctgtgtctcccgcatcctcgcggactccagtactggcctggctcctgattccgtctttgataccagcgacccagagcgatggagggatttccgcttcaacatccgtgctctgagactctggtctctgacatacgaagaggagctgaccaccccactgcatgtggcagccagccgtggccacacggaagtcctgcggctgctgctgaggcggcgagcaaggccagacagtgcccctgggggccgcaccgccctgcacgaggcctgtgctgcaggccacactgcctgtgttcatgtgctgctggtggcaggagccgaccccaacatcgctgaccaggatgggaaacgccccctgcatctctgccgggggcctggcacccttgagtgtgcggagctgctcctcaggtttggagcgagagtggatggtcggtccgaggaagaagaggagacccctttgcatgtggccgcccggcttggccatgtggagctggcagatctgcttctaagacggggggcatgtcctgatgcccgcaatgccgaaggctggaccccactgctggctgcctgtgacgtccgctgccagtccatcaccgatgccgaggccaccaccgcccgctgcctgcagctgtgcagcttgctgctttcagctggagcagacgctgatgctgcggaccaggacaagcagcgacccctgcacctggcctgccgccgtggccatgcagctgtcgtggagctgctcctgtcctgtggtgtcagcgccaacaccatggactatgggggacacacgcccctgcactgtgctctgcagggcccagctgcagccctggcccagagccccgagcacgtggttcgggctctgctcaaccatggcgccgtccgtgtctggccaggggccctccccaagaaacatcagcgtttctactcctccctcttcgccttggtgaggcagcccaggtcgctgcagcatttgagccgctgtgcgctccgctcccacctggagggcagcctgccccaagcgctgccccgcctccccctgccaccgcgcctgctccgctacctgcagctggattttgagggcgtgctctactagatgtccatggccttttgagagggcctgaaagcagatgccccagcctgcagagggcgcgcctctgcactaactcaggccaggtagccctggcagcaggaggcccagctccgcaggcaggtgtggatgctgcaattcccaatgcagagaagcggaccgacagcggcagccgggtgatgtctgatgaagacacactcctactggggctctcctgaggcccccttctagcctgtgcaaaccctgtatgtgcattaaaaatctccaggtctgtg

SEQ ID NO: 53598 - DNA, 1290 bp, Artificial Sequence
  derived and/or modified sequence
atgctgatgtcctggagcccagaagaatgtaaaggccagggcgagcccctggatgacagacaccccctgtgtgcccggctggtggagaagcccagccggggcagcgaggagcacctgaagagcggccctggccccatcgtgaccaggacagccagcggccctgccctggccttctggcaggccgtgctggccggagatgtgggctgtgtgagccgcatcctggccgacagcagcacaggcctggccccagattctgtgtttgacaccagtgaccctgagcgctggagggacttccgcttcaacatccgggccctgcggctgtggagcctgacctatgaggaggagctgaccacccccctgcacgtggccgccagccggggccacacagaggtgctgcggctgctgctgcggcggcgggcccggccagacagcgcccctgggggccgcacagccctgcacgaggcctgtgccgccggccacacagcctgtgtgcacgtgctgctggtggccggggctgaccccaacattgctgaccaggacggcaagaggcccctgcacctgtgccggggccctggcaccctggagtgtgccgagctgctgctgcgctttggagcccgggtggatggccgctctgaggaggaggaggagacccccctgcacgtggccgcccggctgggccacgtggagctggccgacctgctgctgcggcggggggcctgcccagatgccagaaatgctgagggctggacccccctgctggccgcctgtgatgtgcgctgccagagcatcacagatgctgaggccaccacagcccgctgcctgcagctgtgcagcctgctgctgtctgctggagcagatgctgatgctgctgaccaggacaagcagaggcccctgcacctggcctgcagaagaggacatgctgctgtggtggagctgctgctgagctgtggggtgtctgccaacaccatggactatggaggccacacccccctgcactgtgccctgcagggccctgctgctgccctggcccagagccctgagcacgtggtgcgggccctgctgaaccacggggctgtgcgggtgtggccaggggccctgcccaagaagcaccagcgcttctacagcagcctgtttgccctggtgcggcagcccaggagcctgcagcacctgagccgctgtgccctgcggagccacctggagggcagcctgccccaggccctgccccggctgcccctgcccccccggctgctgcgctacctgcagctggactttgagggcgtgctgtactag

SEQ ID NO: 53599 - DNA, 1425 bp, Artificial Sequence
  derived and/or modified sequence
atgaggggccaggtgtccctgggcgcctgggacaccggggccttctgcctgagcgtcttccccagctgcagcctgagcctgagcctgcccctggcctacaccagccccccaccccacagccccttccctgcccacatgctgatgtcctggagccctgaggagtgcaagggccagggcgagcccctggatgacagacaccccctgtgtgcccggctggtggagaagcccagccggggcagcgaggagcacctgaagagcggccctggccccatcgtgaccaggacagccagcggccctgccctggccttctggcaggccgtgctggccggagatgtgggctgtgtgagccgcatcctggccgacagcagcacaggcctggccccagacagcgtgtttgacaccagtgaccctgagcgctggagggacttccgcttcaacatccgggccctgcggctgtggagcctgacctatgaggaggagctgaccacccccctgcacgtggccgccagccggggccacacagaggtgctgcggctgctgctgcggcggcgggcccggccagattctgcccctgggggccgcacagccctgcacgaggcctgtgccgccggccacacagcctgtgtgcacgtgctgctggtggccggggctgaccccaacattgctgaccaggacggcaagaggcccctgcacctgtgccggggccctggcaccctggagtgtgccgagctgctgctgcgctttggagcccgggtggatggccgctctgaggaggaggaggagacccccctgcacgtggccgcccggctgggccacgtggagctggccgacctgctgctgcggcggggggcctgcccagatgccagaaatgctgagggctggacccccctgctggccgcctgtgatgtgcgctgccagagcatcacagatgctgaggccaccacagcccgctgcctgcagctgtgcagcctgctgctgtctgctggagcagatgctgatgctgctgaccaggacaagcagaggcccctgcacctggcctgccggcggggccacgccgctgtggtggagctgctgctgagctgtggggtgtctgccaacaccatggactatggaggccacacccccctgcactgtgccctgcagggccctgctgctgccctggcccagagccctgagcacgtggtgcgggccctgctgaaccacggggctgtgcgggtgtggccaggggccctgcccaagaagcaccagcgcttctacagcagcctgtttgccctggtgcggcagcccaggagcctgcagcacctgagccgctgtgccctgcggagccacctggagggcagcctgccccaggccctgccccggctgcccctgcccccccggctgctgcgctacctgcagctggactttgaaggagtgctgtactag

SEQ ID NO: 53600 - DNA, 1290 bp, Artificial Sequence
  derived and/or modified sequence
atgctgatgagctggagccccgaggagtgcaagggccagggcgagcccctcgacgatcgccatcccctgtgcgctcgactggtggagaagccttcccgtgggtcggaggagcacctgaaatccggacctggaccaatagttacacgaactgcgagcgggcctgcgcttgctttctggcaggccgtgctcgccggcgacgtgggatgcgtcagtcggatcctcgcggacagctccacaggtctggcgcctgactccgtatttgatacttctgacccagaacggtggcgtgatttccgctttaatattcgggccctgcgactgtggagtctaacctacgaagaagagcttacaacgccactacacgtggcagcatccagggggcatacagaagtgctgagactgcttttgaggcgtcgtgcacgaccggactcagccccgggggggaggactgcactgcacgaagcttgcgccgctggtcataccgcctgcgtccacgtccttttggtggctggtgctgatccgaatatcgctgaccaggatggcaaacggcctctgcatctttgtcgtggtcccgggaccttagagtgtgccgagttactgctaagatttggtgctagggttgatggccggagtgaggaagaagaggagacgcctttgcacgtagcggcccgcctgggacacgtggaacttgctgatcttttactacggcgaggagcttgtcccgacgccaggaacgccgaaggatggactcctctgctggccgcctgcgatgttcggtgtcagtctataacagacgcagaggctacaaccgcccggtgtctccaactctgtagtttgttattgagtgccggtgccgacgccgatgccgctgatcaagataagcagagacccctccatctggcctgcaggaggggtcacgccgccgtggtggaactgctgctttcatgtggagtgtcagctaacactatggactatggtggacacacccctcttcattgcgctttgcaaggccccgccgcagccctggcccagtctcctgaacatgtcgttcgtgccttattgaaccacggtgccgtgagagtgtggcctggagcgctgccaaaaaagcaccaacgattttactcctccctgttcgccctggtccggcagcctcggtcacttcagcatctctctcgctgtgctttacgttctcatttggaaggctcattgcctcaggccctgccccgcctgccactgccaccccgattgctgaggtacctgcaattggacttcgagggggtgctctactag

SEQ ID NO: 53601 - DNA, 1425 bp, Artificial Sequence
  derived and/or modified sequence
atgcggggccaggtgagcctgggcgcctgggacaccggcgccttctgcctgtcggtgtttccctcatgctctttatccttgagtctcccattggcgtacacgagtccgccaccccatagcccattccctgcgcatatgcttatgagttggtcacccgaggagtgcaagggccaaggcgaaccgcttgacgataggcaccctctctgcgcacgccttgttgagaagccaagtcgagggtcggaggagcatctgaaatctggaccagggcctatcgtgacccggactgcctcggggccagctctcgccttctggcaggctgtgctggctggagatgtgggttgtgtctccagaattctagcggactcgtccaccggccttgcccctgacagcgtcttcgacacaagtgacccagaacgatggagagactttcgcttcaatatcagagctctacgcctctggagcctgacctacgaggaagagctcacaactcctttgcacgtggctgcctctcgcgggcatactgaggtgttgagactcctcctccgtagaagggctcgccccgacagtgcaccagggggacgcaccgcacttcacgaggcctgcgccgctggccacacagcctgcgtgcacgttttgctggtggccggagccgacccaaatatcgccgaccaggacggaaaaaggcctttgcatctgtgtcgagggccaggcactttggaatgcgctgaactcctgttaaggtttggggcccgtgtggatggtcggagcgaggaagaggaggaaactcctctccacgttgcagcacggctcggacatgtagagttagctgatctactgctgagaagaggagcctgcccggacgcaagaaacgccgagggctggaccccactgctcgccgcctgtgatgtcagatgtcagtccatcaccgacgccgaagcaacgactgctcgctgcttacaactgtgctccctgttgctgtctgccggtgccgacgccgacgccgcagaccaggataagcagcgcccgctccatcttgcgtgtcggcggggtcacgcagcagtggtcgagttgctgctatcatgcggagtgtccgccaacactatggactacggggggcatactcctctgcattgtgccctccagggccccgccgccgccctggctcaaagcccagagcacgttgtgcgcgcccttctcaaccacggggctgtgagggtgtggcccggagcactgccaaagaagcaccagcgcttctatagttctttgttcgccctagtgaggcaacctcggtcactgcaacacctgtcgaggtgtgcattacggtctcaccttgaaggctccctgccccaggctttgcctcgcctcccattgccgccacgcctgctgagatacctgcaactggatttcgagggagtgctctattag

SEQ ID NO: 53602 - DNA, 1290 bp, Artificial Sequence
  derived and/or modified sequence
atgctgatgtcctggtctccggaggaatgcaaaggccagggcgagccattagacgatcgacacccactgtgcgcacgtttggtggaaaaaccatcacgaggttcggaggagcacctgaagtcgggccctgggcctattgtaaccagaaccgcctctggtccggcacttgccttttggcaggcggtgttagcaggcgacgtgggatgcgtctctagaattcttgcagacagtagtacaggtctagcacccgactccgtgttcgacacgtccgatcctgaacgctggcgggatttccgctttaacattagggccctgagactctggtctttgacttacgaagaagagcttacaacccccctccatgtcgcggcatctagggggcacactgaagtcctgcgtctgctgcttcgtagaagagcaagaccagattccgcccctggcggacgaacagcacttcatgaggcctgcgccgctgggcatacagcatgcgtgcatgtgttgctagtagctggggctgatccaaatatcgccgaccaggacggcaagagacctttacacttgtgtcggggaccaggcacactcgagtgcgctgagctgctgctaaggtttggggctcgcgtagatggccgatctgaggaggaagaggaaactcctcttcacgtggcggcacgcctgggccacgtcgagcttgctgatctgttgctccggcgtggtgcctgcccagatgcccgaaatgcagaaggttggactcccttgcttgccgcttgtgatgttcggtgtcagagtattacggacgctgaagccactactgccagatgcttgcagctgtgcagtctgttactgagcgccggagcagacgccgacgctgctgaccaggataagcagcggcctctgcatttagcatgtcgacgaggccatgccgcagtggtggagctactgttatcttgtggtgtgagcgccaacacaatggactatggtggacataccccgctccattgcgccctccaggggcctgcagcagctcttgcccagtctcctgagcacgtcgtcagagctttgctgaaccacggcgctgttcgagtctggcctggggcattaccaaagaagcatcaaagattctactccagcctgttcgcactcgtgcggcaaccccgatccctccaacacttgtcacggtgtgcgctgcggtcacaccttgaaggtagtctgccacaggctcttccaagactaccactcccgccaagactgcttcggtacctacaactggatttcgaaggggtcttatattag

SEQ ID NO: 53603 - DNA, 1425 bp, Artificial Sequence
  derived and/or modified sequence
atgagagggcaggtctctttgggcgcatgggacactggagccttctgcttgtccgtgtttccctcctgcagcctctcactttccctacccctggcatatacatctcctccccctcactctcccttccccgctcacatgcttatgagttggagccctgaggaatgtaaaggtcagggggagcctctggacgaccggcaccccttatgcgccagactggtagaaaaaccgtccagaggatcagaggagcacctgaaatctggcccaggacctatagtgactaggactgcatccggaccagctctggccttttggcaggccgtgctcgctggtgacgtcggctgcgtttcgagaattcttgctgattcgagcactgggcttgcacctgattccgtcttcgatacttcagaccccgagcgttggcgagattttcgcttcaacatccgggctctgcggctgtggtctctgacctatgaagaggaactgactacaccactccatgttgcggcatccaggggccatactgaagtcttaagattactgcttcggcgacgggctagacccgattccgcccctggcggacgtacagctctgcacgaggcctgcgccgcaggtcacactgcttgtgtacacgtcttattggtcgccggtgcagacccaaacatcgctgaccaggatggtaagagacctcttcacctttgcaggggacctgggacacttgagtgcgctgaactgttactgaggtttggcgctcgcgttgacgggcgttctgaagaagaggaagagaccccactacatgtcgctgctcgtctgggccacgtcgaactcgctgacctgctcctgagaagaggagcctgcccagacgccagaaatgccgagggatggaccccattgcttgccgcttgcgacgtccgctgccagtctatcacagatgccgaggcgacaaccgctcgctgcttgcagctgtgtagcctgctgctctcggcaggcgcagatgctgacgccgcagatcaagataagcaacgcccactgcatctggcatgtcgaagagggcacgcagctgtggttgagctgctgctgagctgtggcgtgagtgcgaacaccatggactatggcggacatacgcccctgcattgtgccctgcagggcccagccgcagcactcgctcagtccccagaacacgtagtgcgcgcactcctgaatcatggagctgtccgcgtgtggccaggcgcacttccaaagaaacatcagaggttctatagcagcctgtttgctcttgtgcgccagcctcggtccctgcagcatttgagtagatgtgcgctaaggtcccacctggaggggtcccttccacaagcgctacccaggctgccattaccaccccgtctgttgcgatatctccagcttgactttgagggggtgctatactag

SEQ ID NO: 53604 - DNA, 939 bp, Artificial Sequence
  derived and/or modified sequence
atgggcagtaaggctttgcctgctccaatacctctgcatccctccctgcagctgaccaactacagcttcctccaggcagtgaatacatttcccgccactgtggatcatttgcaagggctctatggtttgtctgcagttcagaccatgcatatgaatcactggaccttagggtatcccaatgtgcatgaaataacccgctcgacaataaccgagatggctgcagcacagggactggtagatgctcgatttccttttccagccctgccctttacaacccacttgttccaccccaaacagggcgcgatcgcacacgttctgcccgctcttcacaaggacagacccagatttgattttgctaatcttgccgttgcagccactcaggaagaccccccaaaaatgggggacctgagtaagcttagtcctggtcttgggtcacctattagtggccttagcaagcttacaccagaccgaaagccctccaggggacggctgccttctaagaccaaaaaggaattcatttgtaaattttgcggacggcattttacaaagtcctataacctcctcattcacgagcgcacgcatacagatgaacgtccatacacctgcgatatatgtcacaaggccttccgccggcaggaccacctgcgggaccatcgatatatccacagcaaggagaagccctttaaatgtcaggaatgtggaaaagggttttgtcagtcacgcacgcttgccgtgcataaaaccctgcacatgcaggaatctccccacaagtgtcctacatgtggcagaacatttaaccagcgatcaaatctaaagacacatttgctcacccacacagacatcaaaccctactcatgtgaacagtgcggcaaggtgtttcgcagaaactgcgatctgaggaggcactccctgacacacaccccccggcaggatttttag

SEQ ID NO: 53605 - DNA, 939 bp, Artificial Sequence
  derived and/or modified sequence
atgggaagcaaggccctgccagcacccatacctctccatcccagcctgcagttgacaaattacagttttctgcaggccgtgaataccttccctgccaccgtggaccacctgcagggcctttacggcctgagcgctgtacagactatgcatatgaatcattggacgttgggttaccctaatgttcatgagattacaaggtcaacaatcactgagatggcagcagcacaggggctcgtggacgctcgctttcccttccctgccctcccttttaccactcatctctttcacccgaaacagggagcaatcgcgcatgttctgcccgccctgcataaagaccgccccagattcgatttcgccaacctagccgttgcagcaacacaggaggatcctccaaaaatgggggacttgtctaagttgtcccctggcctcggctctcctatctctgggctaagcaagctcacccctgatcggaagccttcgcggggacggttgccttcaaagaccaaaaaagagtttatatgtaaattttgcgggcgacacttcactaaaagttataacctcctgattcacgaaaggacacatactgacgaacgcccttacacctgtgacatatgtcacaaagcgttcagaagacaggatcacttgcgcgaccatcggtatatacactccaaagaaaaaccctttaagtgccaggagtgtggtaagggattttgccaatctcgcacattggcagttcacaagacactgcacatgcaggagtctcctcacaagtgccctacatgtgggcgaacttttaatcagagatccaatttaaaaacccacctactgacccatacagacattaagccctatagctgtgagcagtgcggcaaggtttttcgccgaaactgcgatctccgacgccattccctaacgcacacaccacgccaggatttctag

SEQ ID NO: 53606 - DNA, 939 bp, Artificial Sequence
  derived and/or modified sequence
atgggcagcaaggccctgcctgcccccatccccctgcaccccagcctgcagctgaccaactacagcttcctgcaggccgtgaacaccttccctgccaccgtggaccacctgcagggcctgtatggcctgtctgctgtgcagaccatgcacatgaaccactggaccctgggctaccccaacgtgcatgagatcaccaggagcaccatcacagagatggccgccgcccagggcctggtggatgcccgcttccccttccctgccctgcccttcaccacccacctgttccaccccaagcagggcgccatcgcccacgtgctgcctgccctgcacaaggaccggcccaggtttgattttgccaacctggccgtggccgccacccaggaggacccccccaagatgggagacctgagcaagctgagccctggcctgggcagccccatcagcggcctgagcaagctgaccccagacaggaagcccagccggggccgcctgcccagcaagaccaagaaggagttcatctgcaagttctgtggccgccacttcaccaagagctacaacctgctgatccacgagaggacccacacagatgagcggccctacacctgtgacatctgccacaaggccttccggcggcaggaccacctgcgggaccaccgctacatccacagcaaggagaagcccttcaagtgccaggagtgtgggaagggcttctgccagagcaggaccctggccgtgcacaagaccctgcacatgcaggagagcccccacaagtgccccacctgtggccgcaccttcaaccagaggagcaacctgaagacccacctgctgacccacacagacatcaagccctacagctgtgagcagtgtgggaaggtgttcagaagaaactgtgacctgcggcggcacagcctgacccacaccccccggcaggacttctag

SEQ ID NO: 53607 - DNA, 939 bp, Artificial Sequence
  derived and/or modified sequence
atgggcagcaaggccctgcccgcccccatccccctgcaccccagcttacagttaaccaactatagcttccttcaagccgtcaatacatttcccgccaccgtagaccatctgcagggtttgtatggtttaagcgctgttcagaccatgcacatgaatcactggaccctcgggtaccctaatgtgcacgaaatcaccagaagtactattactgagatggccgcggcacaggggctggtagatgcccgttttccgttcccagctctccccttcaccactcacctctttcacccaaagcagggagccattgcccatgtccttcctgctttgcataaggacaggcccagattcgacttcgcgaatctggcagtggccgcgacccaggaggatcccccaaagatgggagatttgtctaaactatctcctggactgggctcacccatttccggacttagcaaactcacgcccgatcggaaaccatcccgcggccggctaccatctaagacgaagaaagagttcatatgcaagttctgtggacgccacttcacaaaatcatacaacctgcttattcatgagcgcacccacaccgacgaacgtccttatacatgtgacatttgtcacaaggccttccggcgacaggaccatcttcgtgaccatagatatattcatagtaaggagaaaccatttaagtgtcaggagtgcggcaagggtttttgccagtcgagaacattggcagtacataaaaccctgcatatgcaagaatctcctcataagtgccctacctgcggccggacatttaaccaacggtctaatcttaagacacacctgttaactcacactgacattaagccctatagctgtgagcagtgtgggaaagtgttcaggcgtaattgtgacctgaggcgccacagcctcacacatactcccagacaggacttttag

SEQ ID NO: 53608 - DNA, 939 bp, Artificial Sequence
  derived and/or modified sequence
atgggcagcaaggccctgcccgcccccatccccctgcaccccagccttcagctgactaattattctttccttcaggcagtcaatacattccccgctaccgtggaccacctccagggcctttatgggttatccgctgtgcagacgatgcacatgaatcattggaccctggggtatccaaatgttcatgagatcacccggtcaaccattaccgagatggccgccgcgcagggtctcgtcgatgctcggttcccttttcctgccctccccttcactacccatctgtttcatccgaaacagggcgcaatagcccacgtgctgccagctttacacaaagacaggccgcgattcgactttgccaacctagcagtggcagcgacccaggaggaccctcccaagatgggtgacctgtcgaaactgtccccaggtcttggcagcccaatctctggacttagcaaattgactcccgacaggaagccctcccgaggtagactgccctctaagaccaaaaaagagttcatctgtaagttttgcggcagacattttaccaagtcatataatctgctgatacatgagcgcactcacactgacgagcgcccatacacatgcgatatctgccataaagccttcagacgccaggaccatttgagagaccaccgttacattcatagtaaagagaaaccatttaagtgccaggaatgtgggaagggattctgtcagagccgtacactggccgtgcataagacactgcacatgcaagagagtccccacaagtgtcctacctgtggtagaaccttcaatcaaaggagcaatctgaagacacatttgctcacccatactgatataaagccatactcctgcgagcagtgcgggaaagtctttaggcgcaactgtgacctgaggcgacactcactcactcacacgcctaggcaggacttctag

SEQ ID NO: 53609 - DNA, 939 bp, Artificial Sequence
  derived and/or modified sequence
atgggctcaaaggctttaccggctcccatcccccttcacccttccctgcagttgacaaattactctttcctccaggcagtaaacacttttccagctacagtcgaccatcttcaggggctctatggactatctgcggtccagacgatgcacatgaaccactggacccttggctaccccaatgtccatgagatcacacgctcaaccataacagagatggcagctgcccagggtctggtggacgcaaggttcccgttccccgcactccctttcacaacacacctctttcatcccaaacagggtgcaattgcccacgtccttcctgcgctgcacaaggatcgtcccagattcgacttcgccaatctagcggtggccgctacacaggaggacccgcctaagatgggagacctgagtaagctgtcgccagggctggggtcacctatcagcgggctgagtaagttaacaccagatcgaaaaccatcacgcggacgcctgccttcaaagacgaagaaggaatttatttgcaaattttgtggtagacacttcacaaagtcatacaaccttctgattcatgaaaggactcacaccgacgagcgtccgtatacttgtgatatttgccacaaagcttttcggagacaggaccaccttcgagaccaccgctatatacacagcaaggagaagccattcaagtgccaagagtgcggaaagggattctgtcagtctaggactctcgccgtgcacaaaaccctacacatgcaggaatccccccacaagtgtccaacgtgcggtaggaccttcaaccaacggagtaatctgaaaactcatctcttaacccataccgacatcaagccctattcctgcgagcaatgcggcaaagtgtttcgtaggaactgcgacttgaggaggcattcactgactcacaccccgcgtcaagacttctag

SEQ ID NO: 53610 - DNA, 939 bp, Artificial Sequence
  derived and/or modified sequence
atgggctccaaagcgctgcccgcacccatcccattacacccttcattgcaattaaccaactacagctttctccaggccgtaaacacattccctgcgactgtggatcaccttcaggggctctatggactatcagccgtccagaccatgcacatgaatcactggaccctaggataccccaacgtccacgaaattacacggagtaccatcactgagatggcagctgcacaaggacttgtcgatgctcggtttccgttccccgcactgccgttcacgacccatctctttcaccctaaacagggggcaattgctcacgtcctccccgcattacacaaagatcgtccccgttttgatttcgccaatttggcagtcgctgctacccaggaggaccctccaaaaatgggcgatctatccaaactatcgccagggctcggctccccgatctccgggctcagcaagttgacccctgaccgaaaaccttctaggggcaggctgccctctaagactaagaaggaattcatctgtaaattctgcgggagacattttaccaaatcctataatcttctgattcacgagcgtacccataccgacgaacggccatacacttgtgatatatgccataaggcttttaggaggcaggatcatctgagggatcaccgctacatccactctaaagagaaaccctttaaatgccaagaatgtggcaaagggttttgtcaatctaggaccctggcagtacataaaaccctgcatatgcaggagtcaccgcataagtgccctacctgcgggcgaacatttaatcagcgttcgaatctgaagacacatctgttaacacataccgatataaagccatatagctgcgaacaatgtggcaaagtgttccggagaaattgcgatttaagaagacactcccttacccatacccctcgtcaggatttttag

SEQ ID NO: 53611 - DNA, 939 bp, Artificial Sequence
  derived and/or modified sequence
atgggcagcaaggccctgcccgcccccatccccctgcaccccagcctgcagctgaccaactacagcttcctgcaggccgtgaacaccttccccgccaccgtggaccacctgcagggcctgtacggcctgagcgccgtgcagaccatgcacatgaaccactggaccctgggctaccccaacgtgcacgagatcaccagaagcaccatcaccgagatggccgccgcccagggcctggtggacgccagattccccttccccgccctgcccttcaccacccacctgttccaccccaagcagggcgccatcgcccacgtgctgcccgccctgcacaaggacagacccagattcgacttcgccaacctggccgtggccgccacccaggaggacccccccaagatgggcgacctgagcaagctgagccccggcctgggcagccccatcagcggcctgagcaagctgacccccgacagaaagcccagcagaggcagactgcccagcaagaccaagaaggagttcatctgcaagttctgcggcagacacttcaccaagagctacaacctgctgatccacgagagaacccacaccgacgagagaccctacacctgcgacatctgccacaaggccttcagaagacaggaccacctgagagaccacagatacatccacagcaaggagaagcccttcaagtgccaggagtgcggcaagggcttctgccagagcagaaccctggccgtgcacaagaccctgcacatgcaggagagcccccacaagtgccccacctgcggcagaaccttcaaccagagaagcaacctgaagacccacctgctgacccacaccgacatcaagccctacagctgcgagcagtgcggcaaggtgttcagaagaaactgcgacctgagaagacacagcctgacccacacccccagacaggacttctag

SEQ ID NO: 53612 - protein, 296 aa, Artificial Sequence
  derived and/or modified sequence
MSWVQATLLARGLCRAWGGTCGAALTGTSISQVPRRLPRGLHCSAAAHSSEQSLVPSPPEPRQRPTKALVPFEDLFGQAPGGERDKASFLQTVQKFAEHSVRKRGHIDFIYLALRKMREYGVERDLAVYNQLLNIFPKEVFRPRNIIQRIFVHYPRQQECGIAVLEQMENHGVMPNKETEFLLIQIFGRKSYPMLKLVRLKLWFPRFMNVNPFPVPRDLPQDPVELAMFGLRHMEPDLSARVTIYQVPLPKDSTGAADPPQPHIVGSGRDAGGVEPLLPDAAGPGVCEEWLGQLRV

SEQ ID NO: 53613 - DNA, 891 bp, Artificial Sequence
  derived and/or modified sequence
atgtcctgggtccaggccaccctgctggctcgcgggctttgccgggcttgggggggcacctgtggagccgcgctaaccgggacttctatctcgcaggtaccaaggcgcctcccacggggtctgcattgctctgctgcagcacattctagcgagcaatcgctcgtgccctcccctcctgagccccggcagaggccaactaaagcgctcgtacctttcgaagatttgttcggccaagcccctggcggtgagagggacaaggcttcctttctccaaactgtccaaaaatttgcagagcatagtgtaagaaaacgcggtcacatagactttatttatctggcgttgaggaagatgcgggaatatggggtcgagcgcgacctggccgtttacaatcagctgctcaatattttcccaaaggaggtgtttcggcctaggaacatcattcagagaattttcgtccattaccctcgacagcaggagtgcggcattgctgttctggaacagatggagaatcacggcgtgatgcccaacaaggagactgaatttctgttgatccagattttcggtagaaagtcatacccaatgctgaaactggtccggctaaaactgtggttcccccggttcatgaatgtcaatccttttccagtgcctcgggatctgccacaggaccccgtcgaacttgcgatgttcggtctaaggcatatggaaccagatctgtccgcgagggtgactatctaccaggttccacttcccaaagactctactggggcagcagatccaccccagccacacattgtgggaagcggcagagatgcaggaggcgtagagcctttgctgccggatgccgccggccctggggtgtgcgaggaatggctgggacagctgcgggtgtag

SEQ ID NO: 53614 - DNA, 891 bp, Artificial Sequence
  derived and/or modified sequence
atgtcctgggtgcaggccaccctgctggcccggggcctgtgccgggcctggggcggcacctgtggggccgccctgaccggcaccagcatcagccaggtgccccggcggctgccccggggcctgcactgcagcgctgctgcccacagcagcgagcagagcctggtgcccagccccccagagccccggcagaggcccaccaaggccctggtgccctttgaggacctgtttggccaggcccctggaggagagcgggacaaggccagcttcctgcagacagtgcagaagtttgctgagcacagcgtgaggaagaggggccacatcgacttcatctacctggccctgaggaagatgagagaatatggagtggagcgggacctggccgtgtacaaccagctgctgaacatcttccccaaggaggtgttccggcccaggaacatcatccagaggatctttgtgcactacccccggcagcaggagtgtggcattgctgtgctggagcagatggagaaccacggcgtgatgcccaacaaggagacagagttcctgctgatccagatctttggaaggaagagctaccccatgctgaagctggtgcggctgaagctgtggttcccccgcttcatgaatgtgaaccccttccctgtgccccgggacctgccccaggaccctgtggagctggccatgtttggcctgcggcacatggagccagacctgagcgcccgggtgaccatctaccaggtgcccctgcccaaggacagcactggagctgctgaccccccccagccccacatcgtgggcagcggcagagatgctggaggagtggagcccctgctgcctgatgctgctggccctggggtgtgtgaggagtggctgggccagctgcgggtgtag

SEQ ID NO: 53615 - DNA, 891 bp, Artificial Sequence
  derived and/or modified sequence
atgagctgggtgcaggccaccctgctggcccggggcctgtgccgggcctgggggggcacctgcggagctgctctgaccggcacttctatttcgcaagtgcctcgccggctgccacgcggcttgcactgtagtgcggcagcccactccagcgagcagtccttggtccccagccctcccgaaccacggcagcggcctacaaaggcattggttcccttcgaagatctcttcggccaggcacccgggggagaaagggacaaggccagcttcctacagacagttcaaaagtttgccgagcactctgttagaaagcggggtcacattgacttcatttacctggctctgcggaagatgagagaatatggtgtcgaaagggaccttgctgtgtataatcagctcttgaacatctttcctaaggaggtgtttcggccacggaatattatacaaagaatcttcgttcactacccgcgccaacaagaatgtggcatcgcggtgctcgagcagatggaaaatcatggcgtgatgccaaataaagagaccgagttcctgttgatacagattttcggccgcaagagctacccaatgctgaagttggtacgtctgaaactttggttcccacggtttatgaatgtgaatcctttccccgtgcccagagatctgccacaagatcccgtcgagctggccatgttcggacttaggcatatggagcctgatctgagcgcccgggtaacaatatatcaggttcccctcccgaaagactccactggggcagcagaccctccacaacctcacatagtgggatcaggtcgcgacgccggaggagtggagcccctgctgcccgacgccgcagggccaggtgtgtgcgaagagtggctggggcagcttagggtgtag

SEQ ID NO: 53616 - DNA, 891 bp, Artificial Sequence
  derived and/or modified sequence
atgagctgggtccaggcaacgttgctagctaggggcctttgccgggcttggggcggaacatgtggcgcagcgctgactggcacgagcatttcccaggtccctcgtagactcccacgcggtttgcattgctcagccgcagcccattcctcagagcagtcattggtgccctctccacccgagccgaggcagaggcctacgaaggctctggtcccattcgaggatctcttcggtcaagcgcctggcggagagcgggataaggctagtttcctgcaaaccgttcagaagttcgcagagcactccgttaggaagagagggcacattgacttcatttatttagccctgaggaagatgcgggagtacggagttgagcgcgacctggcggtgtacaatcagttgttgaatatcttccctaaagaggtttttaggcctcgcaacatcattcagaggatcttcgtacactatcctagacagcaggagtgtggaatcgctgtcctggagcagatggaaaatcacggcgttatgcccaacaaagagacggagtttctccttatccagatattcgggagaaaatcctatcctatgttaaagcttgtgagactcaaactctggtttcctaggtttatgaatgtaaaccccttccctgtcccaagggatctgcctcaggaccctgtggaattagcaatgtttgggctgcggcacatggagcccgatctttccgctagagtgactatctaccaggtgcccctgcccaaggacagcacaggcgcagccgatcctcctcagccacatattgttggcagcggacgggacgccggaggcgtagaacctctgctgcctgacgccgctggccctggtgtctgtgaggagtggctggggcagctgagggtttag

SEQ ID NO: 53617 - DNA, 891 bp, Artificial Sequence
  derived and/or modified sequence
atgagctgggtgcaggccaccctgctggccagaggcctgtgcagagcctggggcggcacctgcggcgccgccctgaccggcaccagcatcagccaggtgcccagaagactgcccagaggcctgcactgcagcgccgccgcccacagcagcgagcagagcctggtgcccagcccccccgagcccagacagagacccaccaaggccctggtgcccttcgaggacctgttcggccaggcccccggcggcgagagagacaaggccagcttcctgcagaccgtgcagaagttcgccgagcacagcgtgagaaagagaggccacatcgacttcatctacctggccctgagaaagatgagagagtacggcgtggagagagacctggccgtgtacaaccagctgctgaacatcttccccaaggaggtgttcagacccagaaacatcatccagagaatcttcgtgcactaccccagacagcaggagtgcggcatcgccgtgctggagcagatggagaaccacggcgtgatgcccaacaaggagaccgagttcctgctgatccagatcttcggcagaaagagctaccccatgctgaagctggtgagactgaagctgtggttccccagattcatgaacgtgaaccccttccccgtgcccagagacctgccccaggaccccgtggagctggccatgttcggcctgagacacatggagcccgacctgagcgccagagtgaccatctaccaggtgcccctgcccaaggacagcaccggcgccgccgaccccccccagccccacatcgtgggcagcggcagagacgccggcggcgtggagcccctgctgcccgacgccgccggccccggcgtgtgcgaggagtggctgggccagctgagagtgtag

SEQ ID NO: 53618 - DNA, 1535 bp, Artificial Sequence
  derived and/or modified sequence
gatttgctacctccctggagctccctgacccggacgctctctgggccaatatggcagcgcccagcaacaagacagagctggcctggagtccgcggctggccgcgtgagtaggtgattgtctgacaagcagaggcatgagctgggtccaggccaccctactggcccgaggcctctgtagggcctggggaggcacctgcggggccgccctcacaggaacctccatctctcaggtccctcgccggctccctcggggcctccactgcagcgcagctgcccatagctctgaacagtccctggttcccagcccaccggaaccccggcagaggcccaccaaggctctggtgccctttgaggacctgtttgggcaggcgcctggtggggaacgggacaaggcgagcttcctgcagacggtgcagaaatttgcggagcacagcgtgcgtaagcggggccacattgacttcatctacctggccctgcgcaagatgcgggagtatggtgtcgagcgggacctggctgtgtacaaccagctgctcaacatcttccccaaggaggtcttccggcctcgcaacatcatccagcgcatcttcgtccactaccctcggcagcaggagtgtgggattgctgtcctggagcagatggagaaccacggtgtgatgcccaacaaggagacggagttcctgctgattcagatctttggacgcaaaagctaccccatgctcaagttggtgcgcctgaagctgtggttccctcgattcatgaacgtcaaccccttcccagtgccccgggacctgccccaggaccctgtggagctggccatgtttggcctgcggcacatggagcctgaccttagtgccagggtcaccatctaccaggttcctttgcccaaagactcaacaggtgcagcagatcccccccagccccacatcgtaggaagtggaagagacgccggaggagtggaacctctactacccgatgcagctggacctggagtatgtgaggagtggctgggacaactacgagtttgacatcaatgaagtggaggaaggccctgtcttcgccatgtgcatggcgggtgctcatgaccaggcgacgatggctaagtggatccagggcctgcaggagaccaacccaaccctggcccagatccccgtggtcttccgcctcgccgggtccacccgggagctccagacatcctctgcagggctggaggagccgcccctgcccgaggaccaccaggaagaagacgacaacctgcagcgacagcagcagggccagagctagtctgagccggcgcgagggcacgggctgtggcccgaggaggcggtggactgaaggcatgagatgccctttgagtgtacagcaaatcaatgttttcctgcttggggctctcttccctcatctctagcagtatggcatcccctccccaggatctcgggctgccagcgatgggcaggcgagacccctccagaatctgcaggcgcctctggttctccgaattcaaataaaaaggggcgggagcgctgttggttgtgcgc

SEQ ID NO: 53619 - protein, 217 aa, Artificial Sequence
  derived and/or modified sequence
MSWVQATLLARGLCRAWGGTCGAALTGTSISQVPLPKDSTGAADPPQPHIVGIQSPDQQAALARHNPARPVFVEGPFSLWLRNKCVYYHILRADLLPPEEREVEETPEEWNLYYPMQLDLEYVRSGWDNYEFDINEVEEGPVFAMCMAGAHDQATMAKWIQGLQETNPTLAQIPVVFRLAGSTRELQTSSAGLEEPPLPEDHQEEDDNLQRQQQGQS

SEQ ID NO: 53620 - DNA, 654 bp, Artificial Sequence
  derived and/or modified sequence
atgtcttgggtgcaagctactctgctggctagaggtctgtgccgcgcctgggggggaacatgcggtgccgccttgacaggtacctcgatttcgcaagtgcctctcccaaaggattctactggagcagctgatccgccccagcctcacatcgttggtattcagtcccccgaccagcaggccgccttggcccggcataatcccgctcgaccagtattcgtggagggccccttctctctgtggctacgcaacaaatgcgtgtattaccacatactgcgagccgaccttctccccccagaggaacgagaggtggaggagactcccgaggaatggaatctgtactaccccatgcagctggacctagaatacgttagatccgggtgggacaactacgagtttgacattaacgaagtggaagaggggcccgtgtttgccatgtgcatggctggcgcacacgaccaggccacaatggctaagtggattcaaggccttcaggagaccaacccgaccctcgcccagatcccggtagtgtttcgcctggcaggcagtacacgagagctacagactagttccgcagggcttgaagagccaccacttccggaagatcaccaggaggaggatgacaatctccagcgtcagcagcagggccaatcatag

SEQ ID NO: 53621 - DNA, 654 bp, Artificial Sequence
  derived and/or modified sequence
atgtcctgggtgcaggccaccctgctggcccggggcctgtgccgggcctggggcggcacctgtggggccgccctgaccggcaccagcatcagccaggtgcccctgcccaaggacagcactggagctgctgaccccccccagccccacatcgtgggcatccagagcccagaccagcaggccgccctggcccggcacaacccagcccggcctgtgtttgtggagggccccttcagcctgtggctgaggaacaagtgtgtgtactaccacatcctgcgggctgacctgctgcccccagaggagcgggaggtggaggagaccccagaggagtggaacctgtactaccccatgcagctggacctggagtatgtgcgcagcggctgggacaactatgaatttgacatcaatgaggtggaggagggccctgtgtttgccatgtgcatggccggggcccatgaccaggccaccatggccaagtggatccagggcctgcaggagaccaaccccaccctggcccagatccctgtggtgttccggctggccggcagcacccgggagctgcagaccagcagcgctggcctggaggagccccccctgcctgaggaccaccaggaggaggatgacaacctgcagaggcagcagcagggccagagctag

SEQ ID NO: 53622 - DNA, 654 bp, Artificial Sequence
  derived and/or modified sequence
atgagctgggtgcaggccaccctgctggcccggggcctgtgccgggcctggggggggacgtgtggagccgccctcactggcactagcatttcgcaggtgcccctgccaaaagattctacaggcgccgccgaccccccgcagccacacatcgttggcattcagtcccccgaccaacaggctgcgctagctcgacataaccctgctcggcctgtctttgtcgagggacctttcagcctatggctgaggaataagtgtgtctattatcacatcctacgcgcggacctcctgccaccggaggagcgtgaagtcgaagaaacccccgaggaatggaacctttactaccctatgcagttagatctggagtatgttcgcagtgggtgggataactacgagtttgacattaacgaggttgaggagggtcccgtgttcgccatgtgtatggccggggcccacgatcaagcgacaatggccaaatggattcagggcttgcaggagacaaatcctacattggctcagatccctgtcgtcttcaggttagcaggcagtacaagggagctccagaccagctctgccggcctggaggaaccccccttgccagaggatcatcaagaagaggatgacaacttgcaaagacagcaacagggacagagctag

SEQ ID NO: 53623 - DNA, 654 bp, Artificial Sequence
  derived and/or modified sequence
atgagttgggtgcaagccactctgttagctcgtgggctgtgccgagcctgggggggaacgtgcggcgctgcgttaacaggtacttcgatttcacaggtgccgctgccaaaggactctaccggagcagctgaccccccacagccacacatcgttggcattcaatcccctgatcaacaggccgctctggctcggcataaccctgcgcgacccgtttttgtcgagggcccattcagtttgtggctcagaaacaagtgtgtctattatcacattctcagggctgatcttcttccacccgaagagagggaagttgaggagacacctgaagagtggaacctgtactaccctatgcaattggatcttgaatacgttaggtccggttgggacaattacgaatttgatattaacgaggttgaggagggtccagtcttcgccatgtgcatggcaggcgctcatgatcaagccaccatggccaagtggattcagggcctccaggagacaaatccaacccttgcccagatcccagtagtgtttagattagccggtagcacccgagaactgcagacaagcagtgcgggactcgaagagcctcccttgcccgaggaccaccaggaagaagatgataatttacaacggcagcagcaagggcaatcttag

SEQ ID NO: 53624 - DNA, 654 bp, Artificial Sequence
  derived and/or modified sequence
atgagctgggtgcaggccaccctgctggccagaggcctgtgcagagcctggggcggcacctgcggcgccgccctgaccggcaccagcatcagccaggtgcccctgcccaaggacagcaccggcgccgccgaccccccccagccccacatcgtgggcatccagagccccgaccagcaggccgccctggccagacacaaccccgccagacccgtgttcgtggagggccccttcagcctgtggctgagaaacaagtgcgtgtactaccacatcctgagagccgacctgctgccccccgaggagagagaggtggaggagacccccgaggagtggaacctgtactaccccatgcagctggacctggagtacgtgagaagcggctgggacaactacgagttcgacatcaacgaggtggaggagggccccgtgttcgccatgtgcatggccggcgcccacgaccaggccaccatggccaagtggatccagggcctgcaggagaccaaccccaccctggcccagatccccgtggtgttcagactggccggcagcaccagagagctgcagaccagcagcgccggcctggaggagccccccctgcccgaggaccaccaggaggaggacgacaacctgcagagacagcagcagggccagagctag

SEQ ID NO: 53625 - DNA, 1042 bp, Artificial Sequence
  derived and/or modified sequence
gatttgctacctccctggagctccctgacccggacgctctctgggccaatatggcagcgcccagcaacaagacagagctggcctggagtccgcggctggccgcgtgagtaggtgattgtctgacaagcagaggcatgagctgggtccaggccaccctactggcccgaggcctctgtagggcctggggaggcacctgcggggccgccctcacaggaacctccatctctcaggttcctttgcccaaagactcaacaggtgcagcagatcccccccagccccacatcgtaggaatccagagtcccgatcagcaggccgccctggcccgccacaatccagcccggcctgtctttgttgagggccccttctccctgtggctccgcaacaagtgtgtgtattaccacatcctcagagctgacttgctgcccccggaggagagggaagtggaagagacgccggaggagtggaacctctactacccgatgcagctggacctggagtatgtgaggagtggctgggacaactacgagtttgacatcaatgaagtggaggaaggccctgtcttcgccatgtgcatggcgggtgctcatgaccaggcgacgatggctaagtggatccagggcctgcaggagaccaacccaaccctggcccagatccccgtggtcttccgcctcgccgggtccacccgggagctccagacatcctctgcagggctggaggagccgcccctgcccgaggaccaccaggaagaagacgacaacctgcagcgacagcagcagggccagagctagtctgagccggcgcgagggcacgggctgtggcccgaggaggcggtggactgaaggcatgagatgccctttgagtgtacagcaaatcaatgttttcctgcttggggctctcttccctcatctctagcagtatggcatcccctccccaggatctcgggctgccagcgatgggcaggcgagacccctccagaatctgcaggcgcctctggttctccgaattcaaataaaaaggggcgggagcgctgttggttgtgcgc

SEQ ID NO: 53626 - DNA, 1272 bp, Artificial Sequence
  derived and/or modified sequence
atggggcagcagcctatcacattcctccggcaggtaatggcgctctgcacgtaccccaatctgcttgattccccttcttttccagaggacgctaagaaaagagcgcgcaggatccttcaggcatgtgggggaaacagcctgggaagctactccgcatcccagggcgtcaactgtatccgcgaggacgttgccgcctacatcacaaggagagatggcggcgtgcctgccgatccagacaatatctatctgaccactggggctagcgacgggattagtaccattcttaagattctggtttctggcggcggtaaatctcgcacgggagtgatgattcctatcccccagtacccactgtactcagcggtgatctcggagctggacgccatccaggtcaactattatcttgatgaagaaaattgctgggctctgaacgtcaacgaactgaggcgcgcagtgcaagaagctaaggaccattgtgaccccaaggttttatgtattataaatccggggaaccccaccggacaggttcaatctcgtaagtgtattgaagacgtgatccattttgcatgggaggaaaaactgttcctcttggccgacgaggtgtatcaagataatgtatatagtcctgattgtcgattccactcctttaaaaaagtcctgtacgaaatgggcccagaatattctagcaatgttgaactcgccagtttccactccacgagtaaagggtacatgggcgagtgtggataccggggcggctatatggaagttattaatctgcatcccgaaattaagggtcagctcgtgaaactattaagcgtaaggctgtgcccccccgtgtcaggacaggcggcaatggacattgtggtgaacccgcccgtagccggtgaggaatcatttgagcaattctccagggaaaaggaatccgttttggggaatcttgccaagaaagcaaaactgacagaggacctcttcaatcaggtgcctgggatccattgtaacccgttgcagggcgccatgtacgcatttccccggattttcataccagcaaaagccgtggaggctgcgcaggctcatcaaatggccccagacatgttttattgtatgaaactactagaggaaactgggatttgcgtcgtgccagggtctgggttcgggcagcgggaaggtacgtatcatttcaggatgaccattctgcctccagtcgaaaagctaaaaaccgttttacaaaaagttaaagatttccatatcaattttctggaaaagtacgcgtag

SEQ ID NO: 53627 - DNA, 1272 bp, Artificial Sequence
  derived and/or modified sequence
atgggccagcagcccatcaccttcctgcggcaggtgatggccctgtgcacctaccccaacctgctggacagccccagcttcccagaagatgccaagaagagggcccggcgcatcctgcaggcctgtggcggcaacagcctgggcagctacagcgccagccagggcgtgaactgcatcagagaagatgtggccgcctacatcaccaggagagatggaggagtgcctgctgaccctgacaacatctacctgaccactggagccagtgatggcatcagcaccatcctgaagatcctggtgtctgggggcggcaagagcaggactggagtgatgatccccatcccccagtaccccctgtacagcgctgtgatcagcgagctggatgccatccaggtgaactactacctggatgaggagaactgctgggccctgaatgtgaatgagctgcggcgggctgtgcaggaggccaaggaccactgtgaccccaaggtgctgtgcatcatcaaccctggcaaccccaccggccaggtgcagagcaggaagtgcattgaagatgtgatccactttgcctgggaggagaagctgttcctgctggctgatgaggtgtaccaggacaacgtgtacagcccagactgccgcttccacagcttcaagaaggtgctgtatgagatgggccctgagtacagcagcaatgtggagctggccagcttccacagcaccagcaagggctacatgggagaatgtggctacagaggaggctacatggaggtgatcaacctgcaccctgagatcaagggccagctggtgaagctgctgtctgtgcggctgtgcccccctgtgtctggccaggccgccatggacatcgtggtgaacccccctgtggccggggaggagagctttgagcagttcagccgggagaaggagagcgtgctgggcaacctggccaagaaggccaagctgacagaagatctcttcaaccaggtgcccggcatccactgcaaccccctgcagggcgccatgtatgccttcccccgcatcttcatcccagccaaggctgtggaggccgcccaggcccaccagatggccccagacatgttctactgcatgaagctgctggaggagaccggcatctgtgtggtgcccggcagcggcttcggccagcgggagggcacctaccacttcaggatgaccatcctgccccctgtggagaagctgaagacagtgctgcagaaggtgaaggacttccacatcaacttcctggagaagtatgcctag

SEQ ID NO: 53628 - DNA, 1272 bp, Artificial Sequence
  derived and/or modified sequence
atgggccagcagcccatcaccttcctgcggcaggtgatggccctgtgtacctacccaaatcttctagattcaccaagctttcccgaagatgcgaaaaagagagctaggaggatcctccaggcttgcggcggcaatagccttggctcatacagcgcttctcaaggagtgaattgtatcagagaggatgtggccgcgtatattacacgccgagacggaggcgtacctgccgatcctgataacatctacctaacgactggagcctccgatgggatatcgactatcctgaagatcctggtctctggaggcggcaaaagtcgcaccggagtgatgatcccgattccacaataccccctttacagcgctgtgatcagtgaactcgacgctattcaggtcaattattatcttgatgaagaaaactgttgggcgcttaatgtaaacgaactgcggcgcgctgtgcaggaagctaaggaccactgcgacccaaaggtcttgtgcattatcaaccccgggaatcccacggggcaagtgcagtcccggaaatgcatcgaggatgtaatacactttgcatgggaggagaagctctttctgctcgccgacgaagtctaccaggacaacgtatatagtcctgactgtcgcttccatagctttaagaaggtgctgtatgaaatgggcccggagtatagctccaatgtggaactcgctagctttcactcaacctcaaagggatacatgggcgagtgtggctataggggaggatatatggaagtgattaatcttcaccccgagataaagggccagcttgtgaagttgctgtctgtgagactgtgtccccctgtaagcggccaagccgccatggatattgtggtcaaccctcctgtggctggagaggagtccttcgagcaattctcacgtgagaaggagtcagtgctgggaaacttagcaaagaaggctaagctgactgaggacctatttaaccaggtgcccggtatccattgtaacccattacagggagctatgtacgccttcccgcgcatcttcattccagccaaagcagtggaagccgcccaggcccaccagatggcacccgacatgttttattgcatgaaactgctggaggagaccggcatttgcgtagtacccggcagcggcttcggacagagggagggcacctaccatttcagaatgactatattaccccctgtcgagaagttgaagaccgttctccagaaagtcaaggactttcacatcaacttcctcgaaaaatatgcttag

SEQ ID NO: 53629 - DNA, 1272 bp, Artificial Sequence
  derived and/or modified sequence
atgggccaacaaccgatcactttcctgagacaggtaatggcgctgtgtacttaccctaacctcctggattccccatcgttcccagaggacgctaaaaaaagggccaggcggattctccaggcttgcggaggcaacagtctcggttcttatagcgcgtcacagggggtgaactgtattagggaggacgtcgctgcttatatcacccgtcgcgatggcggagtgcctgcagaccctgataacatatatcttacaaccggggctagtgacggtatctcaacaattttaaaaatccttgtgtcagggggaggcaaaagcaggaccggggtgatgattccaatcccccagtacccactgtattccgctgtaatctccgagttggacgctatccaggtgaactactacctggacgaggagaactgctgggccttaaatgtcaacgagctgcgcagagccgtgcaagaggccaaagatcactgcgatccaaaagtgttatgtatcattaaccccggtaacccgaccggccaggttcaatcccgcaaatgcatcgaagatgtcatccatttcgcctgggaagaaaagcttttccttttggccgatgaggtctaccaggataatgtgtactcgccggattgccggtttcacagcttcaaaaaggtgctctatgagatgggccctgaatatagttcaaacgtagagttagcctcctttcacagtacttctaaagggtacatgggggagtgcggttatcggggagggtatatggaggtcatcaacctgcatccagagatcaaggggcagttggtgaagcttctgtcggtgcgactttgcccaccagtgtctggacaggctgccatggacattgtggtgaatccccctgtggccggtgaggaaagttttgagcagtttagtcgcgaaaaggagtcggtcctgggcaatctcgccaagaaagcaaaactaactgaagatttattcaatcaggtgcctggcatacactgtaaccctctacagggtgcaatgtacgccttcccacggatcttcataccagctaaagccgtggaggccgctcaggcgcatcagatggcaccagatatgttttattgtatgaagctcctggaggaaactgggatatgtgtagtgcccggtagtgggttcggccagagggaaggcacatatcacttccgaatgactatcctgccccctgttgaaaaactgaaaactgtgctgcagaaagtgaaagatttccacatcaattttctagaaaaatacgcatag

SEQ ID NO: 53630 - DNA, 1272 bp, Artificial Sequence
  derived and/or modified sequence
atgggccagcagcccatcaccttcctgagacaggtgatggccctgtgcacctaccccaacctgctggacagccccagcttccccgaggacgccaagaagagagccagaagaatcctgcaggcctgcggcggcaacagcctgggcagctacagcgccagccagggcgtgaactgcatcagagaggacgtggccgcctacatcaccagaagagacggcggcgtgcccgccgaccccgacaacatctacctgaccaccggcgccagcgacggcatcagcaccatcctgaagatcctggtgagcggcggcggcaagagcagaaccggcgtgatgatccccatcccccagtaccccctgtacagcgccgtgatcagcgagctggacgccatccaggtgaactactacctggacgaggagaactgctgggccctgaacgtgaacgagctgagaagagccgtgcaggaggccaaggaccactgcgaccccaaggtgctgtgcatcatcaaccccggcaaccccaccggccaggtgcagagcagaaagtgcatcgaggacgtgatccacttcgcctgggaggagaagctgttcctgctggccgacgaggtgtaccaggacaacgtgtacagccccgactgcagattccacagcttcaagaaggtgctgtacgagatgggccccgagtacagcagcaacgtggagctggccagcttccacagcaccagcaagggctacatgggcgagtgcggctacagaggcggctacatggaggtgatcaacctgcaccccgagatcaagggccagctggtgaagctgctgagcgtgagactgtgcccccccgtgagcggccaggccgccatggacatcgtggtgaacccccccgtggccggcgaggagagcttcgagcagttcagcagagagaaggagagcgtgctgggcaacctggccaagaaggccaagctgaccgaggacctgttcaaccaggtgcccggcatccactgcaaccccctgcagggcgccatgtacgccttccccagaatcttcatccccgccaaggccgtggaggccgcccaggcccaccagatggcccccgacatgttctactgcatgaagctgctggaggagaccggcatctgcgtggtgcccggcagcggcttcggccagagagagggcacctaccacttcagaatgaccatcctgccccccgtggagaagctgaagaccgtgctgcagaaggtgaaggacttccacatcaacttcctggagaagtacgcctag

SEQ ID NO: 53631 - protein, 462 aa, Artificial Sequence
  derived and/or modified sequence
MAATVNLELDPIFLKALGFLHSKSKDSAEKLKALLDESLARGIDSSYRPSQKDVEPPKISSTKNISIKQEPKISSSLPSGNNNGKVLTTEKVKKEAEKRPADKMKSDITEGVDIPKKPRLEKPETQSSPITVQSSKDLPMADLSSFEETSADDFAMEMGLACVVCRQMMVASGNQLVECQECHNLYHRDCHKPQVTDKEANDPRLVWYCARCTRQMKRMAQKTQKPPQKPAPAVVSVTPAVKDPLVKKPETKLKQETTFLAFKRTEVKTSTVISGNSSSASVSSSVTSGLTGWAAFAAKTSSAGPSTAKLSSTTQNNTGKPATSSANQKPVGLTGLATSSKGGIGSKIGSNNSTTPTVPLKPPPPLTLGKTGLSRSVSCDNVSKVGLPSPSSLVPGSSSQLSGNGNSGTSGPSGSTTSKTTSESSSSPSASLKGPTSQESQLNAMKRLQMVKKKAAQKKLKK

SEQ ID NO: 53632 - protein, 88 aa, Artificial Sequence
  derived and/or modified sequence
MAATVNLELDPIFLKALGFLHSKSKDSAEKLKALLDESLARGIDSSYRPSQKDVEPPKISSTKNISIKQEPKISSSLPSGNNNGKVLT

SEQ ID NO: 53633 - protein, 132 aa, Artificial Sequence
  derived and/or modified sequence
MAATVNLELDPIFLKALGFLHSKSKDSAEKLKALLDESLARGIDSSYRPSQKDVEPPKISSTKNISIKQEPKISSSLPSGNNNGKVLTTEKVKKEAEKRPADKMKSDITEGVDIPKKPRLEKPETQSSPITV

SEQ ID NO: 53634 - protein, 159 aa, Artificial Sequence
  derived and/or modified sequence
MAATVNLELDPIFLKALGFLHSKSKDSAEKLKALLDESLARGIDSSYRPSQKDVEPPKISSTKNISIKQEPKISSSLPSGNNNGKVLTTEKVKKEAEKRPADKMKSDITEGVDIPKKPRLEKPETQSSPITVQSSKDLPMADLSSFEETSADDFAMEMG

SEQ ID NO: 53635 - protein, 18 aa, Artificial Sequence
  derived and/or modified sequence
MAATVNLELDPIFLKALG

SEQ ID NO: 53636 - DNA, 1710 bp, Artificial Sequence
  derived and/or modified sequence
agggaccaccgggaacagacggatcggcagggcggggcggaacggtgaggccatctactgaaacacagaagcaattttaaaagaaaatggaggaagtataactgatctttgcagaaagtggggaagtgagttgaccagagaaggatgagagaattgccaagttgtactgaacgccaagctgagaatggtgattctgaagatagaatgcgtttgcaatggctgctactgtgaacttggaacttgatcccatttttttgaaagcactaggtttcttgcattcaaagagtaaagattctgctgaaaagctaaaagcactgcttgatgaatctttggctcggggcattgattccagttaccgtccatctcaaaaggatgtggagccacccaaaatttcaagcacaaaaaacatttccattaagcaagagcccaaaatatcatccagtcttccttctggtaataataatggcaaggtcctcacaactgaaaaggtaaagaaggaagctgaaaagagacctgctgataaaatgaaatcagacatcactgaaggagttgatattccaaagaaacctagattggagaaaccagaaacacagtcatctcccattactgtccaaagtagcaaggatttacctatggctgacctttccagttttgaggagaccagtgctgatgattttgccatggagatgggattggcctgcgttgtttgtaggcaaatgatggtggcatctggcaatcaattagtagaatgtcaggagtgccataatctctaccaccgagattgtcataaaccccaggtgacagacaaggaagcgaatgaccctcgcctggtgtggtattgtgcccgatgtaccagacaaatgaaaagaatggctcaaaaaactcagaaaccaccgcagaaaccagcccctgcagttgtttctgtaactccagctgtcaaagatccattggttaagaaaccagaaactaaactgaaacaagagacaacttttctagcgtttaagagaacagaagtcaagacatccacagttatttcaggaaattcttctagtgccagcgtttcctcgtcagtaactagtggcttaactggatgggcagcttttgcagccaaaacttcctctgctggtccttcaacagcaaaattgagttcaacaacacaaaacaatactgggaaacctgctacttcgtcagctaaccagaaacctgtgggtttgactggtctggcaacatcatccaaaggtggaataggttccaaaataggttccaataacagcactacgcccactgtacctttaaaaccacctccacctctaaccttgggtaaaactggccttagtcgctcagttagttgtgacaatgtcagcaaagtaggtcttcctagtccaagtagtttagttccaggaagcagcagccaactaagtgggaatggaaatagtggaacatcaggacctagtggaagtactaccagcaaaactacttcagaatccagcagctctccctcagcatcccttaaaggcccaacttcacaagaatcacagctcaatgctatgaagcgattacagatggtcaagaagaaagctgcccaaaagaaactcaagaagtaatgtggccaagtaggtttttgtatcatattagcctaaagatgaaaggcttattattatgatataatctgtaatacactgtaatttaataaaagtcttcataatcaaa

SEQ ID NO: 53637 - DNA, 1927 bp, Artificial Sequence
  derived and/or modified sequence
attggaaggggttgcaagagcttgcgaagtcatgaagaacaaagttttttagagccattatgaaatggcaacgataatactgcactctatgtgaacagtttctgtttccttcatctggggcacgtgcatatgatcaactttggacttcttttgagattgccaggaactctgccagacaggggttacaacagtaggcaagaccaatccactgcctgccttcatggaacttacattctaatgagaaagaaagattatttacataattaacagtgtgattaatattacaaataagtacagaatgtttttgggctatgtaacagtgaaacttctagttttgttgagggaatgtgcaggaaaaactgaaacttgagaggtgacttaagatggaggtgggggtggcacactttctactgaagtgctaaggcgtttgcaatggctgctactgtgaacttggaacttgatcccatttttttgaaagcactaggtttcttgcattcaaagagtaaagattctgctgaaaagctaaaagcactgcttgatgaatctttggctcggggcattgattccagttaccgtccatctcaaaaggatgtggagccacccaaaatttcaagcacaaaaaacatttccattaagcaagagcccaaaatatcatccagtcttccttctggtaataataatggcaaggtcctcacaactgaaaaggtaaagaaggaagctgaaaagagacctgctgataaaatgaaatcagacatcactgaaggagttgatattccaaagaaacctagattggagaaaccagaaacacagtcatctcccattactgtccaaagtagcaaggatttacctatggctgacctttccagttttgaggagaccagtgctgatgattttgccatggagatgggattggcctgcgttgtttgtaggcaaatgatggtggcatctggcaatcaattagtagaatgtcaggagtgccataatctctaccaccgagattgtcataaaccccaggtgacagacaaggaagcgaatgaccctcgcctggtgtggtattgtgcccgatgtaccagacaaatgaaaagaatggctcaaaaaactcagaaaccaccgcagaaaccagcccctgcagttgtttctgtaactccagctgtcaaagatccattggttaagaaaccagaaactaaactgaaacaagagacaacttttctagcgtttaagagaacagaagtcaagacatccacagttatttcaggaaattcttctagtgccagcgtttcctcgtcagtaactagtggcttaactggatgggcagcttttgcagccaaaacttcctctgctggtccttcaacagcaaaattgagttcaacaacacaaaacaatactgggaaacctgctacttcgtcagctaaccagaaacctgtgggtttgactggtctggcaacatcatccaaaggtggaataggttccaaaataggttccaataacagcactacgcccactgtacctttaaaaccacctccacctctaaccttgggtaaaactggccttagtcgctcagttagttgtgacaatgtcagcaaagtaggtcttcctagtccaagtagtttagttccaggaagcagcagccaactaagtgggaatggaaatagtggaacatcaggacctagtggaagtactaccagcaaaactacttcagaatccagcagctctccctcagcatcccttaaaggcccaacttcacaagaatcacagctcaatgctatgaagcgattacagatggtcaagaagaaagctgcccaaaagaaactcaagaagtaatgtggccaagtaggtttttgtatcatattagcctaaagatgaaaggcttattattatgatataatctgtaatacactgtaatttaataaaagtcttcataatcaaa

SEQ ID NO: 53638 - DNA, 995 bp, Artificial Sequence
  derived and/or modified sequence
cggtgagttatgctgagcgactctgctcctggcctcctggaggctcgagacccccgcgccaggagcgaggtgggagagtagctacgtggggtattagtttcctcgctcctcaaggggaatcataatttacgggcggttgcgtgccctagactgactgctctcccctttcagtgaggactgtgcttcctccgagggagttgcgggccgggacatgcggaccgagcatatttctaggtctagggacaagggacttggaatcctgcctcggactttgtcggagggttttagtgacttctctacgtagctccctcattgtctctcatcttttggctcccctgtcaaggaccatcccccattctaggacttcgatgtgtgatgctttgatcaaaggattgacattccttttctaagtgtttgctgtcagctttcagccacttgattggtttggaatcggagccttttctcctgcgattccaggtgtccctaaggtatcagtgttatccagaaccaagaactcagtggaggaatgaaaaaggcagcatctttaaaataatgtttattggaaggggttgcaagagcttgcgaagtcatgaagaacaaagttttttagagccattatgaaatggcaacgataatactgcactctatgtgaacagtttctgtttccttcatctggggcacgtgcatatgatcaactttggacttcttttgagattgccaggcgtttgcaatggctgctactgtgaacttggaacttgatcccatttttttgaaagcactaggtttcttgcattcaaagagtaaagattctgctgaaaagctaaaagcactgcttgatgaatctttggctcggggcattgattccagttaccgtccatctcaaaaggatgtggagccacccaaaatttcaagcacaaaaaacatttccattaagcaagagcccaaaatatcatccagtcttccttctggtaataataatggcaaggtcctcacaa

SEQ ID NO: 53639 - DNA, 726 bp, Artificial Sequence
  derived and/or modified sequence
atcggcagggcggggcggaacggtgaggccatctactgaaacacagaagcaattttaaaagaaaatggaggaagtataactgatctttgcagaaagtggggaagtgagttgaccagagaaggatgagagaattgccaagttgtactgaacgccaagctgagaatggtgattctgaagatagaatatcaacacagttacaccaagttgctgacctctttatgactgctgtagaaagtaaacttctttcactatatggatatttgccggtaaggaaggaaaagtaacagagattagagaaggcaacagaaaagggggagtaaaggcgtttgcaatggctgctactgtgaacttggaacttgatcccatttttttgaaagcactaggtttcttgcattcaaagagtaaagattctgctgaaaagctaaaagcactgcttgatgaatctttggctcggggcattgattccagttaccgtccatctcaaaaggatgtggagccacccaaaatttcaagcacaaaaaacatttccattaagcaagagcccaaaatatcatccagtcttccttctggtaataataatggcaaggtcctcacaactgaaaaggtaaagaaggaagctgaaaagagacctgctgataaaatgaaatcagacatcactgaaggagttgatattccaaagaaacctagattggagaaaccagaaacacagtcatctcccattactgt

SEQ ID NO: 53640 - DNA, 562 bp, Artificial Sequence
  derived and/or modified sequence
gaagggaccaccgggaacagacggatcggcagggcggggcggaacggtgtccctaaggtatcagtgttatccagaaccaagaactcagtggaggaatgaaaaaggcagcatctttaaaataatgtttattggaaggggttgcaagagcttgcgaagtcatgaagaacaaagttttttagagccattatgaaatggcaacgataatactgcactctatgtgaacagtttctgtttccttcatctggggcacgtgcatatgatcaactttggacttcttttgagattgccaggcgtttgcaatggctgctactgtgaacttggaacttgatcccatttttttgaaagcactaggtttcttgcattcaaagagtaaagattctgctgaaaagctaaaagcactgcttgatgaatctttggctcggggcattgattccagttaccgtccatctcaaaaggatgtggagccacccaaaatttcaagcacaaaaaacatttccattaagcaagagcccaaaatatcatccagtcttccttctggtaataataatggcaaggtcctcac

SEQ ID NO: 53641 - DNA, 1975 bp, Artificial Sequence
  derived and/or modified sequence
cgcatcctcagccctgcagacccccgaagaaaagaccagttcttagggggtcgcggaggctgagaagccggcggcccgagcgccctctttacctggtcgcagaggcgcggccaggcagggagggtgcgtgagcgtgtcggcgacctgggccgcctgcgccttcccgcccagtccgagctggaattccaaggctgcctctgggagctgctgcccgcagaccactcgcctccacagacgccaggagaaaaacgacagccaccttatgtggaaaatactcgcgccggccgtcattcataatccggcggaccggaaaaagggaagtaacgtcacttcctactgtcgcactgccaaacgtttcccccgcccctactgtgggaacctttgttttcctgctttcggagccggccagtgcgggaaccgtttccgaagggaccaccgggaacagacggatcggcagggcggggcggaacggcgtttgcaatggctgctactgtgaacttggaacttgatcccatttttttgaaagcactaggtttcttgcattcaaagagtaaagattctgctgaaaagctaaaagcactgcttgatgaatctttggctcggggcattgattccagttaccgtccatctcaaaaggatgtggagccacccaaaatttcaagcacaaaaaacatttccattaagcaagagcccaaaatatcatccagtcttccttctggtaataataatggcaaggtcctcacaactgaaaaggtaaagaaggaagctgaaaagagacctgctgataaaatgaaatcagacatcactgaaggagttgatattccaaagaaacctagattggagaaaccagaaacacagtcatctcccattactgtccaaagtagcaaggatttacctatggctgacctttccagttttgaggagaccagtgctgatgattttgccatggagatgggattggcctgcgttgtttgtaggcaaatgatggtggcatctggcaatcaattagtagaatgtcaggagtgccataatctctaccaccgagattgtcataaaccccaggtgacagacaaggaagcgaatgaccctcgcctggtgtggtattgtgcccgatgtaccagacaaatgaaaagaatggctcaaaaaactcagaaaccaccgcagaaaccagcccctgcagttgtttctgtaactccagctgtcaaagatccattggttaagaaaccagaaactaaactgaaacaagagacaacttttctagcgtttaagagaacagaagtcaagacatccacagttatttcaggaaattcttctagtgccagcgtttcctcgtcagtaactagtggcttaactggatgggcagcttttgcagccaaaacttcctctgctggtccttcaacagcaaaattgagttcaacaacacaaaacaatactgggaaacctgctacttcgtcagctaaccagaaacctgtgggtttgactggtctggcaacatcatccaaaggtggaataggttccaaaataggttccaataacagcactacgcccactgtacctttaaaaccacctccacctctaaccttgggtaaaactggccttagtcgctcagttagttgtgacaatgtcagcaaagtaggtcttcctagtccaagtagtttagttccaggaagcagcagccaactaagtgggaatggaaatagtggaacatcaggacctagtggaagtactaccagcaaaactacttcagaatccagcagctctccctcagcatcccttaaaggcccaacttcacaagaatcacagctcaatgctatgaagcgattacagatggtcaagaagaaagctgcccaaaagaaactcaagaagtaatgtggccaagtaggtttttgtatcatattagcctaaagatgaaaggcttattattatgatataatctgtaatacactgtaatttaataaaagtcttcataatcaaa

SEQ ID NO: 53642 - DNA, 653 bp, Artificial Sequence
  derived and/or modified sequence
agacggatcggcagggcggggcggaacgatcaacacagttacaccaagttgctgacctctttatgactgctgtagaaagtaaacttctttcactatatggatatttgccggtaaggaaggaaaagtaacagagattagagaaggcaacagaaaagggggagtaaaggcgtttgcaatggctgctactgtgaacttggaacttgatcccatttttttgaaagcactaggtttcttgcattcaaagagtaaagattctgctgaaaagctaaaagcactgcttgatgaatctttggctcggggcattgattccagttaccgtccatctcaaaaggatgtggagccacccaaaatttcaagcacaaaaaacatttccattaagcaagagcccaaaatatcatccagtcttccttctggtaataataatggcaaggtcctcacaactgaaaaggtaaagaaggaagctgaaaagagacctgctgataaaatgaaatcagacatcactgaaggagttgatattccaaagaaacctagattggagaaaccagaaacacagtcatctcccattactgtccaaagtagcaaggatttacctatggctgacctttccagttttgaggagaccagtgctgatgattttgccatggagatgggat

SEQ ID NO: 53643 - DNA, 569 bp, Artificial Sequence
  derived and/or modified sequence
ggcagggcggggcggaacggtgagttatgctgagcgactctgctcctggcctcctggaggctcgagacccccgcgccaggagcgaggtgggagagtagctacgtggggtattagtttcctcgctcctcaaggggaatcataatttacgggcggttgcgtgccctagactgactgctctcccctttcagtgaggactgtgcttcctccgagggagttgcgggccgggacatgcggaccgagcatatttctaggtctagggacaagggacttggaatcctgcctcggactttgtcggagggttttagtgacttctctacgtagctccctcattgtctctcatcttttggctcccctgtcaaggaccatcccccattctaggacttcgatgtgtgatgctttgatcaaaggattgacattccttttctaagtgtttgctgtcagctttcagccacttgattggtttggaatcggagccttttctcctgcgattccaggtgtccctaaggcgtttgcaatggctgctactgtgaacttggaacttgatcccatttttttgaaagcactaggtt

SEQ ID NO: 53644 - DNA, 1389 bp, Artificial Sequence
  derived and/or modified sequence
atggcagctacagttaatttggaactcgaccctatattcctaaaggctctgggcttcttacactcaaagtccaaagactcagctgagaagctcaaggccctccttgacgagtctctggcacggggaattgactcctcctatcgcccttcacagaaggacgtggagccccctaaaatctcctcaaccaaaaatatctcgattaagcaggagcccaaaatttcctcctccttgccatccggcaacaataatggaaaagttttgactaccgagaaggtgaaaaaggaggctgaaaagaggcctgccgacaagatgaaatctgacataaccgaaggagtggacatccccaagaagccgcgactggagaaacctgagacccagagtagccctataactgttcagtcatctaaggaccttccaatggctgatctgagttcctttgaagaaacaagtgcagatgattttgccatggagatgggattggcttgtgtagtgtgtagacagatgatggtggcatccggcaaccagctggttgagtgtcaggaatgccataacctgtatcatcgcgactgtcacaagccacaggtcacagacaaggaggccaatgatccacggctcgtctggtactgcgccaggtgtactagacagatgaaaaggatggcacagaaaacccagaaaccaccgcaaaagcccgcacctgcagtggtgtctgtgactcccgctgtgaaagaccctctcgtgaagaaacctgaaaccaagctgaagcaggagaccacatttctggcttttaaaagaactgaggttaaaacgtccacggtcatctcaggtaattcaagttctgccagcgtgtctagttctgtgacatccggtctcaccggctgggcagccttcgcagccaaaacctccagcgccggtccttccacagctaagctatcttctaccactcagaacaataccggaaaacctgccaccagttctgctaaccaaaagccggtgggactgaccggtcttgcaacctcatcaaaaggaggcatcggatcgaagattggttctaataacagtacaacgcctaccgtcccactgaagccaccccctcctctgactctgggaaaaactggcctgagtcggagcgtgtcatgcgacaacgtgtcaaaggtcgggctgccgagcccatcatctttggttccgggctcaagctcccaattgtcagggaatggcaacagcgggacgagtgggccgtctggcagcacaacgtctaagaccaccagtgaatcatcctcaagtccaagcgcatcactaaaagggcctacctcacaagagtcacaactcaatgctatgaagcgcttacaaatggtcaagaaaaaggcagctcaaaagaagctgaaaaaatag

SEQ ID NO: 53645 - DNA, 1389 bp, Artificial Sequence
  derived and/or modified sequence
atggcggcaactgtcaatctcgagctggacccgatcttcctgaaagcactgggtttccttcactccaaatccaaggactctgccgaaaagctgaaagctttacttgatgaatcactggctagagggattgacagttcttaccgtcccagtcagaaagacgttgaacctcccaaaatctcttcgacaaagaacatttccatcaagcaggaacctaagatctcctcttctttgcctagtggcaataacaacgggaaggtgctgacgacagagaaagtgaagaaggaggctgagaaacggccagcagacaagatgaagagtgacatcaccgagggggtcgatatcccgaagaaaccacgactcgagaagcccgaaacacagagctcccccataacagtgcaaagctccaaggatctgcccatggctgacttaagctcattcgaggagacaagcgcagatgacttcgctatggagatgggtttagcctgtgtggtttgtcgtcagatgatggtagcttcaggcaaccagctcgtggagtgccaggaatgtcacaacctatatcacagggactgtcacaagccacaggtgacagataaggaagccaacgacccccggttggtgtggtactgcgctaggtgcacccgccaaatgaagagaatggcccagaagacgcagaagcctccgcagaagcctgctcctgccgtggtctccgtgacccccgcagttaaggacccccttgttaaaaagccggagaccaaacttaaacaggagactacttttttagcctttaaacgaacagaggtaaaaacaagtaccgtcattagtgggaactcctccagtgcaagcgttagcagttccgttacttctgggttaacaggatgggctgcattcgcagctaaaacgtcctctgccggcccttcaaccgccaagctcagtagtaccacccagaacaacacaggcaaacctgctacttccagtgccaaccagaagcccgtgggtttgaccggtctggcgacatcgtccaaagggggaatcggcagcaagatcgggtctaacaactctaccacccccacagtgcccctgaaacctccccctccactgaccctagggaaaacagggctgagtcgctcagtgagctgcgacaacgtctccaaagtgggtttgcctagccctagtagtcttgtgcctggctccagctcccagctgagcggcaatggcaacagcggcacaagtggcccttccgggtccactacctctaagactacctcagagagctcttcctctcccagtgcaagtcttaaagggcctacgagtcaagaaagccagcttaacgccatgaagcggctccagatggtcaaaaaaaaggctgcacagaagaaattgaaaaaatag

SEQ ID NO: 53646 - DNA, 267 bp, Artificial Sequence
  derived and/or modified sequence
atggctgccactgtcaatctggaattggaccccatctttctgaaagctttggggtttttgcattccaagagcaaggactctgcggaaaagctgaaagcgctactggacgaatccctggctagggggatcgattctagctaccgaccgagccagaaagatgtggaacccccaaagattagctcgaccaaaaacatttcaataaagcaagagcccaagatttcctcatccctgcccagcgggaataacaacgggaaagtgctgacatag

SEQ ID NO: 53647 - DNA, 399 bp, Artificial Sequence
  derived and/or modified sequence
atggccgccacagtaaatctggagctggatcctatctttctgaaggctctcgggttcttgcactctaaatcaaaagatagcgcagagaaattgaaagcacttctagacgagagtcttgccagggggatcgatagctcgtatcgcccaagtcagaaggacgtcgagcctccaaaaatcagctctacgaagaacatatccataaaacaggaacccaaaatcagctctagcctgcctagtggcaataataacggaaaagtgctcacaacagagaaggtaaagaaggaagccgagaagcgaccagccgataagatgaagtcggacatcacggagggagtcgacattcccaaaaagccccggctcgagaaacctgagactcagtcatctcccattacagtttag

SEQ ID NO: 53648 - DNA, 267 bp, Artificial Sequence
  derived and/or modified sequence
atggccgcgaccgtgaacctcgaattggacccaatcttcctgaaggcgcttgggtttttgcattcgaaatcaaaagactcagccgagaagttaaaagccctgcttgacgagagcctggcgcgcggaatcgactcttcatatcgtccatcccagaaggacgtggaacctccaaaaatttcctccaccaagaacatcagtatcaagcaggaacctaaaatttcatcctctttaccttcggggaataataacggcaaggtcctcacatag

SEQ ID NO: 53649 - DNA, 1389 bp, Artificial Sequence
  derived and/or modified sequence
atggctgctaccgtgaatctcgagcttgacccaatctttctcaaggccttaggatttctccattcaaagtctaaggattcagctgagaagctgaaggctctgttggatgaaagtttggctcgggggatcgattccagttacagacccagccagaaagacgttgagccacccaaaatctctagtaccaagaatatttcgatcaagcaggagcctaagatctcctcttccctgccatccggaaacaacaatggaaaagtgcttacaacagaaaaggtgaaaaaagaggccgagaagaggccagctgacaagatgaaatctgacatcacagaaggcgttgacatacccaaaaagcccaggttagagaagccggaaacccagtcaagcccaatcaccgtgcagtcctctaaggatctccccatggctgacctgagctctttcgaggagacgtcagccgacgactttgcaatggaaatgggactagcctgtgttgtgtgcagacaaatgatggtggcatccggaaaccaactggtggagtgccaagaatgtcacaatctgtatcatcgtgactgtcacaaaccccaggtgactgacaaggaagcaaacgatcctaggctggtatggtattgcgcccgatgtacgcgccagatgaagcggatggcccagaagacccaaaagcccccacagaagcccgctccggctgttgtgtctgtgactcctgcagtcaaggatcctcttgtcaagaagcccgagacaaaacttaagcaggaaaccactttcttggccttcaagcgaaccgaagtgaagacatcaacagtgatctcaggaaactcgtcttcagctagcgtttcaagttccgtgacaagcgggctgacgggctgggctgcattcgccgcaaagactagttccgctggaccttccacggctaagctttcatcaaccacccaaaataatacaggcaagccggccacctccagtgctaatcagaaaccggtcgggttgactggactggccacctcttctaagggaggcataggcagcaagatcgggtctaataattccacaacccccactgtgccattgaaacccccacctcctttaaccctggggaaaacgggcctgagtaggagcgtcagctgcgataacgtgtccaaagtgggattgccttctccttccagcctcgtgcccgggtcgagcagtcagctgtccggaaacgggaacagtggcacgagtgggccttctggatcgaccacctctaaaacgacgtctgagtctagctcttcgccttccgcctcactcaagggacctacctctcaagagagccagctgaacgctatgaagaggctccagatggttaaaaagaaggcagcccaaaagaagctcaaaaaatag

SEQ ID NO: 53650 - DNA, 480 bp, Artificial Sequence
  derived and/or modified sequence
atggccgcaacggtgaatctggaattagatcctattttcctgaaagcgctagggttcctgcactccaaatctaaagactcagccgaaaaattgaaagccctgttagacgagagcctggctcgaggcatcgactcctcatacagacccagccagaaagacgtggagccgcccaagatttcctctactaagaacatctctataaaacaagaaccaaaaatttcctcctcgcttcccagtggcaacaacaatggaaaagtgctcaccaccgaaaaggtgaagaaggaagctgagaaacgtcctgccgacaagatgaaatctgacattacagaaggagtagacattccgaagaagccacgcctcgaaaagccggagacccagtcctctccgattaccgtgcagtcctccaaggaccttccgatggctgacctgtcttcatttgaggaaacatccgctgatgacttcgcgatggagatgggttag

SEQ ID NO: 53651 - DNA, 57 bp, Artificial Sequence
  derived and/or modified sequence
atggcggccactgttaacttggagctggatccaattttccttaaggcactcggatag

SEQ ID NO: 53652 - DNA, 1389 bp, Artificial Sequence
  derived and/or modified sequence
atggccgccaccgtgaacctggagctggaccccatcttcctgaaggccctgggcttcctgcacagcaagagcaaggacagcgctgagaagctgaaggccctgctggatgagagcctggcccggggcatcgacagcagctaccggcccagccagaaggatgtggagccccccaagatcagcagcaccaagaacatcagcatcaagcaggagcccaagatcagcagcagcctgcccagcggcaacaacaacgggaaggtgctgaccacagagaaggtgaagaaggaggccgagaagaggcctgctgacaagatgaagagtgacatcacagaaggagtggacatccccaagaagccccggctggagaagccagagacccagagcagccccatcaccgtgcagagcagcaaggacctgcccatggctgacctgagcagctttgaggagaccagcgcagatgactttgccatggagatgggcctggcctgtgtggtgtgccggcagatgatggtggccagcggcaaccagctggtggagtgccaggagtgccacaacctgtaccaccgggactgccacaagccccaggtgacagacaaggaggccaatgacccccggctggtgtggtactgtgcccgctgcacccggcagatgaagaggatggcccagaagacccagaagccaccccagaagccagccccagctgtggtgtctgtgaccccagctgtgaaggaccccctggtgaagaagccagagaccaagctgaagcaggagaccaccttcctggccttcaagaggacagaggtgaagaccagcaccgtcatcagcggcaacagcagcagcgcctctgtgagcagctctgtgaccagcggcctgaccggctgggccgcctttgctgccaagaccagcagcgctggccccagcacagccaagctgagcagcaccacccagaacaacacaggcaagccagccaccagcagcgccaaccagaagcctgtgggcctgaccggcctggccaccagcagcaaaggaggcatcggcagcaagattggcagcaacaacagcaccacccccaccgtgcccctgaagcccccaccacccctgaccctgggcaagacaggcctgagccgctctgtgtcctgtgacaacgtgtccaaggtgggcctgcccagccccagcagcctggtgcccggcagcagcagccagctgtctggaaatggaaattctggcaccagcggccccagcggcagcaccaccagcaagaccaccagcgagagcagcagcagccccagcgccagcctgaagggccccaccagccaggagagccagctgaatgccatgaagaggctgcagatggtgaagaagaaggccgcccagaagaagctgaagaagtag

SEQ ID NO: 53653 - DNA, 267 bp, Artificial Sequence
  derived and/or modified sequence
atggccgccaccgtgaacctggagctggaccccatcttcctgaaggccctgggcttcctgcacagcaagagcaaggacagcgctgagaagctgaaggccctgctggatgagagcctggcccggggcatcgacagcagctaccggcccagccagaaggatgtggagccccccaagatcagcagcaccaagaacatcagcatcaagcaggagcccaagatcagcagcagcctgcccagcggcaacaacaacgggaaggtgctgacctag

SEQ ID NO: 53654 - DNA, 399 bp, Artificial Sequence
  derived and/or modified sequence
atggccgccaccgtgaacctggagctggaccccatcttcctgaaggccctgggcttcctgcacagcaagagcaaggacagcgctgagaagctgaaggccctgctggatgagagcctggcccggggcatcgacagcagctaccggcccagccagaaggatgtggagccccccaagatcagcagcaccaagaacatcagcatcaagcaggagcccaagatcagcagcagcctgcccagcggcaacaacaacgggaaggtgctgaccacagagaaggtgaagaaggaggccgagaagaggcctgctgacaagatgaagagtgacatcacagaaggagtggacatccccaagaagccccggctggagaagccagagacccagagcagccccatcaccgtgtag

SEQ ID NO: 53655 - DNA, 480 bp, Artificial Sequence
  derived and/or modified sequence
atggccgccaccgtgaacctggagctggaccccatcttcctgaaggccctgggcttcctgcacagcaagagcaaggacagcgctgagaagctgaaggccctgctggatgagagcctggcccggggcatcgacagcagctaccggcccagccagaaggatgtggagccccccaagatcagcagcaccaagaacatcagcatcaagcaggagcccaagatcagcagcagcctgcccagcggcaacaacaacgggaaggtgctgaccacagagaaggtgaagaaggaggccgagaagaggcctgctgacaagatgaagagtgacatcacagaaggagtggacatccccaagaagccccggctggagaagccagagacccagagcagccccatcaccgtgcagagcagcaaggacctgcccatggctgacctgagcagctttgaggagaccagcgcagatgactttgccatggagatgggctag

SEQ ID NO: 53656 - DNA, 1389 bp, Artificial Sequence
  derived and/or modified sequence
atggccgccaccgtgaacctggagctggaccccatcttcctgaaggcgctaggattccttcattctaaaagcaaagactccgccgaaaaattgaaggccctactggacgaaagcctcgctcgggggatcgactctagctatcgccccagccagaaggacgtcgagcctcccaaaatctcgagcactaagaacatttccatcaagcaggaacccaaaatttcgtccagtctgcccagcgggaacaacaacggaaaagtgcttaccaccgaaaaggtgaagaaggaggcagagaaacgcccggcagacaaaatgaagtctgacattactgagggtgtggatataccaaagaagccccgtcttgaaaagccggagacccagtcctctcccattaccgtccagagttccaaggacctgccgatggccgacctttcatcttttgaggaaactagtgcggatgatttcgctatggagatgggcctggcatgtgtggtgtgtcgtcagatgatggttgctagcggtaatcaactcgttgaatgccaagagtgtcataatctttaccatagagactgccacaaaccccaggtcacagataaggaggccaatgatcccagactggtttggtactgcgcccgctgtacccggcagatgaaacgtatggcccagaaaactcagaagcccccacagaagccggctcccgccgtggtttccgtgaccccagcggtcaaggacccgctggttaaaaagcctgaaaccaagctcaaacaggaaactacttttcttgcattcaagagaactgaggtgaaaactagcaccgtcattagcggcaactcatcttcagctagcgtgtccagttccgtcaccagcggcctgaccgggtgggccgcattcgctgcgaaaacctcatctgctggcccatctaccgccaagctttcctcaacgactcagaataacactggcaagcccgctacttccagcgccaaccagaaaccagtcggccttactgggctggctacttctagcaaaggagggattggctctaagatcgggtccaataattcaacaacccctacagtgccactcaaacccccaccaccactaacactgggtaaaaccggcttgtcccggtccgtatcctgtgataatgtttccaaagttggcctgccgtccccctcatcacttgtgcccggcagctcaagtcagctttccggcaacggtaacagcgggactagcggtccttctggctccactacctccaagacgacatctgaaagctctagtagtccctcagcttctttaaagggtcctacttctcaggaatctcagctgaatgcaatgaaacgactgcaaatggtaaaaaagaaagccgcccagaagaaactaaagaagtag

SEQ ID NO: 53657 - DNA, 1389 bp, Artificial Sequence
  derived and/or modified sequence
atggccgccaccgtgaacctggagctggaccccatcttcctgaaggcattgggatttcttcattctaagtctaaggatagtgccgaaaagttaaaggctctgctggacgagagtctggcccggggaattgacagctcttaccgacccagtcaaaaagacgtcgagcccccgaaaattagctctaccaagaatatttccataaagcaagaaccaaaaatctcaagttccctgcccagcggcaataataacgggaaggtcttaaccacagaaaaagtaaaaaaggaggctgagaaaaggcccgccgacaagatgaaatccgacataactgaaggagtggacattcctaagaagcccaggctggagaaacccgagacccagtctagccccatcacagtgcaatcctccaaagacctccccatggccgacttgtcctcatttgaggagacttctgcagacgacttcgctatggaaatgggcctcgcatgtgtggtctgtcgtcagatgatggtcgcctccggaaaccaactagttgagtgccaggaatgccacaatctctaccacagggattgtcacaaaccacaggtcactgataaggaagcgaatgatcctcgtctggtgtggtactgcgcgcgatgtacaaggcaaatgaaaagaatggcccaaaagacccagaaacccccccaaaagcccgccccagctgtggtctccgtaactccagccgttaaagacccgctcgtgaaaaaacccgagacgaaactcaaacaggaaacgacctttctggctttcaagcggactgaggtgaagacttccaccgtcatttctggcaactcaagtagcgcatctgtgtcctcctcggtaacatcaggactcacaggatgggcagcgtttgcagccaaaaccagtagtgctgggccgtctactgcaaagctgtcatccacgacacaaaacaatactggcaagcctgccacttcatccgccaatcagaagccggtcggcttaaccggattagctaccagctccaaggggggaatcggctccaagattgggtcaaataattcaaccacccccactgtccccctgaaacccccccctcccctgaccctagggaagacaggcctgagcaggagtgtttcatgtgataacgtatctaaagtcgggctcccatctccctcttcactcgtaccgggatcctcttctcaattatctggcaatggcaactccggaacctctggcccaagcggctctacaacatccaagacaacatccgaatcatcttccagcccctctgcttctcttaaaggacccaccagccaggaatcccagttgaatgccatgaaacgtcttcaaatggtaaaaaagaaagccgcacaaaaaaaactcaaaaagtag

SEQ ID NO: 53658 - DNA, 267 bp, Artificial Sequence
  derived and/or modified sequence
atggccgccaccgtgaacctggagctggaccccatcttcctgaaggcactgggctttctgcatagcaagtcaaaagattctgccgagaagctgaaggcccttctggacgaaagcttggcgcgcggcattgattcatcttacagaccctctcagaaagatgttgagccccccaagatatccagtaccaagaacatctccatcaagcaggaaccaaagatcagttcttccttgccctcgggcaacaataatggcaaggttttgacatag

SEQ ID NO: 53659 - DNA, 399 bp, Artificial Sequence
  derived and/or modified sequence
atggccgccaccgtgaacctggagctggaccccatcttcctgaaggctctcggtttcttacactcgaagtccaaggactccgcagaaaaactgaaagctttgctggacgagtctctggctagggggatagactctagctacagacctagtcagaaagacgtagaaccccctaagatctcttctaccaaaaacatatctattaagcaggagccaaagatcagcagcagtctccccagcggcaacaacaatggcaaggtcttgaccaccgagaaggtaaaaaaagaagctgagaaacgccccgccgataagatgaagtcagatattaccgaaggagtggatatcccaaagaagccacggcttgaaaagccagagacccagtcatctccaataactgtgtag

SEQ ID NO: 53660 - DNA, 267 bp, Artificial Sequence
  derived and/or modified sequence
atggccgccaccgtgaacctggagctggaccccatcttcctgaaggccctgggctttctgcattccaagtccaaggacagcgcggagaagctgaaggccctgctggacgaatctttagcccgcggaatcgattcttcttaccggccctcccaaaaggacgtggagcccccgaagatctcatccaccaagaacatctctatcaagcaggaaccgaaaatttctagctctttgccatcaggaaataataacgggaaagtattaacatag

SEQ ID NO: 53661 - DNA, 1389 bp, Artificial Sequence
  derived and/or modified sequence
atggccgccaccgtgaacctggagctggaccccatcttcctgaaggctcttggcttcctgcatagtaagagtaaggatagcgccgagaaactcaaagctctgctggatgagtcactcgcgcgggggatcgatagctcttaccgccctagtcaaaaagacgtggaaccaccgaaaatctcatctaccaagaatatcagcatcaaacaagagccaaagatcagtagctctttaccctcagggaacaataatggcaaggtattgacgactgaaaaagttaagaaagaagccgaaaagaggccagccgacaagatgaaatccgatatcacagaaggagttgatatacccaaaaagccccgcctagagaaaccggagacacagtcctcaccgatcactgtgcagtcaagcaaagatttacctatggctgatctcagctcgttcgaagaaactagtgcggatgattttgccatggagatgggcctggcttgtgtcgtgtgccgacagatgatggtcgcctcaggcaaccaacttgtggaatgccaggaatgccacaacctgtatcacagagactgccataaaccacaggtcacagataaggaggccaatgacccgcgactggtctggtactgtgcccgatgcactaggcagatgaagcgcatggcgcaaaaaacacagaaacccccccagaagcccgctccagctgtggtgtcagtgacccccgccgtaaaggatcctttggttaaaaaacccgaaactaagttgaagcaggagacaacattcctggccttcaagcggacagaagtgaaaacgtccacagttatttccggcaacagttctagcgcctcagttagtagtagcgttacaagtggtctgacaggatgggccgcctttgcagcaaagacatcttctgctgggcctagcacagccaagttgagcagtaccacacaaaacaacaccgggaagccagcaacgtcttcagccaaccaaaaacctgtgggactgactgggctagccacaagcagcaaggggggcatcgggagcaagattggcagcaacaacagcacgaccccgaccgttccactaaagccacctccacctttgactttaggaaagactgggctgtctcgcagcgtgtcatgcgataatgtctctaaggttggactgccatctccgtccagtctggtgcctggatcctcaagtcagctgtccggtaacgggaatagcggcacgtccgggccgagtggcagtactacatcaaagaccacctcagagtcaagcagttcccctagtgcctctctgaaaggacccacgtcccaggagtcccagttgaacgccatgaagcgcctccagatggtcaaaaaaaaggccgctcagaagaaactgaagaagtag

SEQ ID NO: 53662 - DNA, 480 bp, Artificial Sequence
  derived and/or modified sequence
atggccgccaccgtgaacctggagctggaccccatcttcctgaaggcactgggattccttcattctaaaagcaaagactcggctgagaagttaaaagcactgctagatgagtcactggctagaggaattgatagtagttacagaccgagtcagaaagacgtagagcctcccaagatcagcagcaccaagaatatttccataaagcaggagccaaaaatcagctcaagcctgccatccgggaacaacaatggaaaagttctgaccacggagaaggtaaaaaaagaagcagaaaagaggcctgctgacaaaatgaaaagtgatattactgaaggcgtggacatcccgaagaaaccacgcttggagaaacccgaaactcaatcctcgccaatcaccgtacagagcagtaaagatctacccatggcagatttgtcatccttcgaagagacctccgctgatgacttcgccatggagatggggtag

SEQ ID NO: 53663 - DNA, 57 bp, Artificial Sequence
  derived and/or modified sequence
atggccgccaccgtgaacctggagctggaccccatcttcctgaaggctctggggtag

SEQ ID NO: 53664 - DNA, 1389 bp, Artificial Sequence
  derived and/or modified sequence
atggccgcaaccgttaacctcgaattggatccgatctttttgaaagccttgggttttctccattctaaaagcaaggacagcgctgagaaattaaaggccctgttggacgagtcactggctcgtggtatcgactcatcctaccggcctagtcagaaggatgtggagccccctaaaattagttctacaaagaacatctccataaaacaggaacctaaaatctccagttctttacccagcgggaataacaacggaaaagtcttgaccacagaaaaggttaaaaaagaggcggagaagcggcctgccgacaaaatgaagtccgatatcacagagggagttgatatccccaagaagcccaggctagagaaacccgaaacacaatcttccccaatcactgtgcagtcttctaaggatttgcccatggctgatctgagcagttttgaggagaccagcgccgacgattttgctatggagatgggccttgcctgcgtggtgtgtagacaaatgatggtcgccagtggcaatcagcttgtagagtgccaggagtgccataacctctatcatcgggactgccataaaccccaggtgaccgacaaagaggctaacgatcccaggctcgtgtggtactgcgccaggtgcacaaggcagatgaaacgaatggcccagaagactcaaaagcctcctcagaagcctgctcccgctgtggtgagtgtaacccccgcagtaaaagatccattggtgaagaaacctgagacaaaactaaagcaggaaacaacgtttctggcctttaaacggacagaggtgaagacatcaactgtaattagcgggaactccagtagcgcatcagtcagcagtagcgttacatccggccttactggatgggctgccttcgcggcaaagacttcatccgccggacccagcaccgcaaaactgagcagcactacacaaaacaataccggaaaacccgcaacttcatctgccaaccagaagcctgtggggctgaccggcctggccacctcctcaaaaggcggaattgggtccaagatcggatccaacaacagcacgactccaaccgtgcctttaaagccacccccaccactgaccctaggcaagacaggactctcacgatcggtctcttgcgataatgtatctaaagtgggcctgcctagtcccagtagcttggtcccagggtccagctcgcagctgtctggaaatggtaattcaggaacttctggaccctctggatcaaccacctccaaaaccacttctgagtcttcgagttccccttcggcctcattgaagggaccaacctctcaggagtctcagctgaacgccatgaaacggttgcagatggtgaagaaaaaggccgcacagaaaaaactaaagaagtag

SEQ ID NO: 53665 - DNA, 1389 bp, Artificial Sequence
  derived and/or modified sequence
atggccgctacagtgaatctcgaactggatccaatttttctcaaagccttggggttcttgcatagcaagagcaaggacagcgcggagaaattgaaggccttgctggacgaatctctggcaaggggcatcgattcaagctaccgaccgtcgcagaaggacgtggaaccgcctaaaattagttccactaaaaatatttcaatcaagcaggagcccaaaataagttcctcactccccagcggtaataataacggcaaggtattaacaacggagaaagtgaagaaggaggccgaaaagcgcccagcagacaagatgaaaagtgacataaccgaaggagtggacatcccaaagaagccgcgtctggagaagcctgaaacacagtccagtcccataacagtgcaatcctccaaagaccttcctatggcggacttgagctcctttgaggagacctccgctgacgacttcgcgatggaaatgggcctcgcatgcgtggtctgtagacagatgatggtcgcatctgggaaccagttggtggaatgccaggagtgtcataacctgtaccatcgcgactgtcataaaccacaggtgacagacaaggaggctaatgatccacggctcgtgtggtattgcgccagatgcactcggcagatgaaacgcatggcacagaagacgcaaaaaccaccgcagaagcccgcacccgctgtggtgtcagtcacccctgccgttaaggatcctctggtcaaaaagccagaaacaaagctgaaacaggagacaaccttcttggccttcaaaaggaccgaagtcaagactagcaccgtcatctcaggaaactcttcatctgcttcggtatccagctctgtaacgtcgggtctgaccggatgggctgcgtttgcagctaaaacaagcagtgctgggccaagcacagctaagcttagctccacaacccagaataacaccggtaagccagccacctcctcggccaaccaaaagccagtgggtctcactggactcgctacctcttcaaaaggcggaattggcagcaagatcggctctaacaacagcaccactcctacagtgcccctgaagccgcctcccccactaacattgggcaaaacagggctctcccgttccgtgagttgcgataatgtgtccaaggtgggattgccttccccctcctcactcgtgcccggaagctctagccagctttccggcaatggaaacagcggcacatccgggccatctggatccacgacctccaaaaccacaagtgaaagcagctcttcaccatccgcttctctgaaggggcctactagccaggagagtcagctgaacgcaatgaaacgattgcaaatggtgaagaaaaaggccgctcagaagaaactgaagaagtag

SEQ ID NO: 53666 - DNA, 267 bp, Artificial Sequence
  derived and/or modified sequence
atggccgcaacagtcaatttggagcttgatcctatctttctcaaagcattgggattcctgcacagtaagagcaaagacagtgccgaaaagctgaaggcactgctggacgagagcttggctcggggaatcgactcgtcatatcgcccaagtcagaaggatgttgaaccaccaaagatctcttcaactaaaaatatttccatcaagcaggaacctaagatttctagtagtcttccctcaggcaataacaatggtaaggtactgacatag

SEQ ID NO: 53667 - DNA, 399 bp, Artificial Sequence
  derived and/or modified sequence
atggctgccacagtaaacctggaactagatcctatctttctgaaggccctaggattcctccacagtaaatcaaaagattccgccgagaagctcaaagctctccttgatgagtctcttgctagaggaattgattcctcctaccggccaagccagaaagatgtcgagccccctaagatctcctctaccaagaatatatctatcaagcaagaaccaaaaatttcgtccagcctgccttccgggaataataacgggaaagttctcactaccgaaaaagttaagaaagaggcagagaaacgaccagctgacaagatgaagtcggacattacggagggggtcgacatcccaaaaaaacccaggcttgaaaagcccgagacccagagctctcctataacggtttag

SEQ ID NO: 53668 - DNA, 267 bp, Artificial Sequence
  derived and/or modified sequence
atggcagctactgtcaacctcgaactggatccgatcttcctgaaagccctggggtttctgcatagtaaatctaaggactcagccgagaagcttaaggccctgctggatgaatcccttgctcgcggaatagactcgtcgtataggccgtcccaaaaagacgtcgaaccgccaaaaatctcaagtacaaaaaacatctcgataaagcaggagcccaagatttccagttccttaccctccggtaataacaacggcaaggttttgacgtag

SEQ ID NO: 53669 - DNA, 1389 bp, Artificial Sequence
  derived and/or modified sequence
atggctgcgacagtgaatctagagctggatcctattttcctgaaagcactgggctttcttcacagcaagtctaaggatagcgccgaaaagttaaaagccctgctggacgagagccttgccagaggcatagactctagttacagaccgtcccagaaggatgtggagccccctaagattagctccaccaagaatatcagcattaagcaggaacccaaaatatcaagctcgttaccctctggcaataataacgggaaagttctcaccacagagaaagtcaagaaagaagcagagaagcgacctgctgacaaaatgaaatctgacatcacagagggcgtagatatccctaaaaagcctcggctggaaaaaccggagacacagtccagccccattactgtacaatcatcaaaagaccttccgatggcagatctgtcatcctttgaggagacatctgccgacgatttcgctatggagatgggcctcgcctgcgtggtctgccgacagatgatggtcgcatccggcaatcaactagtggagtgccaggagtgccataacctataccatagagactgccacaaaccccaagtgacagataaagaggctaatgatccaagactggtgtggtattgtgctcggtgcactaggcagatgaagaggatggctcaaaaaacccagaaaccaccccagaaacccgctcctgccgtggtgtcagtcacccccgcagttaaagatccattggtgaagaagccagaaaccaaactgaaacaggaaacaacatttttagccttcaaacggacagaggtgaagacctccacagtgatttccggaaactcatccagtgcctctgtgtccagctcagtgaccagcggactgacaggctgggccgcattcgccgctaagacctctagtgccggtccctctaccgccaagctttcatcaacaacgcagaacaacaccggcaaaccagccactagcagtgctaaccagaagcccgtagggctgaccgggctcgcaacctcgtctaaagggggaatcgggtcaaagatcggatcgaacaactctaccaccccaaccgtgcccctcaagccccctccacccctgacactgggaaaaactgggctgtcgaggtccgtgtcttgtgacaatgtttctaaggtggggctgcccagcccctccagtctcgtgccaggttcctctagccaactgtctggcaacggaaactctgggacttcaggcccttcaggatcaactacctcgaagacaacgtcagagtcatcaagctcacccagtgcatcactcaaagggcctacctctcaggaaagccaattgaatgctatgaaacggcttcagatggtcaaaaagaaggcagctcagaagaagcttaagaagtag

SEQ ID NO: 53670 - DNA, 480 bp, Artificial Sequence
  derived and/or modified sequence
atggctgcaactgttaatcttgaactggatccaatatttttgaaagccctgggattcctccacagtaaaagcaaggatagtgccgagaaactgaaagccctcctggatgaaagcttagcaaggggaatcgactcttcctaccgtccaagccaaaaggacgtcgagccacccaaaatctcttccaccaaaaacatctccataaagcaggaaccaaagatctcctcctccttgccttccgggaataacaacggaaaggtgcttacaacagaaaaggtcaagaaagaagccgaaaaacgaccagcagataagatgaaaagtgacattacagaaggcgtagacattccaaaaaagcctagactggagaaacccgagactcagtcatctcccataacagtgcaatcttcaaaagatctgcccatggcagatctgtcaagtttcgaggagacctccgccgatgatttcgcaatggaaatgggatag

SEQ ID NO: 53671 - DNA, 57 bp, Artificial Sequence
  derived and/or modified sequence
atggcagccaccgtcaacctcgaactggatcccatcttcttaaaagcactgggctag

SEQ ID NO: 53672 - DNA, 1389 bp, Artificial Sequence
  derived and/or modified sequence
atggccgccaccgtgaacctggagctggaccccatcttcctgaaggccctgggcttcctgcacagcaagagcaaggacagcgccgagaagctgaaggccctgctggacgagagcctggccagaggcatcgacagcagctacagacccagccagaaggacgtggagccccccaagatcagcagcaccaagaacatcagcatcaagcaggagcccaagatcagcagcagcctgcccagcggcaacaacaacggcaaggtgctgaccaccgagaaggtgaagaaggaggccgagaagagacccgccgacaagatgaagagcgacatcaccgagggcgtggacatccccaagaagcccagactggagaagcccgagacccagagcagccccatcaccgtgcagagcagcaaggacctgcccatggccgacctgagcagcttcgaggagaccagcgccgacgacttcgccatggagatgggcctggcctgcgtggtgtgcagacagatgatggtggccagcggcaaccagctggtggagtgccaggagtgccacaacctgtaccacagagactgccacaagccccaggtgaccgacaaggaggccaacgaccccagactggtgtggtactgcgccagatgcaccagacagatgaagagaatggcccagaagacccagaagcccccccagaagcccgcccccgccgtggtgagcgtgacccccgccgtgaaggaccccctggtgaagaagcccgagaccaagctgaagcaggagaccaccttcctggccttcaagagaaccgaggtgaagaccagcaccgtgatcagcggcaacagcagcagcgccagcgtgagcagcagcgtgaccagcggcctgaccggctgggccgccttcgccgccaagaccagcagcgccggccccagcaccgccaagctgagcagcaccacccagaacaacaccggcaagcccgccaccagcagcgccaaccagaagcccgtgggcctgaccggcctggccaccagcagcaagggcggcatcggcagcaagatcggcagcaacaacagcaccacccccaccgtgcccctgaagccccccccccccctgaccctgggcaagaccggcctgagcagaagcgtgagctgcgacaacgtgagcaaggtgggcctgcccagccccagcagcctggtgcccggcagcagcagccagctgagcggcaacggcaacagcggcaccagcggccccagcggcagcaccaccagcaagaccaccagcgagagcagcagcagccccagcgccagcctgaagggccccaccagccaggagagccagctgaacgccatgaagagactgcagatggtgaagaagaaggccgcccagaagaagctgaagaagtag

SEQ ID NO: 53673 - DNA, 267 bp, Artificial Sequence
  derived and/or modified sequence
atggccgccaccgtgaacctggagctggaccccatcttcctgaaggccctgggcttcctgcacagcaagagcaaggacagcgccgagaagctgaaggccctgctggacgagagcctggccagaggcatcgacagcagctacagacccagccagaaggacgtggagccccccaagatcagcagcaccaagaacatcagcatcaagcaggagcccaagatcagcagcagcctgcccagcggcaacaacaacggcaaggtgctgacctag

SEQ ID NO: 53674 - DNA, 399 bp, Artificial Sequence
  derived and/or modified sequence
atggccgccaccgtgaacctggagctggaccccatcttcctgaaggccctgggcttcctgcacagcaagagcaaggacagcgccgagaagctgaaggccctgctggacgagagcctggccagaggcatcgacagcagctacagacccagccagaaggacgtggagccccccaagatcagcagcaccaagaacatcagcatcaagcaggagcccaagatcagcagcagcctgcccagcggcaacaacaacggcaaggtgctgaccaccgagaaggtgaagaaggaggccgagaagagacccgccgacaagatgaagagcgacatcaccgagggcgtggacatccccaagaagcccagactggagaagcccgagacccagagcagccccatcaccgtgtag

SEQ ID NO: 53675 - DNA, 480 bp, Artificial Sequence
  derived and/or modified sequence
atggccgccaccgtgaacctggagctggaccccatcttcctgaaggccctgggcttcctgcacagcaagagcaaggacagcgccgagaagctgaaggccctgctggacgagagcctggccagaggcatcgacagcagctacagacccagccagaaggacgtggagccccccaagatcagcagcaccaagaacatcagcatcaagcaggagcccaagatcagcagcagcctgcccagcggcaacaacaacggcaaggtgctgaccaccgagaaggtgaagaaggaggccgagaagagacccgccgacaagatgaagagcgacatcaccgagggcgtggacatccccaagaagcccagactggagaagcccgagacccagagcagccccatcaccgtgcagagcagcaaggacctgcccatggccgacctgagcagcttcgaggagaccagcgccgacgacttcgccatggagatgggctag

SEQ ID NO: 53676 - DNA, 57 bp, Artificial Sequence
  derived and/or modified sequence
atggccgccaccgtgaacctggagctggaccccatcttcctgaaggccctgggctag

SEQ ID NO: 53677 - protein, 278 aa, Artificial Sequence
  derived and/or modified sequence
MDFWLWPLYFLPEYEPSWEEQPMPETPKWFHLPYLFQMPAYASSSKFVTRVTTPAQRGKVPPVHHSSPTTQITHRPRVSRASSVAGDKPRTFLPSTTASKISALEGLLKPQTPSYNHHTRLHRQRALDYGSQSGREGQGFHILIPTILGLFLLALLGLVVKRAVERRKALSRRARRLAVRMRALESSQRPRGSPRPRSQNNIYSACPRRARGADAAGTGEAPVPGPGAPLPPAPLQVSESPWLHAPSLKTSCEYVSLYHQPAAMMEDSDSDDYINVPA

SEQ ID NO: 53678 - DNA, 1441 bp, Artificial Sequence
  derived and/or modified sequence
atttcctcatcgtcaagctttgttcctcgtgggggctagaaatctctttccagttccagattgtgaagggttcctgagtaagcagcgtgtctccatccccctctctaggggctcttggatggaccttgcactctagaagggacaatggacttctggctttggccactttacttcctgccagaatacgagccatcatgggaagagcagccaatgcctgagactccaaaatggtttcatctgccctatttgttccagatgcctgcatatgccagttcttccaaattcgtaaccagagttaccacaccagctcaaaggggcaaggtccctccagttcaccactcctcccccaccacccaaatcacccaccgccctcgagtgtccagagcatcttcagtagcaggtgacaagccccgaaccttcctgccatccactacagcctcaaaaatctcagctctggaggggctgctcaagccccagacgcccagctacaaccaccacaccaggctgcacaggcagagagcactggactatggctcacagtctgggagggaaggccaaggatttcacatcctgatcccgaccatcctgggccttttcctgctggcacttctggggctggtggtgaaaagggccgttgaaaggaggaaagccctctccaggcgggcccgccgactggccgtgaggatgcgcgccctggagagctcccagaggccccgcgggtcgccgcgaccgcgctcccaaaacaacatctacagcgcctgcccgcggcgcgctcgtggagcggacgctgcaggcacaggggaggcccccgttcccggccccggagcgccgttgccccccgccccgctgcaggtgtctgaatctccctggctccatgccccatctctgaagaccagctgtgaatacgtgagcctctaccaccagcctgccgccatgatggaggacagtgattcagatgactacatcaatgttcctgcctgacaactccccagctatcccccaaccccaggctcggactgtggtgccaaggagtctcatctatctgctgatgtccaatacctgcttcatgtgttctcagagccctcatcacttcccatgccccatctcgactcccatccccatctatctgtgccctgagcatggctctgcccccaggtcgtcttgcacaccttggcagccccctgtagttgacaggtaagctgtaggcatgtagagcaattgtcccaatgccacttgcttcctttccaagccgtcgaacagactgtgggatttgcagagtgtttcttccatgtctttgaccacagggttgttgctgcccaggctctagatcacatggcatcaggctggggcagaggcatagctattgtctcgggcatccttcccagggttgggtcttacacaaatagaaggctcttgctctgagttatgtgacatgcctcag

SEQ ID NO: 53679 - DNA, 837 bp, Artificial Sequence
  derived and/or modified sequence
atggatttttggctctggccgctttacttcctacccgagtatgaacctagctgggaggagcagcccatgcccgagactccgaaatggttccatctgccctacctcttccagatgcccgcttacgctagctcgtctaagtttgtgacgagagtcactaccccagcacagaggggaaaggtgccacccgtgcaccactcttcccctaccactcaaatcactcaccggccccgggtaagccgtgcttcctctgtggccggagataagcctcgtacttttctcccctctactactgcttcgaagatttcagccctggagggactcctcaaacctcagacaccttcctataatcatcatactcgactgcacaggcagcgagccctggactatggctcccagagcggacgtgaggggcagggctttcacatactgatccccacaattctgggccttttcttgcttgcactgttgggcctggtggtcaagcgcgcagtggagcgaagaaaggccctaagccgccgtgcgcggcgtctggccgtgcggatgagagcgttggaatcaagccaaagacctaggggaagcccaagacctcgaagccagaacaatatatacagcgcatgtccccgccgtgccagaggggcagacgccgccgggacaggggaagcacctgtcccaggccctggtgcccctcttccccccgcacctctccaggtgagcgagtcaccctggcttcacgccccatctcttaagacttcctgtgaatatgtgtccctttatcaccagcctgcagccatgatggaggactctgacagcgatgattacatcaacgtaccagcgtag

SEQ ID NO: 53680 - DNA, 837 bp, Artificial Sequence
  derived and/or modified sequence
atggacttctggctgtggcccctgtacttcctgcctgaatatgagcccagctgggaggagcagcccatgcctgagacccccaagtggttccacctgccctacctgttccagatgcctgcctatgccagcagcagcaagtttgtgaccagggtgaccaccccagcccagaggggcaaggtgccccctgtgcaccacagcagccccaccacccagatcacccaccggccccgggtgtcccgggccagctctgtggccggggacaagcccaggaccttcctgcccagcaccacagccagcaagatcagcgccctggagggcctgctgaagccccagacccccagctacaaccaccacacccggctgcaccggcagagggccctggactatggcagccagagcggccgggagggccagggcttccacatcctgatccccaccatcctgggcctcttcctgctggccctgctgggcctggtggtgaagagagctgtggagaggaggaaggccctgagccggcgggcccggcggctggccgtgaggatgagggccctggagagcagccagaggccccggggcagcccccggcccaggagccagaacaacatctacagcgcctgcccccggcgggcccggggagcagatgctgctggcaccggggaggcccctgtgcccggccctggggcccccctgcccccagcccccctgcaggtgtctgagagcccctggctgcacgcccccagcctgaagaccagctgtgaatatgtgtccctgtaccaccagcctgctgccatgatggaggacagcgacagtgatgactacatcaacgtgcctgcctag

SEQ ID NO: 53681 - DNA, 837 bp, Artificial Sequence
  derived and/or modified sequence
atggacttctggctgtggcccctgtacttcctgcccgagtacgagccatcatgggaggagcagcctatgcccgagactcctaaatggttccatcttccctatttatttcagatgcccgcctacgcgtccagctccaagtttgttacccgcgtgaccactccagctcagaggggcaaggtccctcccgtgcaccatagttccccgaccacacagataacccataggccgcgggtgagcagggcaagctcagtggcgggcgataagccccggaccttcctccccagtactacggcttccaagatctcagcccttgaagggctcctcaagcctcaaactccttcatataaccatcatactaggctgcaccgtcagcgcgccttagactatggaagtcagtcaggtagagagggacagggctttcacatccttattcctaccatccttggactgttcttactggcccttctggggttggtggttaaacgggcagtagaacgcaggaaggctttaagtagacgggctagaaggttggcagtgaggatgagggcacttgagtcctcccagcggccaagaggtagtccaagaccgagatcacaaaataatatttattcagcatgcccacggagggctcgcggagcagacgcagccggaaccggcgaggcacccgtgcccggccctggcgctcctctaccacctgctccacttcaagtgtctgagtctccttggctacatgctcccagcctcaaaactagctgtgagtatgtcagtctgtaccatcagcctgccgccatgatggaagattcagattcagacgattacatcaacgttcctgcctag

SEQ ID NO: 53682 - DNA, 837 bp, Artificial Sequence
  derived and/or modified sequence
atggacttctggttgtggccactatactttctccccgagtacgagccgagctgggaggaacagcctatgcccgagacgcctaaatggtttcacttgccctatttgtttcagatgccagcctacgcctcctcttcaaagtttgtgacgcgggtgacaacgccagctcagcggggtaaggtcccacctgtacatcactcttcacccacaacccaaatcacccatcggcctcgcgtaagccgggcaagttccgtcgcgggtgataagcccaggacatttctgccgtcaaccacagccagtaagattagtgcactcgaaggactgttgaagcctcaaactccgtcatacaaccatcacactagactccatcggcaacgggcattggactacgggtcgcagtctggtcgcgaaggacaggggtttcacatcctgatccctactattctggggctgttcctgttggccctactggggcttgtggtgaagagagcagtggagcgtaggaaggctctttcccgtagagctcggaggttggcggtgaggatgcgcgcattggagtctagtcaaaggcccagagggtcccctcggccaaggtcacagaataacatttactctgcctgcccaaggagggccaggggagcggacgccgcaggcacaggggaagctcctgtcccaggccctggcgcacctttacccccagcccctctgcaagtctctgagagcccctggttgcacgcgccaagtttaaaaaccagttgcgagtacgtctctttgtaccaccaacctgccgcaatgatggaagattcggattccgacgactacatcaatgtgcctgcgtag

SEQ ID NO: 53683 - DNA, 837 bp, Artificial Sequence
  derived and/or modified sequence
atggacttctggctgtggcccctgtacttcctgcccgagtacgagcccagctgggaggagcagcccatgcccgagacccccaagtggttccacctgccctacctgttccagatgcccgcctacgccagcagcagcaagttcgtgaccagagtgaccacccccgcccagagaggcaaggtgccccccgtgcaccacagcagccccaccacccagatcacccacagacccagagtgagcagagccagcagcgtggccggcgacaagcccagaaccttcctgcccagcaccaccgccagcaagatcagcgccctggagggcctgctgaagccccagacccccagctacaaccaccacaccagactgcacagacagagagccctggactacggcagccagagcggcagagagggccagggcttccacatcctgatccccaccatcctgggcctgttcctgctggccctgctgggcctggtggtgaagagagccgtggagagaagaaaggccctgagcagaagagccagaagactggccgtgagaatgagagccctggagagcagccagagacccagaggcagccccagacccagaagccagaacaacatctacagcgcctgccccagaagagccagaggcgccgacgccgccggcaccggcgaggcccccgtgcccggccccggcgcccccctgccccccgcccccctgcaggtgagcgagagcccctggctgcacgcccccagcctgaagaccagctgcgagtacgtgagcctgtaccaccagcccgccgccatgatggaggacagcgacagcgacgactacatcaacgtgcccgcctag

SEQ ID NO: 53684 - protein, 68 aa, Artificial Sequence
  derived and/or modified sequence
MVYYPELFVWVSQEPFPNKDMEGRLPKGRLPVPKEVNRKKNDETNAASLTPLGSSELRSPRISYLHFF

SEQ ID NO: 53685 - protein, 112 aa, Artificial Sequence
  derived and/or modified sequence
MKGVWNYSALSRREDETRTQRSRMTDRVPCSKCFQVHCQISVLNCVYYPELFVWVSQEPFPNKDMEGRLPKGRLPVPKEVNRKKNDETNAASLTPLGSSELRSPRISYLHFF

SEQ ID NO: 53686 - DNA, 339 bp, Artificial Sequence
  derived and/or modified sequence
atgaaaggagtttggaactactcagccctgagtaggagagaagatgaaactaggacccagcgtagccggatgaccgaccgcgtcccgtgttccaagtgttttcaagtccactgccagatcagcgtgctaaactgcgtatactaccctgaattgttcgtctgggtcagccaggaaccattcccaaacaaagacatggaaggaaggctgcctaagggacgtctgccagtgcctaaggaggttaaccggaagaagaatgatgagacgaatgctgccagcctgactcccctgggcagcagcgaactgaggtctcccaggatctcctatctacatttcttctag

SEQ ID NO: 53687 - DNA, 339 bp, Artificial Sequence
  derived and/or modified sequence
atgaagggcgtgtggaactacagcgccctgagccggcgggaggatgagaccaggacccagaggagcaggatgacagacagagtgccctgcagcaagtgcttccaggtgcactgccagatctctgtgctgaactgtgtgtactacccagagctgtttgtgtgggtgtcccaggagcccttccccaacaaggacatggagggccgcctgcccaagggccgcctgcctgtgcccaaggaggtgaacaggaagaagaatgatgagaccaatgctgccagcctgacccccctgggcagcagcgagctgcggagcccccgcatctcctacctgcacttcttctag

SEQ ID NO: 53688 - DNA, 339 bp, Artificial Sequence
  derived and/or modified sequence
atgaagggcgtgtggaactacagcgccctgagccggcgggaggacgaaactagaacccagcgatctcggatgacagatcgggttccatgcagcaaatgcttccaggttcactgtcagatcagtgtattgaattgcgtgtactatcctgaactgttcgtatgggtgagccaggaaccctttccaaacaaagatatggagggtcggcttcctaaagggagactgccagtgcccaaagaggttaacaggaagaagaatgatgagactaatgctgcctccttaactccgctgggaagttcagaactgagaagcccgcgaatctcttacctgcatttcttctag

SEQ ID NO: 53689 - DNA, 339 bp, Artificial Sequence
  derived and/or modified sequence
atgaaaggcgtttggaactattccgctctgagccgcagagaagacgagacacggacacaacggtctagaatgacagaccgggtgccttgtagcaaatgcttccaggtccactgtcaaatctctgtcctgaattgcgtttactatcccgagctgttcgtgtgggtgagccaagaacccttccccaacaaggatatggagggacggttgcctaaaggcaggctcccagtcccgaaggaggtcaataggaaaaaaaatgacgaaaccaatgctgcatctttaacccctctgggctcctccgaactcagaagcccacggatctcatatcttcattttttttag

SEQ ID NO: 53690 - DNA, 1468 bp, Artificial Sequence
  derived and/or modified sequence
agaatgactgttgccagcatctagaaggaattacttttccaggcagtgcaatcatgctatttatcaaaagaaacattggacaatcagaatgggctgcagagctgtgtcctgagctgtctggccaactcccggcaagaagcttctttgtcctttaaagactgaactttatcctcaagcagtaacaggactggaatgaaaggagtttggaattattctgctttgagccgaagagaagatgaaacacgaacccagaggagcaggatgacagacagagtcccttgttccaaatgtttccaggttcactgccagatttctgttctgaattgtgtttattacccagaactctttgtctgggtcagtcaagaaccatttccaaacaaggacatggagggaaggcttcctaagggaagacttcctgtcccaaaggaagtgaaccgcaagaagaacgatgagacaaacgctgcctccctgactccactgggcagcagtgaactccgctccccaagaatcagttacctccactttttttaatcgtaacacctccatttgtattacatatggtgtatgggtattgatgaggtcatggtatcatatatgggatttttttctgtgtaaatcatcaagtataagaagaaactatgggactctgagccttgctttagagaatttacagtggacaaataggtgtcatcaaaccagtttttaatcattctgactcaagtgaaaacgctcagaatttcacactgtgaatccacgtttacaacccttacaggtgggccttcaggcctggttcgctacaacaatgtcttccacaactcaaactcccaccgcgctcacacaaccggtccactcctgccttttcactcacacagctcccgactgcttcttgcagaggctgagagtcccccccccaccttttttttcatttagatgtaacaaacctagtagtttatgttcatcaattgtctgtatatctctatattttatccatgtactcttttgatgtatagaagtagtttgaaactcattgtttccttgtggtaagtgaccgagatgctgccacaggacctgagacactgatgaatggtgctattttggactttcaacatgctccttggcgaggtagctctgatggagttattttttatttccatgttctaagaaggtgttggtactctgtttccctgaatgttgttctctagactggattgacttgttttccttgtgtcttcagtgtggctttcttcctcagtgttgtaggttgagcgaatgctaccagagtgtgagagaccattgtctcgttggctggcgctcacggacatgcagtcacggtagcgggagcaatcacaaaactgtaatttacttaccaaatctcttcctttccgtagcctcgcctgcctgacttagagaaagaaaagcaataattttacaggcattttgaggtgtctctttgggttctttctgtttg

SEQ ID NO: 53691 - DNA, 339 bp, Artificial Sequence
  derived and/or modified sequence
atgaagggcgtgtggaactacagcgccctgagcagaagagaggacgagaccagaacccagagaagcagaatgaccgacagagtgccctgcagcaagtgcttccaggtgcactgccagatcagcgtgctgaactgcgtgtactaccccgagctgttcgtgtgggtgagccaggagcccttccccaacaaggacatggagggcagactgcccaagggcagactgcccgtgcccaaggaggtgaacagaaagaagaacgacgagaccaacgccgccagcctgacccccctgggcagcagcgagctgagaagccccagaatcagctacctgcacttcttctag

SEQ ID NO: 53692 - protein, 33 aa, Artificial Sequence
  derived and/or modified sequence
MVYYPELFVWVSQEPFPNKDMEGRLPKGRLPVP

SEQ ID NO: 53693 - protein, 65 aa, Artificial Sequence
  derived and/or modified sequence
MVYYPELFVWVSQEPFPNKDMEGRLPKGRLPVPKEVNRKKNDETNAASLTPLGSSELRSPRISYL

SEQ ID NO: 53694 - DNA, 207 bp, Artificial Sequence
  derived and/or modified sequence
atggtgtactatccagaattgtttgtttgggtgtctcaagagccatttccaaataaagatatggaaggaaggttgccaaaaggcaggctcccggtgccaaaagaggtgaatcgcaagaaaaacgatgaaacgaacgccgccagcctcacccctctcggatcatcggagttgcggtccccccgtatcagttacctacacttcttctag

SEQ ID NO: 53695 - DNA, 207 bp, Artificial Sequence
  derived and/or modified sequence
atggtctattacccagagctctttgtttgggtaagccaggaaccatttcccaataaagacatggagggtaggctgcccaaagggcgcttgcccgtgcctaaggaagtaaacagaaaaaaaaacgatgagacgaacgccgcctcactgactcccctagggtcaagcgaactccgaagcccccgtatctcatacctgcacttcttttag

SEQ ID NO: 53696 - DNA, 207 bp, Artificial Sequence
  derived and/or modified sequence
atggtgtactaccctgaactgttcgtttgggtgagccaggaaccttttccgaataaagatatggaaggcagactgcctaagggcagactccccgtacctaaagaagttaatcgcaaaaaaaacgatgaaacgaatgccgcctctctgacacccctgggaagttctgagttacgcagcccccggatctcctacctgcacttcttttag

SEQ ID NO: 53697 - DNA, 207 bp, Artificial Sequence
  derived and/or modified sequence
atggtgtactatcctgagctgttcgtgtgggtgtcccaggagcctttccctaacaaggatatggagggtcggttgcctaagggcagactgcccgttcccaaggaagtgaataggaaaaagaatgacgaaacaaacgccgcctctctcacacctctcggatcaagtgagcttagatcgcccaggattagttatttacactttttctag

SEQ ID NO: 53698 - DNA, 207 bp, Artificial Sequence
  derived and/or modified sequence
atggtctattatcctgagctgttcgtgtgggtttcgcaggagccctttcccaacaaggatatggagggcagactgcccaaggggaggctcccagtgcctaaggaagtgaatcggaagaagaatgacgaaactaacgccgcatcactcacgccattaggctcatcagaattgcgcagtccgcgtataagctatctccacttcttctag

SEQ ID NO: 53699 - DNA, 207 bp, Artificial Sequence
  derived and/or modified sequence
atggtttattaccccgagctgttcgtgtgggtgtcccaggagccatttcccaacaaagacatggaaggccgactacccaaaggaagacttcctgtgccgaaggaagtgaatcgaaagaaaaatgacgagaccaatgccgccagtttgacccccctcggttcttcagagcttagatctcccagaatttcctatctccatttcttctag

SEQ ID NO: 53700 - DNA, 207 bp, Artificial Sequence
  derived and/or modified sequence
atggtgtactacccagagctgttcgtatgggttagtcaggaacccttccctaacaaggacatggaagggcggttgcctaagggaaggctccctgtacctaaagaggtgaacagaaagaagaacgacgagaccaacgcagcatctttgacacctttgggctcatccgagctgcgctcaccccgaatctcatatctgcactttttttag

SEQ ID NO: 53701 - DNA, 207 bp, Artificial Sequence
  derived and/or modified sequence
atggtgtactaccccgagctctttgtgtgggtctctcaggagccctttccaaacaaggacatggagggaagactcccaaaaggccgattaccagtaccgaaggaagtgaacagaaaaaaaaatgatgaaacaaatgcagcctccctcacccccctgggctctagcgaattgcgcagcccccggatctcctatctgcacttcttctag

SEQ ID NO: 53702 - DNA, 102 bp, Artificial Sequence
  derived and/or modified sequence
atggtgtactacccagaactcttcgtctgggtctctcaggaacctttcccgaataaggatatggaggggcgactccccaagggccggcttccagtgccttag

SEQ ID NO: 53703 - DNA, 207 bp, Artificial Sequence
  derived and/or modified sequence
atggtctactacccggagctgtttgtgtgggtaagccaggagcccttcccgaacaaagacatggagggcaggctgcccaaaggacgtctgccagttccgaaggaggtcaaccgaaagaaaaacgacgaaacaaacgctgcatcacttacccctttgggcagtagcgagcttagatccccccgaatcagttatttacatttcttttag

SEQ ID NO: 53704 - DNA, 207 bp, Artificial Sequence
  derived and/or modified sequence
atggtctattaccctgaactttttgtttgggtgtcacaggagcctttccctaataaggacatggaggggaggctgcccaaggggagactcccagttccaaaagaagttaaccgaaagaagaatgacgagacaaatgccgccagtctcaccccccttggaagttctgagctgaggtctccccgaatctcgtaccttcattttttttag

SEQ ID NO: 53705 - DNA, 198 bp, Artificial Sequence
  derived and/or modified sequence
atggtgtactatcctgaattgttcgtgtgggtgtcccaggagccatttcctaacaaagatatggagggcagactgcccaagggacggctgcccgtccctaaggaggtgaacagaaaaaagaatgacgaaacaaacgcggctagtctcactcctttgggctcttccgagttgcgctctccccgtataagttatttatag

SEQ ID NO: 53706 - DNA, 207 bp, Artificial Sequence
  derived and/or modified sequence
atggtgtactacccagagctgtttgtgtgggtgtcccaggagcccttccccaacaaggacatggagggccgcctgcccaagggccgcctgcctgtgcccaaggaggtgaacaggaagaagaatgatgagaccaatgctgccagcctgacccccctgggcagcagcgagctgcggagcccccgcatctcctacctgcacttcttctag

SEQ ID NO: 53707 - DNA, 102 bp, Artificial Sequence
  derived and/or modified sequence
atggtgtactacccagagctgtttgtgtgggtgtcccaggagcccttccccaacaaggacatggagggccgcctgcccaagggccgcctgcctgtgccctag

SEQ ID NO: 53708 - DNA, 198 bp, Artificial Sequence
  derived and/or modified sequence
atggtgtactacccagagctgtttgtgtgggtgtcccaggagcccttccccaacaaggacatggagggccgcctgcccaagggccgcctgcctgtgcccaaggaggtgaacaggaagaagaatgatgagaccaatgctgccagcctgacccccctgggcagcagcgagctgcggagcccccgcatctcctacctgtag

SEQ ID NO: 53709 - DNA, 207 bp, Artificial Sequence
  derived and/or modified sequence
atggtgtactaccccgagctgttcgtgtgggtgagccaggagcccttcccaaacaaggacatggaggggaggcttcccaaaggacgtttaccggtgcctaaggaagtcaataggaagaaaaatgatgaaactaacgccgccagcctcacccctttaggctctagtgagctaagaagccctcgaatcagctatctgcattttttctag

SEQ ID NO: 53710 - DNA, 207 bp, Artificial Sequence
  derived and/or modified sequence
atggtgtactaccccgagctgttcgtgtgggtgagccaggagcccttccccaacaaagatatggagggacgactaccgaaaggccggctccccgtcccaaaagaggtgaacagaaagaaaaatgacgagactaacgcggcatcactgactcccctcggcagcagcgaactccggtcccctcgcatcagctacctgcacttcttctag

SEQ ID NO: 53711 - DNA, 207 bp, Artificial Sequence
  derived and/or modified sequence
atggtgtactaccccgagctgttcgtgtgggtgagccaggagccctttccaaataaggatatggaaggcagacttcccaagggtcggctccccgtacctaaggaggtcaaccggaagaagaacgacgaaaccaatgctgcaagcctgacccctctcggcagctcagagctgaggagtccgcgtattagctatctccactttttttag

SEQ ID NO: 53712 - DNA, 207 bp, Artificial Sequence
  derived and/or modified sequence
atggtgtactaccccgagctgttcgtgtgggtgagccaggagccctttcctaacaaggatatggaaggcagactgcccaaaggtaggctgccggtacccaaagaagtgaaccggaaaaaaaacgatgagactaacgctgcgagccttacgcctttgggatcttccgagctcagaagtccaagaatctcgtacttacacttcttctag

SEQ ID NO: 53713 - DNA, 207 bp, Artificial Sequence
  derived and/or modified sequence
atggtgtactaccccgagctgttcgtgtgggtgagccaggagccctttccaaacaaggacatggagggccgactgccaaagggccgcctgcctgttcccaaggaggtcaacaggaagaagaacgacgagactaacgccgcctcactgactccgctgggttccagtgaactgagatcgcctcgaatcagctatctccactttttctag

SEQ ID NO: 53714 - DNA, 207 bp, Artificial Sequence
  derived and/or modified sequence
atggtgtactaccccgagctgttcgtgtgggtgagccaggagcccttccctaataaggacatggagggcagactgcccaagggacggttgcccgtgccaaaagaagtcaatcgcaagaagaacgacgaaacaaacgcagccagtctgacccctcttggcagtagcgaattacggtctccgcgcattagctacctgcattttttttag

SEQ ID NO: 53715 - DNA, 207 bp, Artificial Sequence
  derived and/or modified sequence
atggtgtactaccccgagctgttcgtgtgggtgagccaggagccctttcccaataaagatatggagggtcggctgcctaagggcaggctcccagtgcccaaggaggttaatagaaagaaaaatgacgaaacaaacgcagcctccctaacgcctctgggcagttctgaacttcgctcaccccggatatcttacctgcacttcttttag

SEQ ID NO: 53716 - DNA, 207 bp, Artificial Sequence
  derived and/or modified sequence
atggtgtactaccccgagctgttcgtgtgggtgagccaggagccctttccaaataaagacatggaaggacgtctgcctaaaggccgcctccccgttcctaaagaggtaaacagaaaaaagaacgacgagactaatgccgcatctctgacacctttggggagcagcgagttacgatcccccagaataagttatttgcatttcttttag

SEQ ID NO: 53717 - DNA, 102 bp, Artificial Sequence
  derived and/or modified sequence
atggtgtactaccccgagctgttcgtgtgggtgagccaggagcccttccccaataaagatatggaggggaggttgcccaaaggacgtctgccagttccctag

SEQ ID NO: 53718 - DNA, 207 bp, Artificial Sequence
  derived and/or modified sequence
atggtgtactaccccgagctgttcgtgtgggtgagccaggagccctttccgaacaaggatatggaaggccgactgcctaaggggcggctgcccgttcctaaggaagtgaatcggaagaaaaacgatgagactaacgctgctagcctgacacccctcggttcatcagagttgcgttcccctaggatctcttaccttcacttcttctag

SEQ ID NO: 53719 - DNA, 207 bp, Artificial Sequence
  derived and/or modified sequence
atggtgtactaccccgagctgttcgtgtgggtgagccaggagccctttcctaataaagacatggagggaagactgccaaagggccggctccctgttccaaaagaagtgaacagaaagaagaacgacgaaacaaacgctgcatccctgaccccgcttggctcttccgaactccgctcgccgaggatatcctaccttcattttttttag

SEQ ID NO: 53720 - DNA, 198 bp, Artificial Sequence
  derived and/or modified sequence
atggtgtactaccccgagctgttcgtgtgggtgagccaggagcccttccccaacaaagacatggagggcaggttgccaaagggtcgtctgcctgttcccaaggaagttaaccgtaagaagaatgatgagactaacgccgcctcacttacgcctctgggaagctctgaattgcgaagcccaagaatctcctatctgtag

SEQ ID NO: 53721 - DNA, 207 bp, Artificial Sequence
  derived and/or modified sequence
atggtgtactatcctgaactgtttgtgtgggttagtcaggagccgtttcccaacaaagacatggagggcagattacccaagggccgactgcctgtgcctaaagaagtgaatcgcaaaaaaaatgacgagaccaatgctgccagcctcactcctttaggctcaagtgaactcagatcaccaaggatcagttacttacatttcttctag

SEQ ID NO: 53722 - DNA, 207 bp, Artificial Sequence
  derived and/or modified sequence
atggtgtattatcccgagctgtttgtgtgggtgtcccaagagccattccctaacaaggacatggaagggaggctgcccaaaggtcgtctacccgtgcccaaagaggtcaatcgaaagaaaaacgatgagactaatgctgcatcactgacaccattaggctcttccgaactccgcagcccacgcatcagttatctgcacttcttttag

SEQ ID NO: 53723 - DNA, 207 bp, Artificial Sequence
  derived and/or modified sequence
atggtgtactacccagaattgtttgtctgggtctcacaagagccgtttccaaacaaagacatggagggtagactccccaagggtcgcctcccagttcccaaagaggttaacaggaaaaagaacgacgaaacgaatgccgcttctctgacaccactcggcagtagtgaactgcgtagtcccagaatctcctatttgcatttcttttag

SEQ ID NO: 53724 - DNA, 207 bp, Artificial Sequence
  derived and/or modified sequence
atggtttactacccagagctgtttgtatgggtttctcaggagccgtttcccaataaggacatggaagggagactgccaaagggtcgccttcccgttcctaaggaggtgaaccggaagaagaatgacgagacaaacgctgctagtttgactcctcttggctcttccgagctgcggagccctagaatcagttacctccactttttctag

SEQ ID NO: 53725 - DNA, 207 bp, Artificial Sequence
  derived and/or modified sequence
atggtatattaccccgagctgtttgtgtgggtatcgcaggagccatttcccaataaggacatggaaggtagacttcccaagggaaggctgcccgtgccgaaggaagtgaaccggaaaaaaaacgatgaaacaaacgctgcctcacttactccactaggcagttccgaacttcgatcacctcggatcagctatctccactttttttag

SEQ ID NO: 53726 - DNA, 207 bp, Artificial Sequence
  derived and/or modified sequence
atggtgtattatccagaactattcgtgtgggtgtcgcaggaaccgtttccaaacaaagacatggaaggacgtctgcctaagggacgcctaccggttcctaaagaagtgaatcggaagaaaaacgatgaaaccaatgccgcaagtctaacgccgctcggctccagcgagttgcgctcgcctaggatctcatatttgcacttcttctag

SEQ ID NO: 53727 - DNA, 207 bp, Artificial Sequence
  derived and/or modified sequence
atggtttactacccagaattgttcgtctgggtctctcaggaaccattccctaacaaggacatggaaggtaggctgcccaaaggtcggctacccgtccctaaagaggtgaatcgcaagaagaacgacgaaactaacgccgcatccctgacccctctgggttccagtgagcttcggtccccgaggatcagctatttacactttttctag

SEQ ID NO: 53728 - DNA, 207 bp, Artificial Sequence
  derived and/or modified sequence
atggtctactaccccgaactcttcgtgtgggttagtcaagagccattccctaacaaggatatggaaggccgactccctaagggcagacttcccgtcccgaaggaagtgaatcgcaagaaaaacgacgagactaatgctgcaagcctgaccccgctcggtagtagcgaactccggagtcccagaatcagctacctccactttttctag

SEQ ID NO: 53729 - DNA, 102 bp, Artificial Sequence
  derived and/or modified sequence
atggtgtactaccctgaattgtttgtctgggtatcccaggaaccatttcctaataaagatatggagggccgtttacccaaggggcgactgcccgtaccatag

SEQ ID NO: 53730 - DNA, 207 bp, Artificial Sequence
  derived and/or modified sequence
atggtttattaccctgaactgtttgtgtgggttagccaagaaccctttccgaacaaggacatggaaggccgtctgcctaaggggcgtctccctgttcctaaggaggtcaatcgtaagaagaacgatgaaacaaatgccgcttcccttaccccacttggctcttctgagctccgatcccccagaatcagctatctacatttcttttag

SEQ ID NO: 53731 - DNA, 207 bp, Artificial Sequence
  derived and/or modified sequence
atggtgtactaccctgagctctttgtttgggtctcccaggaaccctttcccaataaggacatggagggcaggcttccaaaggggaggctgcctgtcccaaaggaggtcaatcggaaaaaaaatgacgaaactaacgctgcgtctctgacccccctgggttctagtgagctccgctcccccagaatatcatatctccacttcttttag

SEQ ID NO: 53732 - DNA, 198 bp, Artificial Sequence
  derived and/or modified sequence
atggtctattatcctgagctcttcgtttgggttagtcaggaaccttttcctaataaagacatggaaggacgtctgccaaagggtcggctgcccgtgccgaaggaagttaaccgtaagaagaacgacgaaaccaacgcagctagcttgaccccccttgggtcctccgagctgcgctccccgagaatcagctatttgtag

SEQ ID NO: 53733 - DNA, 2581 bp, Artificial Sequence
  derived and/or modified sequence
cggggcgcagagctgcgggtccgctttgtctccccggggcgccgcgcggtgcagtggggacggcgcggcgagcggggcgcccggggcgcgggtgcggggtgtcggggcgcgcgcgcctgttggccgctcgccgacggggcccagagccgccgattcctgccgagtgtagagaggagagagagtgaacagggagcggggcttttgtctgttggtctccctggactgaagagagggagaatagaagcccaagactaagattctcaaaatggtttattacccagaactctttgtctgggtcagtcaagaaccatttccaaacaaggacatggagggaaggcttcctaagggaagacttcctgtcccaaaggaagtgaaccgcaagaagaacgatgagacaaacgctgcctccctgactccactgggcagcagtgaactccgctccccaagaatcagttacctccactttttttaatcgtaacacctccatttgtattacatatggtgtatgggtattgatgaggtcatggtatcatatatgggatttttttctgtgtaaatcatcaagtataagaagaaactatgggactctgagccttgctttagagaatttacagtggacaaataggtgtcatcaaaccagtttttaatcattctgactcaagtgaaaacgctcagaatttcacactgtgaatccacgtttacaacccttacaggtgggccttcaggcctggttcgctacaacaatgtcttccacaactcaaactcccaccgcgctcacacaaccggtccactcctgccttttcactcacacagctcccgactgcttcttgcagaggctgagagtcccccccccaccttttttttcatttagatgtaacaaacctagtagtttatgttcatcaattgtctgtatatctctatattttatccatgtactcttttgatgtatagaagtagtttgaaactcattgtttccttgtggtaagtgaccgagatgctgccacaggacctgagacactgatgaatggtgctattttggactttcaacatgctccttggcgaggtagctctgatggagttattttttatttccatgttctaagaaggtgttggtactctgtttccctgaatgttgttctctagactggattgacttgttttccttgtgtcttcagtgtggctttcttcctcagtgttgtaggttgagcgaatgctaccagagtgtgagagaccattgtctcgttggctggcgctcacggacatgcagtcacggtagcgggagcaatcacaaaactgtaatttacttaccaaatctcttcctttccgtagcctcgcctgcctgacttagagaaagaaaagcaataattttacaggcattttgaggtgtctctttgggttctttctgtttgaaaggatatttgtcgaaaaaaagagcaaaaccgttttaaataaactccccctggaaaaaaacccaaaacactggcatctgagtgggaatatgaaaatgacaccttttccaaatattaaattggaaaacaaggtctacaaaatcatgatacttttttaaaaggcagagcattcttttttcggcaattttgataagcaaggtgtagatttacatttttgtccttgctcccaacgaaatggataaacaaaaataaattaccatctactcatggaatgttgttgtgttagccagtctgaaagcccaccttaatttttatataactgtctttagctcttcttttgacagggcaggccttgttctgaactgtttcgcttctgactgttaaacaccgatgacgcatgcactgcacttcttcgttttcttcttgctcccccattggcctgagtttcttgtgcattactcctctccctccttcgttagaataggtatatcagctgtgtaaatagagcaagaaaacagtattctgcatctgtggcatttatgtagagttgcagttgtgtactgctgaaaatgcaggcttttgtaacagtgtgatctttactgatgcactcatgacaagtacccaatgtattttagctattttagtagtatttgttcaataaatacgcaagctgtaaggtaactgtctgatttggctcatcattgaagaggcctagttttgaatgtcttctctggttcttgctaattcatgtgtttccagagccccagaagtcaggccagcaaacccaagggcaaatatcaaaagagagagaatcagctctgcctttcatgcgttttcccttttgaggattttatgagattaggggctaggcagtggctcattaagatggtatttgcagagctgcctctggacacaaagcagaattagaccaagatccttttatttctacactttttctcccttccaaggcattcccatacgcttcaaaacttactctttctcactccttgccattaagacccactctgtggtattctttaagacccactctgtggtattctttctttttccctgccaaaagagatctgacctcccttcttcatggaatatgtgcacttttcctcagacaaaaagcttaaacttttgtaagaggataaaaatttgagacagaa

SEQ ID NO: 53734 - DNA, 704 bp, Artificial Sequence
  derived and/or modified sequence
agtctggctcctaggcggctgcacagtggcagcaaggctggggcgctggctccgcgccagctccatcagaattagctcattgttcactagcaccctagcgggagagagagggaaagggagagagagagactcttagagaaagagagagacacacacactcttggagagagagcgcgaggtgtagagaggagagagagtgaacagggagcggggcttttgtctgttggtctccctggactgaagagagggagaatagaagcccaagactaagattctcaaaatggtttattacccagaactctttgtctgggtcagtcaagaaccatttccaaacaaggacatggagggaaggcttcctaagggaagacttcctgtcccaaaggaagtgaaccgcaagaagaacgatgagacaaacgctgcctccctgactccactgggcagcagtgaactccgctccccaagaatcagttacctccactttttttaatcgtaacacctccatttgtattacatatggtgtatgggtattgatgaggtcatggtatcatatatgggatttttttctgtgtaaatcatcaagtataagaagaaactatgggactctgagccttgctttagagaatttacagtggacaaataggtgtcatcaaaccagtttttaatcattctgactcaagtgaaaacgctcagaatttcacactgtg

SEQ ID NO: 53735 - DNA, 2065 bp, Artificial Sequence
  derived and/or modified sequence
actagcaccctagcgggagagagagggaaagggagagagagagactcttagagaaagagagagacacacacactcttggagagagagcgcgaggcagggagatgatctcctcctcctttttccaaggctgcacttcttggaagtgaagccggtgtagagaggagagagagtgaacagggagcggggcttttgtctgttggtctccctggactgaagagagggagaatagaagcccaagactaagattctcaaaatggtttattacccagaactctttgtctgggtcagtcaagaaccatttccaaacaaggacatggagggaaggcttcctaagggaagacttcctgtcccaaaggaagtgaaccgcaagaagaacgatgagacaaacgctgcctccctgactccactgggcagcagtgaactccgctccccaagaatcagttacctccactttttttaatcgtaacacctccatttgtattacatatggtgtatgggtattgatgaggtcatggtatcatatatgggatttttttctgtgtaaatcatcaagtataagaagaaactatgggactctgagccttgctttagagaatttacagtggacaaataggtgtcatcaaaccagtttttaatcattctgactcaagtgaaaacgctcagaatttcacactgtgaatccacgtttacaacccttacaggtgggccttcaggcctggttcgctacaacaatgtcttccacaactcaaactcccaccgcgctcacacaaccggtccactcctgccttttcactcacacagctcccgactgcttcttgcagaggctgagagtcccccccccaccttttttttcatttagatgtaacaaacctagtagtttatgttcatcaattgtctgtatatctctatattttatccatgtactcttttgatgtatagaagtagtttgaaactcattgtttccttgtggtaagtgaccgagatgctgccacaggacctgagacactgatgaatggtgctattttggactttcaacatgctccttggcgaggtagctctgatggagttattttttatttccatgttctaagaaggtgttggtactctgtttccctgaatgttgttctctagactggattgacttgttttccttgtgtcttcagtgtggctttcttcctcagtgttgtaggttgagcgaatgctaccagagtgtgagagaccattgtctcgttggctggcgctcacggacatgcagtcacggtagcgggagcaatcacaaaactgtaatttacttaccaaatctcttcctttccgtagcctcgcctgcctgacttagagaaagaaaagcaataattttacaggcattttgaggtgtctctttgggttctttctgtttgaaaggatatttgtcgaaaaaaagagcaaaaccgttttaaataaactccccctggaaaaaaacccaaaacactggcatctgagtgggaatatgaaaatgacaccttttccaaatattaaattggaaaacaaggtctacaaaatcatgatacttttttaaaaggcagagcattcttttttcggcaattttgataagcaaggtgtagatttacatttttgtccttgctcccaacgaaatggataaacaaaaataaattaccatctactcatggaatgttgttgtgttagccagtctgaaagcccaccttaatttttatataactgtctttagctcttcttttgacagggcaggccttgttctgaactgtttcgcttctgactgttaaacaccgatgacgcatgcactgcacttcttcgttttcttcttgctcccccattggcctgagtttcttgtgcattactcctctccctccttcgttagaataggtatatcagctgtgtaaatagagcaagaaaacagtattctgcatctgtggcatttatgtagagttgcagttgtgtactgctgaaaatgcaggcttttgtaacagtgtgatctttactgatgcactcatgacaagtacccaatgtattttagctattttagtagtatttgttcaataaatacgca

SEQ ID NO: 53736 - DNA, 2304 bp, Artificial Sequence
  derived and/or modified sequence
actctgaggcattacactacacggtggaaggctgattcctattctgtcgtcttgattgcaaatatactgccagtagtatgtctgggaacaaagagcagccagaaaacaatctatttttatcacttggttctacttttaagttgctaaaccttttgaactcatgcaatttaaagatgaaccaaacactaagaatagcccaggactctgcaaagccaagtaccagggattcctttgtcccttagttaagcctataggccacttggaaagctctttcagaaatcccagtagttaacaataatttgcatgtaacttatcttaaccacagaaaatggttattcgtctgtaacctctaaagaggcatttttcgtttgctgacctgtggtgaggcgatgtgtctactgtatttaaacatattttgcaggttggtctccctggactgaagagagggagaatagaagcccaagactaagattctcaaaatggtttattacccagaactctttgtctgggtcagtcaagaaccatttccaaacaaggacatggagggaaggcttcctaagggaagacttcctgtcccaaaggaagtgaaccgcaagaagaacgatgagacaaacgctgcctccctgactccactgggcagcagtgaactccgctccccaagaatcagttacctccactttttttaatcgtaacacctccatttgtattacatatggtgtatgggtattgatgaggtcatggtatcatatatgggatttttttctgtgtaaatcatcaagtataagaagaaactatgggactctgagccttgctttagagaatttacagtggacaaataggtgtcatcaaaccagtttttaatcattctgactcaagtgaaaacgctcagaatttcacactgtgaatccacgtttacaacccttacaggtgggccttcaggcctggttcgctacaacaatgtcttccacaactcaaactcccaccgcgctcacacaaccggtccactcctgccttttcactcacacagctcccgactgcttcttgcagaggctgagagtcccccccccaccttttttttcatttagatgtaacaaacctagtagtttatgttcatcaattgtctgtatatctctatattttatccatgtactcttttgatgtatagaagtagtttgaaactcattgtttccttgtggtaagtgaccgagatgctgccacaggacctgagacactgatgaatggtgctattttggactttcaacatgctccttggcgaggtagctctgatggagttattttttatttccatgttctaagaaggtgttggtactctgtttccctgaatgttgttctctagactggattgacttgttttccttgtgtcttcagtgtggctttcttcctcagtgttgtaggttgagcgaatgctaccagagtgtgagagaccattgtctcgttggctggcgctcacggacatgcagtcacggtagcgggagcaatcacaaaactgtaatttacttaccaaatctcttcctttccgtagcctcgcctgcctgacttagagaaagaaaagcaataattttacaggcattttgaggtgtctctttgggttctttctgtttgaaaggatatttgtcgaaaaaaagagcaaaaccgttttaaataaactccccctggaaaaaaacccaaaacactggcatctgagtgggaatatgaaaatgacaccttttccaaatattaaattggaaaacaaggtctacaaaatcatgatacttttttaaaaggcagagcattcttttttcggcaattttgataagcaaggtgtagatttacatttttgtccttgctcccaacgaaatggataaacaaaaataaattaccatctactcatggaatgttgttgtgttagccagtctgaaagcccaccttaatttttatataactgtctttagctcttcttttgacagggcaggccttgttctgaactgtttcgcttctgactgttaaacaccgatgacgcatgcactgcacttcttcgttttcttcttgctcccccattggcctgagtttcttgtgcattactcctctccctccttcgttagaataggtatatcagctgtgtaaatagagcaagaaaacagtattctgcatctgtggcatttatgtagagttgcagttgtgtactgctgaaaatgcaggcttttgtaacagtgtgatctttactgatgcactcatgacaagtacccaatgtattttagctattttagtagtatttgttcaataaatacgcaagctgtaaggtaa

SEQ ID NO: 53737 - DNA, 636 bp, Artificial Sequence
  derived and/or modified sequence
aggaagtcaactatccaccatcttgtcggatccatgcagtcttagcagactttcttcacaccatggatgattgaatccactactctttgcatgtttaaagacagagaaggcagattctctgcagagagacgtgaagagaaggttggtctccctggactgaagagagggagaatagaagcccaagactaagattctcaaaatggtttattacccagaactctttgtctgggtcagtcaagaaccatttccaaacaaggacatggagggaaggcttcctaagggaagacttcctgtcccaaaggaagtgaaccgcaagaagaacgatgagacaaacgctgcctccctgactccactgggcagcagtgaactccgctccccaagaatcagttacctccactttttttaatcgtaacacctccatttgtattacatatggtgtatgggtattgatgaggtcatggtatcatatatgggatttttttctgtgtaaatcatcaagtataagaagaaactatgggactctgagccttgctttagagaatttacagtggacaaataggtgtcatcaaaccagtttttaatcattctgactcaagtgaaaacgctcagaatttcacactgtgaatccacgtttac

SEQ ID NO: 53738 - DNA, 559 bp, Artificial Sequence
  derived and/or modified sequence
acactcttggagagagagcgcgaggcagggagatgatctcctcctcctttttccaaggctgcacttcttggaagtgaagccgagaggagagagagtgaacagggagcggggcttttgtctgttggtctccctggactgaagagagggagaatagaagcccaagactaagattctcaaaatggtttattacccagaactctttgtctgggtcagtcaagaaccatttccaaacaaggacatggagggaaggcttcctaagggaagacttcctgtcccaaaggaagtgaaccgcaagaagaacgatgagacaaacgctgcctccctgactccactgggcagcagtgaactccgctccccaagaatcagttacctccactttttttaatcgtaacacctccatttgtattacatatggtgtatgggtattgatgaggtcatggtatcatatatgggatttttttctgtgtaaatcatcaagtataagaagaaactatgggactctgagccttgctttagagaatttacagtggacaaataggtgtcatcaaaccagttttta

SEQ ID NO: 53739 - DNA, 698 bp, Artificial Sequence
  derived and/or modified sequence
acgcgcagccacaggacctctgggcccggccttcaggggcgctccccgccccgggcttccccgcggaagggagtggggcgcgcgtacccagctgaggggcagggtccgacccgaggccgtgtgcaaatgcatccttcgcggactctttgtgtgtctgagcgcggctccgcgccgccgcaggcaccattttctgcttcgctcaggacaggcacataaaaggaaggcggctgccgcccgtcgccgtcctcttttcctcagatgccctctgctgcaggtgtagagaggagagagagtgaacagggagcggggcttttgtctgttggtctccctggactgaagagagggagaatagaagcccaagactaagattctcaaaatggtttattacccagaactctttgtctgggtcagtcaagaaccatttccaaacaaggacatggagggaaggcttcctaagggaagacttcctgtcccaaaggaagtgaaccgcaagaagaacgatgagacaaacgctgcctccctgactccactgggcagcagtgaactccgctccccaagaatcagttacctccactttttttaatcgtaacacctccatttgtattacatatggtgtatgggtattgatgaggtcatggtatcatatatgggatttttttctgtgtaaatcatcaagtataagaagaaactatgggact

SEQ ID NO: 53740 - DNA, 475 bp, Artificial Sequence
  derived and/or modified sequence
acctctgggcccggccttcaggggcgctccccgccccgggcttccccgcggaagggagtggggcgcgcgtacccagctgaggggcagggtccgacccgaggccgtgtgcaaatgcatccttcgcggactctttgtgtgtctgagcgcggctccgcgccgccgcaggcaccattttctgcttcgctcaggacaggcacataaaaggaaggcggctgccgcccgtcgccgtcctcttttcctcagatgccctctgctgcaggtttattattacagtgtagagaggagagagagtgaacagggagcggggcttttgtctgttggtctccctggactgaagagagggagaatagaagcccaagactaagattctcaaaatggtttattacccagaactctttgtctgggtcagtcaagaaccatttccaaacaaggacatggagggaaggcttcctaagggaagacttcctgtcccaaa

SEQ ID NO: 53741 - DNA, 540 bp, Artificial Sequence
  derived and/or modified sequence
cggggcgcgggtgcggggtgtcggggcgcgcgcgcctgttggccgctcgccgacggggcccagagccgccgattcctgccgagtgtagagaggagagagagtgaacagggagcggggcttttgtctaaaatggttattcgtctgtaacctctaaagaggcatttttcgtttgctgacctgtggtgaggcgatgtgtctactgtatttaaacatattttgcaggttggtctccctggactgaagagagggagaatagaagcccaagactaagattctcaaaatggtttattacccagaactctttgtctgggtcagtcaagaaccatttccaaacaaggacatggagggaaggcttcctaagggaagacttcctgtcccaaaggaagtgaaccgcaagaagaacgatgagacaaacgctgcctccctgactccactgggcagcagtgaactccgctccccaagaatcagttacctccactttttttaatcgtaacacctccatttgtattacatatggtgtatgggtattgatgaggtcat

SEQ ID NO: 53742 - DNA, 587 bp, Artificial Sequence
  derived and/or modified sequence
agacacacacactcttggagagagagcgcgaggcagggagatgatctcctcctcctttttccaaggctgcacttcttggaagtgtagagaggagagagagtgaacagggagcggggcttttgtctgttggtctccctggactgaagagagggagaatagaagcccaagactaagattctcaaaatggtttattacccagaactctttgtctgggtcagtcaagaaccatttccaaacaaggacatggagggaaggcttcctaagggaagacttcctgtcccaaaggaagtgaaccgcaagaagaacgatgagacaaacgctgcctccctgactccactgggcagcagtgaactccgctccccaagaatcagttacctccactttttttaatcgtaacacctccatttgtattacatatggtgtatgggtattgatgaggtcatggtatcatatatgggatttttttctgtgtaaatcatcaagtataagaagaaactatgggactctgagccttgctttagagaatttacagtggacaaataggtgtcatcaaaccagtttttaatcattctgactcaagtgaaaac

SEQ ID NO: 53743 - DNA, 557 bp, Artificial Sequence
  derived and/or modified sequence
aaatgcatccttcgcggactctttgtgtgtctgagcgcggctccgcgccgccgcaggcaccattttctgcttcgctcaggacaggcacataaaaggaaggcggctgccgcccgtcgccgtcctcttttcctcagatgccctctgctgcaggtttattattacagtgtagagaggagagagagtgaacagggagcggggcttttgtctaaaatggttattcgtctgtaacctctaaagaggcatttttcgtttgctgacctgtggtgaggcgatgtgtctactgtatttaaacatattttgcaggttggtctccctggactgaagagagggagaatagaagcccaagactaagattctcaaaatggtttattacccagaactctttgtctgggtcagtcaagaaccatttccaaacaaggacatggagggaaggcttcctaagggaagacttcctgtcccaaaggaagtgaaccgcaagaagaacgatgagacaaacgctgcctccctgactccactgggcagcagtgaactccgctccccaagaatcagttacctcc

SEQ ID NO: 53744 - DNA, 207 bp, Artificial Sequence
  derived and/or modified sequence
atggtgtactaccccgagctgttcgtgtgggtgagccaggagcccttccccaacaaggacatggagggcagactgcccaagggcagactgcccgtgcccaaggaggtgaacagaaagaagaacgacgagaccaacgccgccagcctgacccccctgggcagcagcgagctgagaagccccagaatcagctacctgcacttcttctag

SEQ ID NO: 53745 - DNA, 102 bp, Artificial Sequence
  derived and/or modified sequence
atggtgtactaccccgagctgttcgtgtgggtgagccaggagcccttccccaacaaggacatggagggcagactgcccaagggcagactgcccgtgccctag

SEQ ID NO: 53746 - DNA, 198 bp, Artificial Sequence
  derived and/or modified sequence
atggtgtactaccccgagctgttcgtgtgggtgagccaggagcccttccccaacaaggacatggagggcagactgcccaagggcagactgcccgtgcccaaggaggtgaacagaaagaagaacgacgagaccaacgccgccagcctgacccccctgggcagcagcgagctgagaagccccagaatcagctacctgtag

SEQ ID NO: 53747 - protein, 1828 aa, Artificial Sequence
  derived and/or modified sequence
MAASELYTKFARVWIPDPEEVWKSAELLKDYKPGDKVLLLHLEEGKDLEYHLDPKTKELPHLRNPDILVGENDLTALSYLHEPAVLHNLRVRFIDSKLIYTYCGIVLVAINPYEQLPIYGEDIINAYSGQNMGDMDPHIFAVAEEAYKQMARDERNQSIIVSGESGAGKTVSAKYAMRYFATVSGSASEANVEEKVLASNPIMESIGNAKTTRNDNSSRFGKYIEIGFDKRYRIIGANMRTYLLEKSRVVFQAEEERNYHIFYQLCASAKLPEFKMLRLGNADNFNYTKQGGSPVIEGVDDAKEMAHTRQACTLLGISESHQMGIFRILAGILHLGNVGFTSRDADSCTIPPKHEPLCIFCELMGVDYEEMCHWLCHRKLATATETYIKPISKLQATNARDALAKHIYAKLFNWIVDNVNQALHSAVKQHSFIGVLDIYGFETFEINSFEQFCINYANEKLQQQFNMHVFKLEQEEYMKEQIPWTLIDFYDNQPCINLIESKLGILDLLDEECKMPKGTDDTWAQKLYNTHLNKCALFEKPRLSNKAFIIQHFADKVEYQCEGFLEKNKDTVFEEQIKVLKSSKFKMLPELFQDDEKAISPTSATSSGRTPLTRTPAKPTKGRPGQMAKEHKKTVGHQFRNSLHLLMETLNATTPHYVRCIKPNDFKFPFTFDEKRAVQQLRACGVLETIRISAAGFPSRWTYQEFFSRYRVLMKQKDVLSDRKQTCKNVLEKLILDKDKYQFGKTKIFFRAGQVAYLEKLRADKLRAACIRIQKTIRGWLLRKKYLRMRKAAITMQRYVRGYQARCYAKFLRRTKAATIIQKYWRMYVVRRRYKIRRAATIVLQSYLRGFLARNRYRKILREHKAVIIQKRVRGWLARTHYKRSMHAIIYLQCCFRRMMAKRELKKLKIEARSVERYKKLHIGMENKIMQLQRKVDEQNKDYKCLVEKLTNLEGIYNSETEKLRSDLERLQLSEEEAKVATGRVLSLQEEIAKLRKDLEQTRSEKKCIEEHADRYKQETEQLVSNLKEENTLLKQEKEALNHRIVQQAKEMTETMEKKLVEETKQLELDLNDERLRYQNLLNEFSRLEERYDDLKEEMTLMVHVPKPGHKRTDSTHSSNESEYIFSSEIAEMEDIPSRTEEPSEKKVPLDMSLFLKLQKRVTELEQEKQVMQDELDRKEEQVLRSKAKEEERPQIRGAELEYESLKRQELESENKKLKNELNELRKALSEKSAPEVTAPGAPAYRVLMEQLTSVSEELDVRKEEVLILRSQLVSQKEAIQPKDDKNTMTDSTILLEDVQKMKDKGEIAQAYIGLKETNRLLESQLQSQKRSHENEAEALRGEIQSLKEENNRQQQLLAQNLQLPPEARIEASLQHEITRLTNENLDLMEQLEKQDKTVRKLKKQLKVFAKKIGELEVGQMENISPGQIIDEPIRPVNIPRKEKDFQGMLEYKKEDEQKLVKNLILELKPRGVAVNLIPGLPAYILFMCVRHADYLNDDQKVRSLLTSTINSIKKVLKKRGDDFETVSFWLSNTCRFLHCLKQYSGEEGFMKHNTSRQNEHCLTNFDLAEYRQVLSDLAIQIYQQLVRVLENILQPMIVSGMLEHETIQGVSGVKPTGLRKRTSSIADEGTYTLDSILRQLNSFHSVMCQHGMDPELIKQVVKQMFYIIGAITLNNLLLRKDMCSWSKGMQIRYNVSQLEEWLRDKNLMNSGAKETLEPLIQAAQLLQVKKKTDDDAEAICSMCNALTTAQIVKVLNLYTPVNEFEERVSVSFIRTIQMRLRDRKDSPQLLMDAKHIFPVTFPFNPSSLALETIQIPASLGLGFISRV

SEQ ID NO: 53748 - protein, 1362 aa, Artificial Sequence
  derived and/or modified sequence
MHVFKLEQEEYMKEQIPWTLIDFYDNQPCINLIESKLGILDLLDEECKMPKGTDDTWAQKLYNTHLNKCALFEKPRLSNKAFIIQHFADKVEYQCEGFLEKNKDTVFEEQIKVLKSSKFKMLPELFQDDEKAISPTSATSSGRTPLTRTPAKPTKGRPGQMAKEHKKTVGHQFRNSLHLLMETLNATTPHYVRCIKPNDFKFPFTFDEKRAVQQLRACGVLETIRISAAGFPSRWTYQEFFSRYRVLMKQKDVLSDRKQTCKNVLEKLILDKDKYQFGKTKIFFRAGQVAYLEKLRADKLRAACIRIQKTIRGWLLRKKYLRMRKAAITMQRYVRGYQARCYAKFLRRTKAATIIQKYWRMYVVRRRYKIRRAATIVLQSYLRGFLARNRYRKILREHKAVIIQKRVRGWLARTHYKRSMHAIIYLQCCFRRMMAKRELKKLKIEARSVERYKKLHIGMENKIMQLQRKVDEQNKDYKCLVEKLTNLEGIYNSETEKLRSDLERLQLSEEEAKVATGRVLSLQEEIAKLRKDLEQTRSEKKCIEEHADRYKQETEQLVSNLKEENTLLKQEKEALNHRIVQQAKEMTETMEKKLVEETKQLELDLNDERLRYQNLLNEFSRLEERYDDLKEEMTLMVHVPKPGHKRTDSTHSSNESEYIFSSEIAEMEDIPSRTEEPSEKKVPLDMSLFLKLQKRVTELEQEKQVMQDELDRKEEQVLRSKAKEEERPQIRGAELEYESLKRQELESENKKLKNELNELRKALSEKSAPEVTAPGAPAYRVLMEQLTSVSEELDVRKEEVLILRSQLVSQKEAIQPKDDKNTMTDSTILLEDVQKMKDKGEIAQAYIGLKETNRLLESQLQSQKRSHENEAEALRGEIQSLKEENNRQQQLLAQNLQLPPEARIEASLQHEITRLTNENLDLMEQLEKQDKTVRKLKKQLKVFAKKIGELEVGQMENISPGQIIDEPIRPVNIPRKEKDFQGMLEYKKEDEQKLVKNLILELKPRGVAVNLIPGLPAYILFMCVRHADYLNDDQKVRSLLTSTINSIKKVLKKRGDDFETVSFWLSNTCRFLHCLKQYSGEEGFMKHNTSRQNEHCLTNFDLAEYRQVLSDLAIQIYQQLVRVLENILQPMIVSGMLEHETIQGVSGVKPTGLRKRTSSIADEGTYTLDSILRQLNSFHSVMCQHGMDPELIKQVVKQMFYIIGAITLNNLLLRKDMCSWSKGMQIRYNVSQLEEWLRDKNLMNSGAKETLEPLIQAAQLLQVKKKTDDDAEAICSMCNALTTAQIVKVLNLYTPVNEFEERVSVSFIRTIQMRLRDRKDSPQLLMDAKHIFPVTFPFNPSSLALETIQIPASLGLGFISRV

SEQ ID NO: 53749 - DNA, 5487 bp, Artificial Sequence
  derived and/or modified sequence
atggcggcatctgaactgtacacaaagtttgcccgcgtctggatccccgatcccgaggaggtgtggaagtccgccgaactcctcaaggactataagcccggggacaaagttttgctcctgcacctggaggaggggaaggatctggaatatcacttggatccaaaaactaaggaactgccccatcttagaaacccggatatcttggtgggcgaaaatgaccttaccgctttatcttacctgcatgaaccggcggtgctgcataatcttcgggtgaggtttatcgacagtaagttaatttacacctattgcggcatagtccttgtggctatcaacccatacgagcagctgcccatatacggggaggatattatcaacgcatattcaggccagaacatgggagacatggacccgcatatctttgccgtggctgaggaggcctacaaacagatggctagagatgagcggaatcagtccattatagtgtcaggcgaatctggcgccggcaaaacagtgtccgcaaaatatgctatgcgttattttgccactgtgtctggtagtgctagcgaggctaatgtcgaagagaaggttcttgccagcaaccctatcatggagagtatcgggaatgcgaagacaaccagaaacgataattcctcccgatttgggaagtacatcgagataggctttgataagcggtaccgaattataggcgccaatatgcgcacctatttgctcgagaagtctcgcgtggtttttcaggcagaagaggagcggaattaccatatcttctatcagctctgtgcatctgctaagctgcccgaatttaagatgctgaggcttggtaacgctgacaattttaactacacgaagcagggaggtagcccggtcattgagggcgtggacgacgccaaagaaatggcccacactaggcaagcctgcacgcttctgggaatctcagagtcacaccagatggggattttcaggatactggcagggatcctgcatcttggaaatgtgggttttaccagcagggacgcggactcctgcaccatcccacccaaacatgagcctctgtgtatcttttgtgagctcatgggggtggactacgaagagatgtgtcattggctgtgccatcggaaactggccactgccacagaaacgtacatcaaacctatcagtaaactgcaggccacaaatgcccgcgatgctctcgccaagcacatatacgcaaaattgtttaattggatcgtggacaatgtcaatcaagccctgcacagcgcagtaaagcagcattcttttataggcgtcctcgatatctatggtttcgaaactttcgaaattaacagctttgagcagttctgcatcaattatgcaaatgaaaagcttcagcagcagttcaatatgcacgtgtttaaactggagcaagaggaatacatgaaggagcaaatcccctggaccttgatcgacttctacgacaaccagccatgcattaatcttatagaatccaaactgggtattctggacctattggacgaggagtgtaagatgcccaaaggcacagatgatacatgggcccagaagctttacaacactcatttaaataaatgcgcattatttgagaagcccagattaagcaacaaggcattcatcatacagcacttcgcagacaaggtcgaataccaatgcgagggcttcctggagaagaacaaagatacagtcttcgaggagcagattaaggtgctaaaaagctcaaaattcaagatgctaccggaactcttccaagacgatgagaaggctattagccccacatctgcgacctcatcaggccggaccccattgacacgcacccccgctaaaccaacaaaggggagacctggacagatggccaaggagcacaagaagaccgtggggcaccagttccggaactctctgcacctactgatggagacgctcaacgcaacaactccgcactatgtgagatgtattaagccaaatgattttaaatttccttttacgtttgacgagaagagggccgttcagcaacttagggcctgtggcgtgctggagaccatcagaatttcagcagcaggatttcctagccgctggacctaccaagaatttttctcacgatacagagtgctaatgaagcagaaggatgtgttgagtgatcgcaagcagacctgcaagaatgtattagagaagctgatcttagataaggataagtaccagttcgggaaaaccaagatttttttcagagcaggacaagtggcatacttggaaaagctgagagccgacaagttgagagctgcctgtatcagaatccaaaaaaccatcagaggctggctgctgcgcaaaaagtatttgcgcatgcggaaggctgcaatcaccatgcaacggtacgtccgcgggtaccaggcacgctgttacgcaaagttcctgcggcgcaccaaggctgcgaccatcatccaaaagtactggcgcatgtacgttgtccgacgacggtacaagatccgccgcgccgccaccatcgtgctgcagtcttacctgagagggttcctggctcggaaccggtaccgcaagattctgcgcgaacataaagcagtaatcatccaaaagcgggtccgtgggtggctagcaagaacccattataagcgatccatgcatgctataatctacctccaatgctgctttcggcgtatgatggctaagcgggaattgaagaaactaaagattgaggcccgcagcgtcgaacgctacaagaaactccatatagggatggagaataaaatcatgcaacttcagcggaaggtcgacgagcaaaataaggactataagtgtttggtagaaaaactaactaacctagagggcatctacaatagcgaaacggagaagcttagatccgatctcgagaggctgcagctatctgaggaagaggccaaagtggcaacaggacgggtgctgtcccttcaggaagagattgcaaaactcaggaaagacctcgagcagacccgcagcgagaagaagtgcatcgaggaacatgccgaccgatacaaacaggagaccgagcagcttgtcagtaatctgaaagaagaaaacaccctactgaagcaagaaaaggaggccctgaatcatcggatcgttcagcaagccaaggaaatgacagagacaatggagaagaagcttgtggaagaaaccaaacagctggagcttgacctgaacgatgaaagattgaggtaccagaatctgttaaatgagttcagtcggctggaggagcgctatgacgatctcaaagaggagatgactctcatggtgcatgtgcccaagcctgggcacaagcgtacagactcaacgcatagctccaacgaaagcgagtatatctttagtagtgaaattgcagagatggaagatattccttccaggacagaggagcctagcgaaaagaaagtgcctttggatatgagtctcttcctgaagctccaaaaaagagtgactgagctggagcaggaaaaacaagtgatgcaagatgaattggacagaaaggaggaacaggtgctacgaagcaaggctaaagaggaggagcgaccccagatacgcggggcagaacttgaatatgagtccttaaagagacaggagctggagtccgaaaacaagaaacttaagaacgagctcaacgaactccggaaggccctgtccgaaaagtcggctccagaggtgacggcacccggggcaccagcttaccgtgtgcttatggagcaactcaccagcgtgtcagaggaactggatgtgcgaaaggaagaggtcttgatcctgcgcagtcaactggtgtctcagaaagaggctatacagcccaaagatgataagaatactatgaccgactctacaatcctgctggaagatgtgcagaaaatgaaagataaaggcgagatagctcaggcctatataggcctaaaggagacaaatcgcctgctcgagagtcagctacagagtcagaaacgatcacatgagaatgaggctgaagcactgaggggcgagattcagagcttaaaagaggagaacaataggcaacaacagctcctggcccagaacctacagttacctccagaagctcgaattgaagcttccctccaacacgagatcacaagacttacaaacgagaacctcgatctgatggagcagttggaaaaacaggacaagaccgtccgcaagctgaagaagcaacttaaagtatttgcaaagaaaattggggagcttgaggtagggcagatggagaatatcagtcctggccagatcatagacgagccaatcaggccagttaatatccctaggaaggagaaggatttccaaggaatgctcgagtacaaaaaggaggacgagcagaagctggtcaagaatctgatattggaactaaagccccgcggcgttgctgtcaatctgatcccaggattgcctgcgtacatcctgtttatgtgtgttaggcatgccgactatttgaacgatgatcagaaagtgagatcgctgttgacttccaccattaatagcattaaaaaggtgttaaagaagagaggcgacgatttcgagactgtttccttctggctgtcaaacacgtgtaggtttttgcactgcctcaaacagtactcgggcgaagaagggttcatgaagcacaatacttcccgccagaatgagcactgcctgactaacttcgacctcgctgaatatcggcaagtgctgtcagacctggccatccaaatataccaacagctcgtgcgggtgcttgagaacatactccaacccatgattgtgtctggtatgctggagcatgaaacaatccagggcgtgagtggcgttaagccaactggcctccggaaacgaacaagctctatcgcagatgaggggacttacaccctggatagtatactaagacagctgaattcttttcactcagtcatgtgccagcacgggatggacccggagctcattaagcaagtggtcaaacagatgttctatatcatcggagccattactctgaacaatctcctgttgagaaaagatatgtgttcatggagcaagggcatgcagatccgctacaatgtcagccaactggaggagtggcttagggacaaaaacttaatgaacagcggcgccaaagaaaccctcgaacccctcatccaggccgcccagctgctgcaggtcaagaagaagactgatgatgacgcagaagccatctgttccatgtgtaatgcactcaccaccgcccagatcgtgaaggtcctcaatctttataccccagtaaatgagttcgaggagcgggtcagcgtgtccttcatccggacaatacagatgcggcttcgggatagaaaggattcccctcaactgttgatggatgccaagcatattttccccgtgacctttccatttaacccctcgagcctggcgctagaaactatccagatacctgcgagtttaggactgggctttatctctcgtgtgtag

SEQ ID NO: 53750 - DNA, 4089 bp, Artificial Sequence
  derived and/or modified sequence
atgcatgtgttcaagttggagcaggaagagtatatgaaagagcaaatcccctggaccttgatcgacttctacgataatcagccatgtattaatctaatcgagtctaagctgggcatcttggacctgctggacgaagagtgcaagatgccaaaggggacagacgacacctgggctcagaaactgtacaacacacacctgaacaaatgcgcactttttgagaaaccccggctttctaataaggcctttatcatccagcacttcgccgataaagttgagtatcagtgcgagggcttcctagaaaaaaacaaggatactgtgtttgaggaacaaatcaaggttctgaagtcttctaaatttaagatgctgcccgaactcttccaggacgacgagaaagcgatctcccccacttcagctacatcctctggacgcaccccactaacacgaaccccagccaaacccaccaagggccgacctggtcaaatggccaaggagcataagaagacagttggtcaccagttcagaaacagcctgcacttgctgatggaaactctcaatgccactacgccacactacgtgcgatgtattaaaccaaatgacttcaaattcccttttactttcgatgaaaaacgagcagtccagcagctgcgcgcttgcggtgtgctggagacgattcggatctccgctgctgggttcccaagcaggtggacatatcaagagttcttttcacgctatagagtgctgatgaaacagaaggatgtgcttagcgaccgtaaacaaacatgtaagaacgtgctggaaaaactgatcctagataaggacaagtaccagtttggaaaaacaaagatttttttcagagctgggcaggttgcgtatttagagaaactacgggccgataaactgcgagccgcctgtattcgcattcaaaagaccatcagagggtggttacttaggaaaaagtacctacgtatgaggaaggcagcaatcacaatgcagagatatgtccgcggctatcaggctaggtgctacgccaagtttctgagaagaactaaagcagctacaataatacagaagtactggagaatgtatgtggtgagacgccgttataaaattaggcgcgcagccactatcgtacttcagtcatacctccgggggttcctggcaagaaacaggtatcggaagatactgagggagcacaaggctgtgatcatccaaaaaagggtccgcggatggcttgcaaggacacattacaaacggagcatgcatgccattatttatctgcagtgttgtttccgaagaatgatggcaaagcgtgagctgaagaagcttaaaatagaggcacgcagcgtcgagaggtacaagaagctccacatcgggatggagaataaaattatgcagctgcagcgtaaggtggacgagcaaaataaggactacaaatgcctggtggagaaattgacaaatctggagggtatttataatagtgagactgagaagctgcgtagtgatttggaaagactgcagctgtccgaagaagaagctaaagtggccacagggcgcgtgctctctttgcaggaggaaattgcgaagctccgaaaggacctggagcagacccggtcggagaagaagtgtatcgaggaacacgcggatcgatacaaacaggaaactgagcagctggtcagcaatctcaaagaagagaacacactcctgaagcaggagaaagaggccctcaaccatcgcattgtacagcaggccaaggagatgacagagacaatggaaaagaaacttgtagaagagacaaagcagttagagctcgaccttaacgatgaaagattgcgctaccagaacctgctgaacgagttcagcagattggaagagagatacgatgacctgaaggaagagatgactctgatggtccacgtgcccaaacccggccacaagcggaccgatagcactcactcatccaacgaaagtgagtacatcttttcaagtgaaatcgccgagatggaggacatcccatcacgcacagaggagccaagcgagaagaaggtccccttggatatgtcactgtttctgaagttgcagaagcgggtgactgagctggagcaggagaagcaggttatgcaggatgaactcgatcgcaaagaggaacaggtgctgcggtcaaaggccaaggaagaagagaggccacagattagaggggcagagctggagtatgagtctttaaagagacaggagttagagtccgagaataaaaaattgaaaaatgagctgaacgagctgagaaaggccctgtccgaaaaatctgctcctgaagttactgctccaggtgcacctgcctacagagtactcatggaacaattaacctccgtctccgaggagctcgatgtgaggaaggaggaagttctgatcctgcgcagccagctcgtgagccaaaaagaggccatccagccaaaagatgataagaacactatgacggactccacgatccttcttgaagatgtgcagaagatgaaggacaagggggaaatcgctcaagcctacatcgggctgaaggaaaccaaccgactccttgagtcccagctgcagagccagaagcgcagccacgagaatgaggcagaggctttgcggggcgagatccagagtctgaaagaggaaaacaaccgtcaacaacagttgttagcccagaatctgcagctgccgcctgaggccagaatcgaggcatccctccagcatgagatcacgcgcctcaccaacgaaaacctggatctgatggaacagctcgaaaaacaggacaaaaccgttagaaaactgaaaaagcagttgaaggtattcgctaaaaagatcggtgagctggaggttgggcaaatggaaaacatcagccccgggcagattattgacgagcccatcaggcccgtgaatatccctagaaaagaaaaggactttcagggaatgttggagtataaaaaggaggatgaacagaaactcgtcaaaaacctcattcttgagttgaaacccagaggcgtggccgtgaatctaatacctggcctgccagcctatattctttttatgtgcgtgcgtcacgccgactacttaaacgacgaccaaaaggtgaggagcttgctcaccagcacaatcaacagcattaagaaagtgctaaagaaaagaggtgatgacttcgaaactgtgtcattctggctcagcaatacttgcagatttctgcattgccttaaacaatacagcggtgaagagggctttatgaagcataatacttctcgacagaatgagcactgcctaactaatttcgacctagcagaatatagacaggtcctgtctgacctggctatccagatctatcagcagttggtaagagtcctagagaatattctgcaaccgatgatcgtaagcggaatgttggagcacgagactattcagggagttagcggtgtaaagcccacaggcctgagaaaacgcacaagtagcattgccgacgaaggtacttacacactggatagcatactgcgacagctgaattccttccatagcgtaatgtgccagcacggcatggacccagaactgataaagcaggttgtgaaacagatgttttatatcattggagccatcaccctgaataacctcctcctgcggaaagacatgtgctcatggagcaaaggcatgcaaatacgctacaacgtgtctcagttggaggaatggctgcgagacaagaatttaatgaattcgggcgccaaggaaaccctggagcctctgatccaggcggcgcagctgctacaagttaagaaaaagaccgatgacgacgctgaagccatctgcagtatgtgtaatgctcttacgacggctcagatcgtaaaagtgcttaatttgtatacaccagtgaacgaattcgaggaacgggtgagtgtaagtttcatcaggacgatacagatgagactgagagatcgtaaagactcccctcagctgctcatggacgccaaacacatcttccccgtcacctttccgttcaacccatcttctttggcacttgaaacaattcaaatccctgcatctctaggtctcggatttatttcccgagtctag

SEQ ID NO: 53751 - DNA, 4377 bp, Artificial Sequence
  derived and/or modified sequence
atgtgtcattggttatgccataggaagctggcaacagctaccgaaacgtacattaagccaatctccaagttacaggccacgaacgctagggatgcgttggctaaacacatttatgctaagcttttcaactggattgtcgacaatgtaaatcaagcgctccacagcgccgtgaagcagcactcgtttatcggagtcctagacatctacggttttgaaacttttgagattaactcttttgaacagttctgtatcaactatgcgaatgaaaaattacagcagcagttcaatatgcatgttttcaaactggaacaggaagagtacatgaaagaacaaatcccgtggaccctgatcgacttctacgacaatcagccgtgcattaacctgattgagtccaagttaggcattttagacctccttgacgaggagtgcaaaatgccgaagggtaccgatgatacatgggcacagaagttgtacaacacccacctaaataagtgtgccctgttcgaaaaaccaagactgtccaataaggcttttatcattcaacattttgccgataaagtggaataccaatgtgaaggattccttgagaaaaacaaggatacggtctttgaggaacagatcaaagtgctgaaaagctccaaatttaagatgctgcccgaactcttccaggacgatgagaaggccatcagtcccactagtgccacatcttctggtcgcactccactcaccagaacaccagctaaacccactaaggggcggcccgggcagatggccaaagagcacaaaaagaccgttggtcatcagttcagaaacagcctgcatcttctgatggagaccttgaacgcgaccaccccccactacgtccgctgtataaaacccaacgacttcaaatttccattcacgtttgacgaaaagcgggccgttcagcagctacgcgcctgtggcgtgctagagacaattcggattagcgccgcaggatttccttcccgctggacatatcaggagtttttttcccgctatcgtgtcctaatgaaacagaaagatgtgctcagcgacagaaagcagacctgtaagaatgtgctggaaaagctgatcctggataaggacaagtatcagttcgggaaaaccaaaatctttttcagagcaggccaggtcgcctatctggagaaattgagagcggataaacttcgtgctgcgtgcattcgcatccagaagacaatccggggttggctactgcggaagaaatatcttcgcatgaggaaagcagccatcaccatgcagagatatgtgcgcggctaccaggcaagatgttacgccaagtttctgagacgtacaaaagcagcgaccataatccagaagtattggagaatgtacgttgtgagacgcagatataaaataagaagggccgcaacaattgtcctacagagctacttgcggggcttcttggcaaggaaccgctatcgaaaaattctgcgagagcataaggctgttattatccagaaacgagtgaggggatggctggcccgcactcactacaagaggtcaatgcatgccataatttatctgcagtgctgtttccgccggatgatggccaagagagagctgaaaaaattgaagattgaggctagaagtgtcgagcgctataagaagttgcacattgggatggagaacaagatcatgcaacttcaacggaaggtggatgagcagaacaaagactacaagtgcctggtcgagaagctcacaaatttagaggggatttataatagcgagaccgagaagcttaggagcgatttagagaggctgcagctgtcagaggaagaagcaaaagtggcgaccgggagagtgctgtctctgcaagaagaaatagccaagctgcgtaaggaccttgagcagacccgatcagagaaaaagtgcattgaggagcatgcagacaggtacaaacaagagaccgagcagctggttagcaatctcaaagaggagaataccttgctcaagcaagaaaaagaggctcttaatcaccgaattgtacaacaggcaaaagagatgacagagacaatggagaagaaactggtcgaagaaactaaacagctcgagcttgatttaaatgatgaacggctcaggtatcaaaatctgctgaacgagttctcaagactggaagaaaggtatgacgacttaaaggaagaaatgacacttatggtccatgtacctaagccaggccacaaaagaaccgacagcactcatagttccaacgaatctgagtatatttttagcagcgaaatcgccgaaatggaggacatcccaagtaggactgaggagccaagcgagaagaaggtccctctcgacatgtcgctcttcctgaaactccagaaaagagtgaccgaactcgagcaggaaaaacaggtaatgcaagacgaattagacagaaaggaggaacaggtgctgagatctaaggccaaggaagaagagcgcccacagatccggggagccgaacttgagtacgagtcactgaaacggcaggagttggagagtgaaaataagaagctgaaaaacgagctgaatgagctgcgaaaagcactttctgaaaaaagtgccccggaggtgaccgcaccaggcgctcctgcctatcgtgtccttatggagcagctaaccagcgtcagcgaagagttggatgtgagaaaggaggaggtccttattttgaggtcccagctggtgtctcagaaagaggccattcagcctaagctccatgagaacacaatgactgacagcactatcctgctcgaagatgttcagaagatgaaagacaagggcgagattgcccaggcatacattgggctcaaagaaactaaccgcctgctggagtcccagttgcagtcacagaaacgatctcatgagaacgaagccgaagccttgcgaggggagattcagagtctgaaggaggagaacaatcggcagcagcaactcctggcccagaacctccagctccccccagaggcccgtatagaagcaagcctgcagcatgagatcaccagactcaccaatgaaaatctagatcttatggaacagctagaaaagcaggacaagactgtccgtaaactgaaaaaacaactcaaagtcttcgctaaaaaaataggggagttagaggtgggacagatggagaatatttcaccagggcaaattatagacgagccgatcaggccagtgaacatccccagaaaagaaaaggatttccagggtatgctggaatataagaaagaggacgaacagaaactagtcaaaaacctcattctggaactcaaaccaagaggcgtggccgtgaacctgatccccggccttccggcttatatcctgtttatgtgcgtgagacacgcggactacttgaatgatgaccagaaagtcagaagtctactcacaagcacaattaatagtataaagaaggtgcttaaaaagaggggagacgatttcgaaacagtctcgttctggctgtcaaacacctgtcgctttctgcactgtctcaagcagtattctggtgaagaagggttcatgaaacacaataccagccgacagaacgagcactgtttaactaactttgacctggccgaatataggcaggtcttgagtgacctggctatccagatctatcagcagctggtgagagtcctggaaaatatcctgcagccgatgatcgtctctggtatgctggaacatgaaaccatccaaggagtgtccggagtgaaacctactggtcttcgaaaaagaacctccagcatagcagatgagggcacctacacgctcgactccatcctgagacagctgaactcattccattcagtgatgtgccagcacgggatggacccagaacttatcaaacaggttgtgaaacaaatgttctacataatcggtgcgattaccttgaataatctgttactgaggaaagatatgtgctcgtggtccaaggggatgcagattcgatataacgtgtcacagctggaagaatggttaagggataagaatctgatgaacagtggggccaaggagacattggagcccttgattcaggcggcgcaactcctgcaggtgaaaaagaaaactgacgatgacgcggaggcaatctgtagcatgtgtaacgcgctgacgacagcccaaatcgtgaaggtcctgaacctctacaccccagtgaatgagtttgaggagcgcgttagcgtatcatttatcagaacaattcagatgagactccgggatcgcaaggatagccctcagctgctcatggacgctaaacatatatttccggtgacctttcccttcaatccctcttccttggcattggagaccatccaaattccagcatcgctgggactcggattcatatcgcgcgtttag

SEQ ID NO: 53752 - DNA, 5487 bp, Artificial Sequence
  derived and/or modified sequence
atggccgccagcgagctgtacaccaagtttgcccgggtgtggatcccagaccctgaggaggtgtggaagtctgctgagctgctgaaggactacaagccaggggacaaggtgctgctgctgcacctggaggagggcaaggacctggagtaccacctggaccccaagaccaaggagctgccccacctgagaaatccagacatcctggtgggagaaaatgacctgacagccctgagctacctgcacgagcctgctgtgctgcacaacctgcgggtgcgcttcatcgacagcaagctgatctacacctactgcggcatcgtgctggtggccatcaacccctatgagcagctgcccatctatggagaggacatcatcaatgcctacagcggccagaacatgggagacatggacccccacatctttgctgtggccgaggaggcctacaagcagatggccagagatgaaagaaaccagagcatcatcgtgtctggagagagcggggccggcaagacagtgtctgccaagtatgccatgagatactttgccaccgtgtctggcagcgccagcgaggccaacgtggaggagaaggtgctggccagcaaccccatcatggagagcattggaaatgccaagaccaccagaaatgacaacagcagcagatttgggaagtacatcgagatcggctttgacaagcgctaccgcatcattggagccaacatgaggacctacctgctggagaagagccgggtggtgttccaggccgaggaggagaggaactaccacatcttctaccagctgtgtgccagcgccaagctgcctgagttcaagatgctgcggctgggcaatgctgacaacttcaactacaccaagcagggcggcagccctgtgattgagggcgtggatgatgccaaggagatggcccacacccggcaggcctgcaccctgctgggcatcagcgagagccaccagatgggcatcttccgcatcctggccggcatcctgcacctgggcaatgtgggcttcaccagcagagatgctgacagctgcaccatcccccccaagcatgagcccctgtgcatcttctgtgagctgatgggcgtggactatgaggagatgtgccactggctgtgccacaggaagctggccacagccacagagacctacatcaagcccatcagcaagctgcaggccaccaatgccagagatgccctggccaagcacatctatgccaagctgttcaactggatcgtggacaacgtgaaccaggccctgcacagcgctgtgaagcagcacagcttcatcggcgtgctggacatctacggctttgagacctttgagatcaacagctttgagcagttctgcatcaactatgccaatgagaagctgcagcagcagttcaacatgcacgtgttcaagctggagcaggaggagtacatgaaggagcagatcccctggaccctgattgacttctatgacaaccagccctgcatcaacctgattgagagcaagctgggcatcctggacctgctggatgaggagtgcaagatgcccaagggcacagatgacacctgggcccagaagctgtacaacacccacctgaacaagtgtgccctgtttgagaagccccggctgagcaacaaggccttcatcatccagcactttgctgacaaggtggagtaccagtgtgagggcttcctggagaagaacaaggacacagtgtttgaggagcagatcaaggtgctgaagagcagcaagttcaagatgctgcctgagctgttccaggatgatgagaaggccatcagccccaccagcgccaccagcagcggccgcacccccctgaccaggaccccagccaagcccaccaagggccggcccggccagatggccaaggagcacaagaagacagtgggccaccagttcaggaacagcctgcacctgctgatggagaccctgaatgccaccaccccccactacgtgcgctgcatcaagcccaatgacttcaagttccccttcacctttgatgagaagagagctgtgcagcagctgcgggcctgtggggtgctggagaccatccgcatctctgctgctggcttccccagccgctggacctaccaggagttcttcagccgctacagagtgctgatgaagcagaaggatgtgctgagtgacaggaagcagacctgcaagaatgtgctggagaagctgatcctggacaaggacaagtaccagtttgggaagaccaagatcttcttccgggccggccaggtggcctacctggagaagctgcgggctgacaagctgcgggccgcctgcatccgcatccagaagaccatccggggctggctgctgaggaagaagtacctgaggatgaggaaggccgccatcaccatgcagagatatgtgcggggctaccaggcccgctgctacgccaagttcctgcggaggaccaaggccgccaccatcatccagaagtactggaggatgtatgtggtgagaagacgctacaagatcagaagagctgccaccatcgtgctgcagagctacctgcggggcttcctggccaggaaccgctacaggaagatcctgcgggagcacaaggccgtcatcatccagaagagggtgcggggctggctggcccggacccactacaagaggtccatgcacgccatcatctacctgcagtgctgcttccggaggatgatggccaagcgggagctgaagaagctgaagattgaggcccggtctgtggagcgctacaagaagctgcacatcggcatggagaacaagatcatgcagctgcagaggaaggtggatgagcagaacaaggactacaagtgcctggtggagaagctgaccaacctggagggcatctacaacagcgagacagagaagctgcggagtgacctggagcggctgcagctgtctgaggaggaggccaaggtggccaccggccgggtgctgagcctgcaggaggagatcgccaagctgaggaaggacctggagcagaccaggtctgagaagaagtgcatcgaggagcacgccgaccgctacaagcaggagacagagcagctggtgagcaacctgaaggaggagaacaccctgctgaagcaggagaaggaggccctgaaccacagaattgtgcagcaggccaaggagatgacagagaccatggagaagaagctggtggaggagaccaagcagctggagctggacctgaatgatgagcggctgcgctaccagaacctgctgaatgagttcagccggctggaggagagatatgatgacctgaaggaggagatgaccctgatggtgcacgtgcccaagccaggccacaagaggacagacagcacccacagcagcaatgaaagtgagtacatcttcagcagcgagattgctgagatggaggacatccccagcaggacagaggagcccagcgagaagaaggtgcccctggacatgagcctcttcctgaagctgcagaagagggtgacagagctggagcaggagaagcaggtgatgcaggatgagctggacaggaaggaggagcaggtgctgcggagcaaggccaaggaggaggagcggccccagatcagaggagctgagctggagtatgagagcctgaagaggcaggagctggagagcgagaacaagaagctgaagaatgagctgaatgagctgaggaaggccctgtctgagaagagcgcccctgaggtgacagcccctggggccccagcctacagagtgctgatggagcagctgacctctgtgtctgaggagctggatgtgaggaaggaggaggtgctgatcctgcggagccagctggtgtcccagaaggaggccatccagcccaaggatgacaagaacaccatgacagacagcaccatcctgctggaggatgtgcagaagatgaaggacaagggggagatcgcccaggcctacatcggcctgaaggagaccaaccggctgctggagagccagctgcagagccagaagaggagccatgaaaatgaagctgaggccctgcggggggagatccagagcctgaaggaggagaacaaccggcagcagcagctgctggcccagaacctgcagctgcccccagaggcccgcatcgaggccagcctgcagcacgagatcacccggctgaccaatgaaaacctggacctgatggagcagctggagaagcaggacaagacagtgaggaagctgaagaagcagctgaaggtgtttgccaagaagattggagagctggaggtgggccagatggagaacatcagccctggccagatcattgatgagcccatccggcctgtgaacatccccaggaaggagaaggacttccagggcatgctggagtacaagaaggaggatgagcagaagctggtgaagaacctgatcctggagctgaagccccggggcgtggccgtgaacctgatccctggcctgcctgcctacatcctcttcatgtgtgtgagacatgctgactacctgaatgatgaccagaaggtgcgcagcctgctgaccagcaccatcaacagcatcaagaaggtgctgaagaagagaggagatgactttgagaccgtgtccttctggctgagcaacacctgccgcttcctgcactgcctgaagcagtacagcggggaggagggcttcatgaagcacaacaccagccggcagaatgagcactgcctgaccaactttgacctggccgagtaccggcaggtgctgagtgacctggccatccagatctaccagcagctggtgcgggtgctggagaacatcctgcagcccatgattgtgtctggcatgctggagcacgagaccatccagggcgtgtctggagtgaagcccaccggcctgaggaagaggaccagcagcattgctgatgagggcacctacaccctggacagcatcctgcggcagctgaacagcttccacagcgtgatgtgccagcacggcatggaccctgagctgatcaagcaggtggtgaagcagatgttctacatcattggagccatcaccctgaacaacctgctgctgaggaaggacatgtgctcctggagcaagggcatgcagatccgctacaacgtgtcccagctggaggagtggctgcgggacaagaacctgatgaacagcggggccaaggagaccctggagcccctcatccaggccgcccagctgctgcaggtgaagaagaagacagatgatgatgctgaggccatctgcagcatgtgcaatgccctgaccacagcccagatcgtgaaggtgctgaacctgtacacccctgtgaatgaatttgaggagcgggtgtctgtgtccttcatccgcaccatccagatgaggctgcgggacaggaaggacagcccccagctgctgatggatgccaagcacatcttccctgtgaccttccccttcaaccccagcagcctggccctggagaccatccagatcccagccagcctgggcctgggcttcatcagccgggtgtag

SEQ ID NO: 53753 - DNA, 4089 bp, Artificial Sequence
  derived and/or modified sequence
atgcacgtgttcaagctggagcaggaggagtacatgaaggagcagatcccctggaccctgattgacttctatgacaaccagccctgcatcaacctgattgagagcaagctgggcatcctggacctgctggatgaggagtgcaagatgcccaagggcacagatgacacctgggcccagaagctgtacaacacccacctgaacaagtgtgccctgtttgagaagccccggctgagcaacaaggccttcatcatccagcactttgctgacaaggtggagtaccagtgtgagggcttcctggagaagaacaaggacacagtgtttgaggagcagatcaaggtgctgaagagcagcaagttcaagatgctgcctgagctgttccaggatgatgagaaggccatcagccccaccagcgccaccagcagcggccgcacccccctgaccaggaccccagccaagcccaccaagggccggcccggccagatggccaaggagcacaagaagacagtgggccaccagttcaggaacagcctgcacctgctgatggagaccctgaatgccaccaccccccactacgtgcgctgcatcaagcccaatgacttcaagttccccttcacctttgatgagaagagagctgtgcagcagctgcgggcctgtggggtgctggagaccatccgcatctctgctgctggcttccccagccgctggacctaccaggagttcttcagccgctacagagtgctgatgaagcagaaggatgtgctgagtgacaggaagcagacctgcaagaatgtgctggagaagctgatcctggacaaggacaagtaccagtttgggaagaccaagatcttcttccgggccggccaggtggcctacctggagaagctgcgggctgacaagctgcgggccgcctgcatccgcatccagaagaccatccggggctggctgctgaggaagaagtacctgaggatgaggaaggccgccatcaccatgcagagatatgtgcggggctaccaggcccgctgctacgccaagttcctgcggaggaccaaggccgccaccatcatccagaagtactggaggatgtatgtggtgagaagacgctacaagatcagaagagctgccaccatcgtgctgcagagctacctgcggggcttcctggccaggaaccgctacaggaagatcctgcgggagcacaaggccgtcatcatccagaagagggtgcggggctggctggcccggacccactacaagaggtccatgcacgccatcatctacctgcagtgctgcttccggaggatgatggccaagcgggagctgaagaagctgaagattgaggcccggtctgtggagcgctacaagaagctgcacatcggcatggagaacaagatcatgcagctgcagaggaaggtggatgagcagaacaaggactacaagtgcctggtggagaagctgaccaacctggagggcatctacaacagcgagacagagaagctgcggagtgacctggagcggctgcagctgtctgaggaggaggccaaggtggccaccggccgggtgctgagcctgcaggaggagatcgccaagctgaggaaggacctggagcagaccaggtctgagaagaagtgcatcgaggagcacgccgaccgctacaagcaggagacagagcagctggtgagcaacctgaaggaggagaacaccctgctgaagcaggagaaggaggccctgaaccacagaattgtgcagcaggccaaggagatgacagagaccatggagaagaagctggtggaggagaccaagcagctggagctggacctgaatgatgagcggctgcgctaccagaacctgctgaatgagttcagccggctggaggagagatatgatgacctgaaggaggagatgaccctgatggtgcacgtgcccaagccaggccacaagaggacagacagcacccacagcagcaatgaaagtgagtacatcttcagcagcgagattgctgagatggaggacatccccagcaggacagaggagcccagcgagaagaaggtgcccctggacatgagcctcttcctgaagctgcagaagagggtgacagagctggagcaggagaagcaggtgatgcaggatgagctggacaggaaggaggagcaggtgctgcggagcaaggccaaggaggaggagcggccccagatcagaggagctgagctggagtatgagagcctgaagaggcaggagctggagagcgagaacaagaagctgaagaatgagctgaatgagctgaggaaggccctgtctgagaagagcgcccctgaggtgacagcccctggggccccagcctacagagtgctgatggagcagctgacctctgtgtctgaggagctggatgtgaggaaggaggaggtgctgatcctgcggagccagctggtgtcccagaaggaggccatccagcccaaggatgacaagaacaccatgacagacagcaccatcctgctggaggatgtgcagaagatgaaggacaagggggagatcgcccaggcctacatcggcctgaaggagaccaaccggctgctggagagccagctgcagagccagaagaggagccatgaaaatgaagctgaggccctgcggggggagatccagagcctgaaggaggagaacaaccggcagcagcagctgctggcccagaacctgcagctgcccccagaggcccgcatcgaggccagcctgcagcacgagatcacccggctgaccaatgaaaacctggacctgatggagcagctggagaagcaggacaagacagtgaggaagctgaagaagcagctgaaggtgtttgccaagaagattggagagctggaggtgggccagatggagaacatcagccctggccagatcattgatgagcccatccggcctgtgaacatccccaggaaggagaaggacttccagggcatgctggagtacaagaaggaggatgagcagaagctggtgaagaacctgatcctggagctgaagccccggggcgtggccgtgaacctgatccctggcctgcctgcctacatcctcttcatgtgtgtgagacatgctgactacctgaatgatgaccagaaggtgcgcagcctgctgaccagcaccatcaacagcatcaagaaggtgctgaagaagagaggagatgactttgagaccgtgtccttctggctgagcaacacctgccgcttcctgcactgcctgaagcagtacagcggggaggagggcttcatgaagcacaacaccagccggcagaatgagcactgcctgaccaactttgacctggccgagtaccggcaggtgctgagtgacctggccatccagatctaccagcagctggtgcgggtgctggagaacatcctgcagcccatgattgtgtctggcatgctggagcacgagaccatccagggcgtgtctggagtgaagcccaccggcctgaggaagaggaccagcagcattgctgatgagggcacctacaccctggacagcatcctgcggcagctgaacagcttccacagcgtgatgtgccagcacggcatggaccctgagctgatcaagcaggtggtgaagcagatgttctacatcattggagccatcaccctgaacaacctgctgctgaggaaggacatgtgctcctggagcaagggcatgcagatccgctacaacgtgtcccagctggaggagtggctgcgggacaagaacctgatgaacagcggggccaaggagaccctggagcccctcatccaggccgcccagctgctgcaggtgaagaagaagacagatgatgatgctgaggccatctgcagcatgtgcaatgccctgaccacagcccagatcgtgaaggtgctgaacctgtacacccctgtgaatgaatttgaggagcgggtgtctgtgtccttcatccgcaccatccagatgaggctgcgggacaggaaggacagcccccagctgctgatggatgccaagcacatcttccctgtgaccttccccttcaaccccagcagcctggccctggagaccatccagatcccagccagcctgggcctgggcttcatcagccgggtgtag

SEQ ID NO: 53754 - DNA, 4377 bp, Artificial Sequence
  derived and/or modified sequence
atgtgccactggctgtgccacaggaagctggccacagccacagagacctacatcaagcccatcagcaagctgcaggccaccaatgccagagatgccctggccaagcacatctatgccaagctgttcaactggatcgtggacaacgtgaaccaggccctgcacagcgctgtgaagcagcacagcttcatcggcgtgctggacatctacggctttgagacctttgagatcaacagctttgagcagttctgcatcaactatgccaatgagaagctgcagcagcagttcaacatgcacgtgttcaagctggagcaggaggagtacatgaaggagcagatcccctggaccctgattgacttctatgacaaccagccctgcatcaacctgattgagagcaagctgggcatcctggacctgctggatgaggagtgcaagatgcccaagggcacagatgacacctgggcccagaagctgtacaacacccacctgaacaagtgtgccctgtttgagaagccccggctgagcaacaaggccttcatcatccagcactttgctgacaaggtggagtaccagtgtgagggcttcctggagaagaacaaggacacagtgtttgaggagcagatcaaggtgctgaagagcagcaagttcaagatgctgcctgagctgttccaggatgatgagaaggccatcagccccaccagcgccaccagcagcggccgcacccccctgaccaggaccccagccaagcccaccaagggccggcccggccagatggccaaggagcacaagaagacagtgggccaccagttcaggaacagcctgcacctgctgatggagaccctgaatgccaccaccccccactacgtgcgctgcatcaagcccaatgacttcaagttccccttcacctttgatgagaagagagctgtgcagcagctgcgggcctgtggggtgctggagaccatccgcatctctgctgctggcttccccagccgctggacctaccaggagttcttcagccgctacagagtgctgatgaagcagaaggatgtgctgagtgacaggaagcagacctgcaagaatgtgctggagaagctgatcctggacaaggacaagtaccagtttgggaagaccaagatcttcttccgggccggccaggtggcctacctggagaagctgcgggctgacaagctgcgggccgcctgcatccgcatccagaagaccatccggggctggctgctgaggaagaagtacctgaggatgaggaaggccgccatcaccatgcagagatatgtgcggggctaccaggcccgctgctacgccaagttcctgcggaggaccaaggccgccaccatcatccagaagtactggaggatgtatgtggtgagaagacgctacaagatcagaagagctgccaccatcgtgctgcagagctacctgcggggcttcctggccaggaaccgctacaggaagatcctgcgggagcacaaggccgtcatcatccagaagagggtgcggggctggctggcccggacccactacaagaggtccatgcacgccatcatctacctgcagtgctgcttccggaggatgatggccaagcgggagctgaagaagctgaagattgaggcccggtctgtggagcgctacaagaagctgcacatcggcatggagaacaagatcatgcagctgcagaggaaggtggatgagcagaacaaggactacaagtgcctggtggagaagctgaccaacctggagggcatctacaacagcgagacagagaagctgcggagtgacctggagcggctgcagctgtctgaggaggaggccaaggtggccaccggccgggtgctgagcctgcaggaggagatcgccaagctgaggaaggacctggagcagaccaggtctgagaagaagtgcatcgaggagcacgccgaccgctacaagcaggagacagagcagctggtgagcaacctgaaggaggagaacaccctgctgaagcaggagaaggaggccctgaaccacagaattgtgcagcaggccaaggagatgacagagaccatggagaagaagctggtggaggagaccaagcagctggagctggacctgaatgatgagcggctgcgctaccagaacctgctgaatgagttcagccggctggaggagagatatgatgacctgaaggaggagatgaccctgatggtgcacgtgcccaagccaggccacaagaggacagacagcacccacagcagcaatgaaagtgagtacatcttcagcagcgagattgctgagatggaggacatccccagcaggacagaggagcccagcgagaagaaggtgcccctggacatgagcctcttcctgaagctgcagaagagggtgacagagctggagcaggagaagcaggtgatgcaggatgagctggacaggaaggaggagcaggtgctgcggagcaaggccaaggaggaggagcggccccagatcagaggagctgagctggagtatgagagcctgaagaggcaggagctggagagcgagaacaagaagctgaagaatgagctgaatgagctgaggaaggccctgtctgagaagagcgcccctgaggtgacagcccctggggccccagcctacagagtgctgatggagcagctgacctctgtgtctgaggagctggatgtgaggaaggaggaggtgctgatcctgcggagccagctggtgtcccagaaggaggccatccagcccaagctgcacgagaacaccatgacagacagcaccatcctgctggaggatgtgcagaagatgaaggacaagggggagatcgcccaggcctacatcggcctgaaggagaccaaccggctgctggagagccagctgcagagccagaagaggagccatgaaaatgaagctgaggccctgcggggggagatccagagcctgaaggaggagaacaaccggcagcagcagctgctggcccagaacctgcagctgcccccagaggcccgcatcgaggccagcctgcagcacgagatcacccggctgaccaatgaaaacctggacctgatggagcagctggagaagcaggacaagacagtgaggaagctgaagaagcagctgaaggtgtttgccaagaagattggagagctggaggtgggccagatggagaacatcagccctggccagatcattgatgagcccatccggcctgtgaacatccccaggaaggagaaggacttccagggcatgctggagtacaagaaggaggatgagcagaagctggtgaagaacctgatcctggagctgaagccccggggcgtggccgtgaacctgatccctggcctgcctgcctacatcctcttcatgtgtgtgagacatgctgactacctgaatgatgaccagaaggtgcgcagcctgctgaccagcaccatcaacagcatcaagaaggtgctgaagaagagaggagatgactttgagaccgtgtccttctggctgagcaacacctgccgcttcctgcactgcctgaagcagtacagcggggaggagggcttcatgaagcacaacaccagccggcagaatgagcactgcctgaccaactttgacctggccgagtaccggcaggtgctgagtgacctggccatccagatctaccagcagctggtgcgggtgctggagaacatcctgcagcccatgattgtgtctggcatgctggagcacgagaccatccagggcgtgtctggagtgaagcccaccggcctgaggaagaggaccagcagcattgctgatgagggcacctacaccctggacagcatcctgcggcagctgaacagcttccacagcgtgatgtgccagcacggcatggaccctgagctgatcaagcaggtggtgaagcagatgttctacatcattggagccatcaccctgaacaacctgctgctgaggaaggacatgtgctcctggagcaagggcatgcagatccgctacaacgtgtcccagctggaggagtggctgcgggacaagaacctgatgaacagcggggccaaggagaccctggagcccctcatccaggccgcccagctgctgcaggtgaagaagaagacagatgatgatgctgaggccatctgcagcatgtgcaatgccctgaccacagcccagatcgtgaaggtgctgaacctgtacacccctgtgaatgaatttgaggagcgggtgtctgtgtccttcatccgcaccatccagatgaggctgcgggacaggaaggacagcccccagctgctgatggatgccaagcacatcttccctgtgaccttccccttcaaccccagcagcctggccctggagaccatccagatcccagccagcctgggcctgggcttcatcagccgggtgtag

SEQ ID NO: 53755 - DNA, 12139 bp, Artificial Sequence
  derived and/or modified sequence
accccgggcaggtggagcgctcgcggctgctcgcggcgagcccgggagtgatggcgaggcccctgcgggcggccagcgcctgaggcgccccgccccgccccgccccgcgcggccctccccgcccggccctgccctgccctgctccctgccggcggctgcgggcgcttcctagtccgctcgggcggccgcccaggcgaggtgcggcctccgcacaggcggggggcgtaggcgcgcggggcccgccatggctgcgtcggagctctacacaaagtttgccagggtttggatacctgatccagaggaagtctggaagtcagcagagctgctcaaagattataagccaggagataaagtcctcctgcttcacctcgaggaaggaaaggatttggaataccatctagatccaaagaccaaggagctgcctcacttacgaaatcctgacatacttgttggtgaaaatgacctcacagccctcagctatcttcatgagcctgctgtgctccataatctcagagtccgctttattgattccaaacttatttatacgtattgtggtatagtcctagtagctataaatccctatgaacagctgcctatttatggagaagatattattaatgcatacagtggtcagaacatgggtgatatggatccacatatctttgcagtagctgaagaagcttacaagcaaatggccagagatgaacgaaatcagtccatcatcgtaagtggagagtctggggcaggaaaaacagtctcagctaagtatgccatgcgatactttgcaactgtgagtggttctgccagtgaggccaatgtggaggaaaaggtcttggcctccaaccccatcatggagtccattggaaatgctaaaacaaccaggaatgataatagcagccgttttgggaagtatattgagattggttttgataagagatatcgaatcattggtgccaatatgagaacttatcttttagagaaatccagagtggtattccaggcagaagaggagagaaactatcatatcttctatcagctttgtgcctcagcaaagttacctgaatttaaaatgctacgattaggaaatgcagataactttaattacacaaaacaaggaggcagtcctgtgattgaaggagtggatgatgcaaaggagatggcacatactaggcaggcctgcactttgctaggaattagtgaatctcatcaaatgggaattttccgaatacttgctggcatccttcacttaggcaatgttggatttacatcccgagatgcagacagctgcacaatacctcccaagcatgaacctctctgcatcttctgtgaactcatgggtgtggactatgaggagatgtgtcactggctctgccatcggaaactggctactgccacagagacatacatcaagcccatctccaagctgcaggccacaaatgcccgcgatgctttggccaagcacatctatgccaagctctttaactggattgtagataatgtcaatcaggctctccattctgctgtcaaacagcactcttttattggtgtgctagacatttacggatttgaaacatttgagataaatagttttgaacagttttgcataaattatgcaaatgaaaaactacagcaacaattcaatatgcatgtcttcaaattggagcaagaagaatatatgaaggaacaaattccatggacactcatagatttttatgataatcagccttgtattaatcttatagaatcaaaactaggcattctagatttactggatgaggaatgcaagatgcctaaaggcacagatgacacctgggcccaaaaattgtacaacacacatttgaacaaatgtgcactctttgaaaagcctcgtctatcaaacaaagctttcatcatccaacattttgctgacaaagtggaataccagtgtgaaggatttctcgaaaagaataaagacaccgtttttgaagaacaaattaaagttcttaaatcaagcaagtttaagatgctaccagaactatttcaagatgatgagaaggccatcagtccaacttcagccacctcctcagggcgcacacccctcacacgaactcctgcaaagcccaccaaaggcagaccaggccaaatggccaaagagcacaagaaaacagtggggcatcagttcagaaactccctgcacctgcttatggagacactcaatgccactacccctcactatgtgcgctgtatcaagcctaatgacttcaagttcccattcacgtttgatgagaagagggcagtgcagcagctgagagcatgtggtgtcctggaaaccatccgaatcagtgcggccggtttcccctcacggtggacttaccaagaatttttcagccgctaccgtgtcctaatgaagcagaaagatgtgctgagtgacagaaagcaaacatgcaagaatgtgttagagaaactgatactggacaaggacaaataccagtttggtaagacaaagatctttttccgtgccggtcaagtggcctatctagaaaaattgagagctgacaaactgagagctgcctgcatccggatccagaagaccatccgagggtggctgctgagaaagaagtacctacgcatgcggaaggcagccatcaccatgcagagatacgtgcggggctaccaggcccgatgctatgctaagtttctgcgcagaaccaaggcagcaaccatcattcaaaagtactggcgcatgtatgtggtccgcaggaggtacaagattagacgagctgccactatcgttcttcagtcttacttgcgaggcttcttggccagaaataggtatcgcaagatactccgtgagcacaaagcagtcatcattcagaagcgagtccggggctggctggcccgcacacactacaagaggagcatgcatgccatcatctaccttcagtgctgcttcaggcggatgatggccaagcgtgagctaaagaagctcaaaatcgaggctcgctcagtggagcgctataagaagctgcacatcggcatggagaacaagatcatgcagctgcagcgcaaagttgatgagcagaacaaagactacaaatgccttgtggagaaactaaccaatctggaaggaatatacaactctgagactgagaaactacgaagtgacttagaacgtcttcaactaagtgaagaggaagcgaaagttgccactgggcgggtccttagtctgcaggaagaaattgccaagctccggaaagacctggagcaaactcgttcagagaaaaaatgcattgaggaacatgcagatcgatacaaacaagaaacagagcagctggtatcaaatctgaaggaagaaaatactttgctgaagcaagaaaaagaagccctcaatcaccgcatcgtgcagcaggctaaggagatgacagaaactatggagaagaagttagtagaagaaacgaaacaactggaactcgaccttaatgatgaaaggctgagatatcagaaccttctgaatgagttcagtcgcctggaagaaagatatgatgacctcaaggaagagatgacccttatggtgcatgtgcctaagcctggacacaagagaacagactccacccacagcagcaacgagtctgaatatatctttagctctgaaattgcagaaatggaagacattccatcaaggacagaggaaccaagtgagaagaaggtacctctggacatgtcattgttccttaagctccagaagcgggtcacagagctggagcaggagaagcaggtgatgcaggatgagctggaccgcaaggaggagcaggtgctccgcagcaaggccaaggaagaagaaagaccacaaattagaggtgcagaactggaatatgagtcactcaagcgtcaagaactagaatcagaaaacaaaaaactgaagaatgagctaaatgagttgcgcaaggccctcagtgagaaaagtgccccagaggtgaccgccccaggtgcacctgcctaccgtgtcctcatggagcagctgacctctgtgagcgaggagcttgatgtccgcaaggaggaagtcctcatcttaaggtctcaactggtgagccagaaagaggccatccaacccaaggatgacaagaatacaatgacagattccacaatacttttggaagatgtacaaaaaatgaaagataaaggtgaaatagcacaagcatacattggtttgaaagaaacaaataggctcctggaatcccagctgcagtcacagaagaggagccatgagaatgaggccgaggccctccgtggggagatccagagcctgaaggaggagaacaaccgacagcagcagctgctggcccagaacctgcagctgcccccagaggcccgcattgaggccagcctgcagcacgagatcacccggctgaccaacgaaaacttggatttgatggaacaacttgaaaaacaggataagacggtccgtaaactgaaaaaacaactgaaagtatttgccaaaaaaattggcgaactagaagtgggccagatggagaacatatccccaggacagatcattgatgaacccatccgaccagtcaacattcccaggaaagaaaaggatttccaagggatgctggaatacaagaaggaggatgagcaaaaacttgttaagaacctgattctggaactgaagccacgtggtgtagcagtcaatttgattccaggattaccggcatatatcctgttcatgtgtgttcgacatgctgactacctgaatgatgatcagaaagtaaggtcgttgctaacatcaacaattaacagcatcaaaaaagtattgaagaaaagaggtgatgattttgaaaccgtctccttctggctctctaacacatgccgatttttgcactgcttgaaacagtacagtggagaagagggctttatgaagcacaacacatctcgccagaatgaacactgcctcaccaattttgacctggctgagtatcggcaggtgctgagtgacttggccattcagatctaccagcagctcgtgcgggtgttagagaacatccttcagccaatgattgtctcaggcatgctggaacatgaaacgattcagggcgtgtctggggtgaagcccacagggttgagaaagcgaacctccagtatcgccgatgagggcacctacacactggactccatcctccggcagctcaactccttccactcggtcatgtgtcagcatggcatggaccctgaactgatcaagcaggtggtcaagcagatgttctacatcataggggccatcaccctgaacaaccttctcctgcggaaggacatgtgctcctggagtaaaggcatgcagatcaggtacaatgtcagtcaactggaagaatggctgcgtgacaagaatctgatgaatagtggggctaaagaaaccctggaacctctcattcaggctgctcaacttttgcaagtgaaaaagaaaacagatgatgatgcagaagccatttgttctatgtgcaatgctttaactactgcccagattgtgaaagtgttgaatttgtatactccagttaatgagtttgaagaaagagtctctgtgtcgttcattcgtactatacagatgcgtttacgagacaggaaagactctccccagctgctcatggatgctaaacacatctttcctgtcacctttcctttcaacccatcttccctcgcactagaaaccatccagattccagccagcctcggcctgggcttcatttcacgggtctgaaagtgatgtccaggcaaaaattgacaatacatttcttgcccgaaataagaacccattatttccagtgagttactgaaaatacatttttaaagagaaagtactgattatctcccaaatgagaagtcattaactggaaatctccctagaatactttcatcactttggaaacaaagataggctctttcgtgctgtgttatctttatagcaacactcatccttaaccaactaggtaccgtgagtttacatacaggagaatgatggaaggaagggaggaaggaaaggaggagaaaaatgtgtcttcagctggcagcatttattttaaatccttagcactgagtttgaatggtataaaaagtataacttccatagatgagctgttgttaggaaggcaccaaagaacctcctctgcactaaacaggagaatggaaagaaaagtctccattgagtacatatcatgtcagtttagtaatcaattatgttgatattgttaaactggttcaaagaaataaactggcaatatgtaaagtaattcctcatttgtgtcactatgatatagagatattaaaggaatgttggtttgctaaatagtatagatgtccatttgtactatagtttactgagcattttaaattgctgctacatactgtcttcttaaaatgtaagtgatattaggcactacaataagtttctcttgtcaattctgtttacaattcaatcagatcacagttttaactggattatatgcaaatacctacagattcacctgcacaagtagcagacactggaaagtcatgtagtaatatgacaaaatgcttgacatttaggggtaggattagacaaagtggctattgttgatgtcattatttattcaggatgtattacattgatgtgctcattaattttccctgggtggatattgcgtcagggtacagtgttctgtgaagtgacttatttttaactaccagatctgattccttcagtgcatattttcaaccttgacaggttttctctcttcttaatttattaagaattaatctcggctgggcgcggtggctcacgcctgtaatcccagcactttgggaagccaaggtgggcggatcacttcaggttaggagttggagaccagcctggccaacatggcgaaaccctgtctctactaaaaatacaaaaattagccgggcgtggtggcacttgcctgtaatcccagctactcgggaggctgaggcacgagaatcgattaaacctgggaggcggagattgcaatgagatcgaaccactgcactccagcctgggtgacagagagagacactgccttggaaaaaaaaagaatctcactcactatctagagaggattgtcagaatattcacgattcaggtcttgaaactttgattatgcaaaagaaggtatataataaatatttcattatgattcagtttttaaggctttgcagcttctataagtgttctcagatgccactagataattttaaaagcatcatattagaaatactttaagaagacttatataagaaatagaagattgttgaattttacagaggatttggttcattaagacccagattctgtaagttttcattctgaaattctagttaaacatattcaccatttttcttaggaatcttatacaataaatccttcaggttgcacaaaagcaaattattagttttcattagaaactctggttctgaattacaatcataggttatataaatttaactgttagatggtctataaatcttattaaaatatgtgcaatatttatggaagtcaaacagcttcatatcagtgataaagattgttattaaaagataaatactgtctgttaatttacatgggcctcaagttcctcgtttataaaataagagagttggacactgattcttaacatctcctccacatttaaaattctctcttctcagcccttagattctagagagaaaaagctgcagttactcagtaagtccattctctgatggaaagaccagtgtgtagtgcctgtcaattccttaggattaatcaaatgtaaaatcacaagtttgtgtagctgtaacctttcttaaatgtacatgatttatgtacatgcttttagaaggtcctactatatttgtattataattagtttaagtaatttttattacatcatgtattgctttattcagtttgaatacatttatttatttatttgcagtatcaaccagaaacactaccaattgcatcaaattctcccagtttttcctggttgtcaatgcggttttcaatgcacaattaagtcatagccatttggttcgtaccaaatgtgtcagaatctaacagcatccgataggctgtaagttggggagttgctaagaaaatgcaacgtggtacaggctgtccgcctcagccctggaaatctcccagacctcccccagcttcatcctgtgtagcacgactcaacgtgcaccctgaatcttctcaggtcttccaggtcatgctgtagctgtcactgccatgcagcccttttttttactccggacagctcatgtactgaagcgtcatgaaagaaaggctgtggtctgagcccttctctcccatctcctgtctttgtcctgtcaagtgctggagccagagctcctacagctgcccttggtggtttctcctgttcagcgatggtggcacaaaggttctgctattccagggctccagcttcctcccaggtctacccagagctccagatgggggtctgaattaacctctcttggtggcctggagatttttagtcattgacaagaataccttgtaaccagggaaccccaaggcccagtaaatgattctgtataccattttcttgaaggtacaagaagattctgccgactatggggatctttgggccagtttgaggattgctttccctctgaggttctttctctctgtcagccacactttctcacccaacttcagacacaccctgccagcctttcccctactcattcactcttccccttccctcaacttaatcgtctatcccgttgcctgctgtttgactgtgcactgaaggcaggtggatggagtcagtcctcagttgcccctgctggccttcctggtgcttaccatcagcccaatctttgcacagtccttgttgttcttacttctctgcatgcattccttcagaagatcagtcatcaactttttcttaattcctctgtgacacacaatgggaattcaaaggaagagatcttaaaagtcacaacagttctttatcttaataatcccctccccattcaccttactacatgcagactcacctcacacccttacaacttgaagctgaaaatttaaaagtaatttccctttttgcagcttttcctcaggttaaggctttgatctgcctgagagtaactctaaaaggagggaagataaatatgggataaaatccacaaagtgtagcttctaattcctttggaagtttaaaaaatttccacatatctgatgcttcttttgtcaggtgcagaagcacaaaaacatattccgaagccaactgatagggaatttggggattattgtcagtttggagaatttgctgtgttatttcttcatttccatggatagctcatagttggctctttctgggtgagtaattatgtgtaatatagatcaaatcttttactaaggttacagctacatgttaggggaggctatgaaaatactatattattataatttcagtgcagtgattgttgtgagaaataactttcatggtaaccctaggaaaatgggcacctgccaccatcctgagaagtcctcacacaatgccctttctctcttacacacacacacacacacatacacacacacacacccccgtcactaattcatagagttccttagcaggcatagtcaaggatcctctgggtaatgtcagctgcttagtgataaaacagagccaaaactagtgcatcctgttgaaagtaatgcagaaacagtacctgggtccagatatgctttcctgcggcgctttcctctgttacctcgtttcatcctcacagcagcatggacggtaggtggggtcgcttctacaatcatttctgatgatagcttgggaatagagataggggcagtgacttgcctgatgtcgcacagccctctggctgtcctgctttcccatatggagcagtggtggtgtgggcacctgtgatgcaggagactttaaaaatgtcgtgaggtcacgtgctgcccctcctggtacgtgtggaatgcccctggccagcaaggggtgcttttttatcagagttggcagctggcatgtgggaaccgagcaagtgctgcgtaccaagttacttgttttaaggagaccaagtgctcagcgccaggtggttttcttttttgtcatagttacttgctataactcagcttgacttctgtcatgaatcagtgctctctgggaggatgcaatactctgtttgggcattaattggtagcaggttgtctcaaccaaaaagacaggaaacagcaaaagcctctctgaaattaagaggaaagttactctccccacacccatcagagtctttattggagccaccaggtgagctgtgcagcctggacaggcctgcagctataggccaccttcccagtttaggtcctcagcacaggggagcccaagtcactgggtgccttccgagggctgtcactgggcaggccatatacaagtcagtgtgtgcgtgggcactgcagtgtgtgcatgccgtaggtgttgatgggtgctaggaggggtgtcgtgtgcatgcgcgttgaagaggatctgtattgccgtgacctctgttcatggatgagtgcattgtaatttgttctcaggctgtgctgtgagggccgccttaacccttgctcccttcccttctagagctgccttaagttctccagaacttttcttctgtaaaggatatcttgcctggaagggatatcttgccctgtttctcaaggttttgtgagagttttgactggatgtggccctgcatgaccctccttctcctgtacttcctctttcctttccaaatgggaattagaactgtggggcagcaacagtctcagagccagtgagaggccagcttagagaatgcttctgagttagtgggactctgtgtcacaagtaagcaaatgaatatatgaaagaaattatggagataagttagattcttggtaatacttaaatgtcttgctttctactaaccttttgttactaaaggtaaagggtataactcaaactttttgtggacattcttttcaaaattttttaagaaccctgtactataaaaggttgagtaaaaacaggaaagcgtgctataagttcaaatctgttgtattaccctaaattagataaaccaacctgaattatagtagatttctcaatagatgaggaactgaaaaatactatgtaaaatatcttccaaaatgctttttatactttttttatttgtaatttggtctatctaaaatgttcgttagcttaacttaatgggcgttattggattcatatgactaacgtttcctcagtattgtaatgcttgaaatatttgaaagaaaaaatgttgttttttagttgaaactggtatatataattcagtgcttggcaggttagtatatttttatgcatttttcagagtcagcagtttcaaatcttattgttatcatgttataaaattttagcccacatttcaggctccgtaaatcatttgagccattattttttcccaacaaatggtgaattttttctttaaatgtggatatatatgttgtaatttatgattcctggttatgtatttttgtgggatcctgcagtaaaattgacttttttgtgtctttgggagatttaaattgcgctaacagtgttgcgcaaaaatgagttcatgccatttaacatattgtattttaattattaactgtattaatttactatgaaatggacatccttttaactaaaatggaattgaacattgcagttttcaaatatttttccttgttgggtctggaaaaggaattctactttgatctgcatagaaaattttgatacaattttttgaaagttcttaggtgaaacatttacccattaaaaaggaagcagaaatactgagacatgaaaggcattatcaactaactctagactctagaacccattctagcatatctcacgtgcaatttttaaaaataagttaataattcatctcatatcaacaaaagcctttgaaacatgggttttcactagatatcacctagtgctaagataaaaaccaaaacaatatcagaattacatttatgctctaaatttgtagttgtccattgttgtgcttagtaaatgtgtgtcattaatgctgtattctcctagctattatggaaacttgtttaaataaagatatggat

SEQ ID NO: 53756 - DNA, 10754 bp, Artificial Sequence
  derived and/or modified sequence
gcctatttatggagaagatattattaatgcatacagtggtcagaacatgggtgatatggatccacatatctttgcagtagctgaagaagcttacaagcaaatggccagagatgaacgaaatcagtccattctgctgtcaaacagcactcttttattggtgtgctagacatttacggatttgaaacatttgagataaatagttttgaacagttttgcataaattatgcaaatgaaaaactacagcaacaattcaatatgcatgtcttcaaattggagcaagaagaatatatgaaggaacaaattccatggacactcatagatttttatgataatcagccttgtattaatcttatagaatcaaaactaggcattctagatttactggatgaggaatgcaagatgcctaaaggcacagatgacacctgggcccaaaaattgtacaacacacatttgaacaaatgtgcactctttgaaaagcctcgtctatcaaacaaagctttcatcatccaacattttgctgacaaagtggaataccagtgtgaaggatttctcgaaaagaataaagacaccgtttttgaagaacaaattaaagttcttaaatcaagcaagtttaagatgctaccagaactatttcaagatgatgagaaggccatcagtccaacttcagccacctcctcagggcgcacacccctcacacgaactcctgcaaagcccaccaaaggcagaccaggccaaatggccaaagagcacaagaaaacagtggggcatcagttcagaaactccctgcacctgcttatggagacactcaatgccactacccctcactatgtgcgctgtatcaagcctaatgacttcaagttcccattcacgtttgatgagaagagggcagtgcagcagctgagagcatgtggtgtcctggaaaccatccgaatcagtgcggccggtttcccctcacggtggacttaccaagaatttttcagccgctaccgtgtcctaatgaagcagaaagatgtgctgagtgacagaaagcaaacatgcaagaatgtgttagagaaactgatactggacaaggacaaataccagtttggtaagacaaagatctttttccgtgccggtcaagtggcctatctagaaaaattgagagctgacaaactgagagctgcctgcatccggatccagaagaccatccgagggtggctgctgagaaagaagtacctacgcatgcggaaggcagccatcaccatgcagagatacgtgcggggctaccaggcccgatgctatgctaagtttctgcgcagaaccaaggcagcaaccatcattcaaaagtactggcgcatgtatgtggtccgcaggaggtacaagattagacgagctgccactatcgttcttcagtcttacttgcgaggcttcttggccagaaataggtatcgcaagatactccgtgagcacaaagcagtcatcattcagaagcgagtccggggctggctggcccgcacacactacaagaggagcatgcatgccatcatctaccttcagtgctgcttcaggcggatgatggccaagcgtgagctaaagaagctcaaaatcgaggctcgctcagtggagcgctataagaagctgcacatcggcatggagaacaagatcatgcagctgcagcgcaaagttgatgagcagaacaaagactacaaatgccttgtggagaaactaaccaatctggaaggaatatacaactctgagactgagaaactacgaagtgacttagaacgtcttcaactaagtgaagaggaagcgaaagttgccactgggcgggtccttagtctgcaggaagaaattgccaagctccggaaagacctggagcaaactcgttcagagaaaaaatgcattgaggaacatgcagatcgatacaaacaagaaacagagcagctggtatcaaatctgaaggaagaaaatactttgctgaagcaagaaaaagaagccctcaatcaccgcatcgtgcagcaggctaaggagatgacagaaactatggagaagaagttagtagaagaaacgaaacaactggaactcgaccttaatgatgaaaggctgagatatcagaaccttctgaatgagttcagtcgcctggaagaaagatatgatgacctcaaggaagagatgacccttatggtgcatgtgcctaagcctggacacaagagaacagactccacccacagcagcaacgagtctgaatatatctttagctctgaaattgcagaaatggaagacattccatcaaggacagaggaaccaagtgagaagaaggtacctctggacatgtcattgttccttaagctccagaagcgggtcacagagctggagcaggagaagcaggtgatgcaggatgagctggaccgcaaggaggagcaggtgctccgcagcaaggccaaggaagaagaaagaccacaaattagaggtgcagaactggaatatgagtcactcaagcgtcaagaactagaatcagaaaacaaaaaactgaagaatgagctaaatgagttgcgcaaggccctcagtgagaaaagtgccccagaggtgaccgccccaggtgcacctgcctaccgtgtcctcatggagcagctgacctctgtgagcgaggagcttgatgtccgcaaggaggaagtcctcatcttaaggtctcaactggtgagccagaaagaggccatccaacccaaggatgacaagaatacaatgacagattccacaatacttttggaagatgtacaaaaaatgaaagataaaggtgaaatagcacaagcatacattggtttgaaagaaacaaataggctcctggaatcccagctgcagtcacagaagaggagccatgagaatgaggccgaggccctccgtggggagatccagagcctgaaggaggagaacaaccgacagcagcagctgctggcccagaacctgcagctgcccccagaggcccgcattgaggccagcctgcagcacgagatcacccggctgaccaacgaaaacttggatttgatggaacaacttgaaaaacaggataagacggtccgtaaactgaaaaaacaactgaaagtatttgccaaaaaaattggcgaactagaagtgggccagatggagaacatatccccaggacagatcattgatgaacccatccgaccagtcaacattcccaggaaagaaaaggatttccaagggatgctggaatacaagaaggaggatgagcaaaaacttgttaagaacctgattctggaactgaagccacgtggtgtagcagtcaatttgattccaggattaccggcatatatcctgttcatgtgtgttcgacatgctgactacctgaatgatgatcagaaagtaaggtcgttgctaacatcaacaattaacagcatcaaaaaagtattgaagaaaagaggtgatgattttgaaaccgtctccttctggctctctaacacatgccgatttttgcactgcttgaaacagtacagtggagaagagggctttatgaagcacaacacatctcgccagaatgaacactgcctcaccaattttgacctggctgagtatcggcaggtgctgagtgacttggccattcagatctaccagcagctcgtgcgggtgttagagaacatccttcagccaatgattgtctcaggcatgctggaacatgaaacgattcagggcgtgtctggggtgaagcccacagggttgagaaagcgaacctccagtatcgccgatgagggcacctacacactggactccatcctccggcagctcaactccttccactcggtcatgtgtcagcatggcatggaccctgaactgatcaagcaggtggtcaagcagatgttctacatcataggggccatcaccctgaacaaccttctcctgcggaaggacatgtgctcctggagtaaaggcatgcagatcaggtacaatgtcagtcaactggaagaatggctgcgtgacaagaatctgatgaatagtggggctaaagaaaccctggaacctctcattcaggctgctcaacttttgcaagtgaaaaagaaaacagatgatgatgcagaagccatttgttctatgtgcaatgctttaactactgcccagattgtgaaagtgttgaatttgtatactccagttaatgagtttgaagaaagagtctctgtgtcgttcattcgtactatacagatgcgtttacgagacaggaaagactctccccagctgctcatggatgctaaacacatctttcctgtcacctttcctttcaacccatcttccctcgcactagaaaccatccagattccagccagcctcggcctgggcttcatttcacgggtctgaaagtgatgtccaggcaaaaattgacaatacatttcttgcccgaaataagaacccattatttccagtgagttactgaaaatacatttttaaagagaaagtactgattatctcccaaatgagaagtcattaactggaaatctccctagaatactttcatcactttggaaacaaagataggctctttcgtgctgtgttatctttatagcaacactcatccttaaccaactaggtaccgtgagtttacatacaggagaatgatggaaggaagggaggaaggaaaggaggagaaaaatgtgtcttcagctggcagcatttattttaaatccttagcactgagtttgaatggtataaaaagtataacttccatagatgagctgttgttaggaaggcaccaaagaacctcctctgcactaaacaggagaatggaaagaaaagtctccattgagtacatatcatgtcagtttagtaatcaattatgttgatattgttaaactggttcaaagaaataaactggcaatatgtaaagtaattcctcatttgtgtcactatgatatagagatattaaaggaatgttggtttgctaaatagtatagatgtccatttgtactatagtttactgagcattttaaattgctgctacatactgtcttcttaaaatgtaagtgatattaggcactacaataagtttctcttgtcaattctgtttacaattcaatcagatcacagttttaactggattatatgcaaatacctacagattcacctgcacaagtagcagacactggaaagtcatgtagtaatatgacaaaatgcttgacatttaggggtaggattagacaaagtggctattgttgatgtcattatttattcaggatgtattacattgatgtgctcattaattttccctgggtggatattgcgtcagggtacagtgttctgtgaagtgacttatttttaactaccagatctgattccttcagtgcatattttcaaccttgacaggttttctctcttcttaatttattaagaattaatctcggctgggcgcggtggctcacgcctgtaatcccagcactttgggaagccaaggtgggcggatcacttcaggttaggagttggagaccagcctggccaacatggcgaaaccctgtctctactaaaaatacaaaaattagccgggcgtggtggcacttgcctgtaatcccagctactcgggaggctgaggcacgagaatcgattaaacctgggaggcggagattgcaatgagatcgaaccactgcactccagcctgggtgacagagagagacactgccttggaaaaaaaaagaatctcactcactatctagagaggattgtcagaatattcacgattcaggtcttgaaactttgattatgcaaaagaaggtatataataaatatttcattatgattcagtttttaaggctttgcagcttctataagtgttctcagatgccactagataattttaaaagcatcatattagaaatactttaagaagacttatataagaaatagaagattgttgaattttacagaggatttggttcattaagacccagattctgtaagttttcattctgaaattctagttaaacatattcaccatttttcttaggaatcttatacaataaatccttcaggttgcacaaaagcaaattattagttttcattagaaactctggttctgaattacaatcataggttatataaatttaactgttagatggtctataaatcttattaaaatatgtgcaatatttatggaagtcaaacagcttcatatcagtgataaagattgttattaaaagataaatactgtctgttaatttacatgggcctcaagttcctcgtttataaaataagagagttggacactgattcttaacatctcctccacatttaaaattctctcttctcagcccttagattctagagagaaaaagctgcagttactcagtaagtccattctctgatggaaagaccagtgtgtagtgcctgtcaattccttaggattaatcaaatgtaaaatcacaagtttgtgtagctgtaacctttcttaaatgtacatgatttatgtacatgcttttagaaggtcctactatatttgtattataattagtttaagtaatttttattacatcatgtattgctttattcagtttgaatacatttatttatttatttgcagtatcaaccagaaacactaccaattgcatcaaattctcccagtttttcctggttgtcaatgcggttttcaatgcacaattaagtcatagccatttggttcgtaccaaatgtgtcagaatctaacagcatccgataggctgtaagttggggagttgctaagaaaatgcaacgtggtacaggctgtccgcctcagccctggaaatctcccagacctcccccagcttcatcctgtgtagcacgactcaacgtgcaccctgaatcttctcaggtcttccaggtcatgctgtagctgtcactgccatgcagcccttttttttactccggacagctcatgtactgaagcgtcatgaaagaaaggctgtggtctgagcccttctctcccatctcctgtctttgtcctgtcaagtgctggagccagagctcctacagctgcccttggtggtttctcctgttcagcgatggtggcacaaaggttctgctattccagggctccagcttcctcccaggtctacccagagctccagatgggggtctgaattaacctctcttggtggcctggagatttttagtcattgacaagaataccttgtaaccagggaaccccaaggcccagtaaatgattctgtataccattttcttgaaggtacaagaagattctgccgactatggggatctttgggccagtttgaggattgctttccctctgaggttctttctctctgtcagccacactttctcacccaacttcagacacaccctgccagcctttcccctactcattcactcttccccttccctcaacttaatcgtctatcccgttgcctgctgtttgactgtgcactgaaggcaggtggatggagtcagtcctcagttgcccctgctggccttcctggtgcttaccatcagcccaatctttgcacagtccttgttgttcttacttctctgcatgcattccttcagaagatcagtcatcaactttttcttaattcctctgtgacacacaatgggaattcaaaggaagagatcttaaaagtcacaacagttctttatcttaataatcccctccccattcaccttactacatgcagactcacctcacacccttacaacttgaagctgaaaatttaaaagtaatttccctttttgcagcttttcctcaggttaaggctttgatctgcctgagagtaactctaaaaggagggaagataaatatgggataaaatccacaaagtgtagcttctaattcctttggaagtttaaaaaatttccacatatctgatgcttcttttgtcaggtgcagaagcacaaaaacatattccgaagccaactgatagggaatttggggattattgtcagtttggagaatttgctgtgttatttcttcatttccatggatagctcatagttggctctttctgggtgagtaattatgtgtaatatagatcaaatcttttactaaggttacagctacatgttaggggaggctatgaaaatactatattattataatttcagtgcagtgattgttgtgagaaataactttcatggtaaccctaggaaaatgggcacctgccaccatcctgagaagtcctcacacaatgccctttctctcttacacacacacacacacacatacacacacacacacccccgtcactaattcatagagttccttagcaggcatagtcaaggatcctctgggtaatgtcagctgcttagtgataaaacagagccaaaactagtgcatcctgttgaaagtaatgcagaaacagtacctgggtccagatatgctttcctgcggcgctttcctctgttacctcgtttcatcctcacagcagcatggacggtaggtggggtcgcttctacaatcatttctgatgatagcttgggaatagagataggggcagtgacttgcctgatgtcgcacagccctctggctgtcctgctttcccatatggagcagtggtggtgtgggcacctgtgatgcaggagactttaaaaatgtcgtgaggtcacgtgctgcccctcctggtacgtgtggaatgcccctggccagcaaggggtgcttttttatcagagttggcagctggcatgtgggaaccgagcaagtgctgcgtaccaagttacttgttttaaggagaccaagtgctcagcgccaggtggttttcttttttgtcatagttacttgctataactcagcttgacttctgtcatgaatcagtgctctctgggaggatgcaatactctgtttgggcattaattggtagcaggttgtctcaaccaaaaagacaggaaacagcaaaagcctctctgaaattaagaggaaagttactctccccacacccatcagagtctttattggagccaccaggtgagctgtgcagcctggacaggcctgcagctataggccaccttcccagtttaggtcctcagcacaggggagcccaagtcactgggtgccttccgagggctgtcactgggcaggccatatacaagtcagtgtgtgcgtgggcactgcagtgtgtgcatgccgtaggtgttgatgggtgctaggaggggtgtcgtgtgcatgcgcgttgaagaggatctgtattgccgtgacctctgttcatggatgagtgcattgtaatttgttctcaggctgtgctgtgagggccgccttaacccttgctcccttcccttctagagctgccttaagttctccagaacttttcttctgtaaaggatatcttgcctggaagggatatcttgccctgtttctcaaggttttgtgagagttttgactggatgtggccctgcatgaccctccttctcctgtacttcctctttcctttccaaatgggaattagaactgtggggcagcaacagtctcagagccagtgagaggccagcttagagaatgcttctgagttagtgggactctgtgtcacaagtaagcaaatgaatatatgaaagaaattatggagataagttagattcttggtaatacttaaatgtcttgctttctactaaccttttgttactaaaggtaaagggtataactcaaactttttgtggacattcttttcaaaattttttaagaaccctgtactataaaaggttgagtaaaaacaggaaagcgtgctataagttcaaatctgttgtattaccctaaattagataaaccaacctgaattatagtagatttctcaatagatgaggaactgaaaaatactatgtaaaatatcttccaaaatgctttttatactttttttatttgtaatttggtctatctaaaatgttcgttagcttaacttaatgggcgttattggattcatatgactaacgtttcctcagtattgtaatgcttgaaatatttgaaagaaaaaatgttgttttttagttgaaactggtatatataattcagtgcttggcaggttagtatatttttatgcatttttcagagtcagcagtttcaaatcttattgttatcatgttataaaattttagcccacatttcaggctccgtaaatcatttgagccattattttttcccaacaaatggtgaattttttctttaaatgtggatatatatgttgtaatttatgattcctggttatgtatttttgtgggatcctgcagtaaaattgacttttttgtgtctttgggagatttaaattgcgctaacagtgttgcgcaaaaatgagttcatgccatttaacatattgtattttaattattaactgtattaatttactatgaaatggacatccttttaactaaaatggaattgaacattgcagttttcaaatatttttccttgttgggtctggaaaaggaattctactttgatctgcatagaaaattttgatacaattttttgaaagttcttaggtgaaacatttacccattaaaaaggaagcagaaatactgagacatgaaaggcattatcaactaactctagactctagaacccattctagcatatctcacgtgcaatttttaaaaataagttaataattcatctcatatcaacaaaagcctttgaaacatgggttttcactagatatcacctagtgctaagataaaaaccaaaacaatatcagaattacatttatgctctaaatttgtagttgtccattgttgtgcttagtaaatgtgtgtcattaatgctgtattctcctagctattatggaaacttgtttaaataaagatatggatat

SEQ ID NO: 53757 - DNA, 12139 bp, Artificial Sequence
  derived and/or modified sequence
accccgggcaggtggagcgctcgcggctgctcgcggcgagcccgggagtgatggcgaggcccctgcgggcggccagcgcctgaggcgccccgccccgccccgccccgcgcggccctccccgcccggccctgccctgccctgctccctgccggcggctgcgggcgcttcctagtccgctcgggcggccgcccaggcgaggtgcggcctccgcacaggcggggggcgtaggcgcgcggggcccgccatggctgcgtcggagctctacacaaagtttgccagggtttggatacctgatccagaggaagtctggaagtcagcagagctgctcaaagattataagccaggagataaagtcctcctgcttcacctcgaggaaggaaaggatttggaataccatctagatccaaagaccaaggagctgcctcacttacgaaatcctgacatacttgttggtgaaaatgacctcacagccctcagctatcttcatgagcctgctgtgctccataatctcagagtccgctttattgattccaaacttatttatacgtattgtggtatagtcctagtagctataaatccctatgaacagctgcctatttatggagaagatattattaatgcatacagtggtcagaacatgggtgatatggatccacatatctttgcagtagctgaagaagcttacaagcaaatggccagagatgaacgaaatcagtccatcatcgtaagtggagagtctggggcaggaaaaacagtctcagctaagtatgccatgcgatactttgcaactgtgagtggttctgccagtgaggccaatgtggaggaaaaggtcttggcctccaaccccatcatggagtccattggaaatgctaaaacaaccaggaatgataatagcagccgttttgggaagtatattgagattggttttgataagagatatcgaatcattggtgccaatatgagaacttatcttttagagaaatccagagtggtattccaggcagaagaggagagaaactatcatatcttctatcagctttgtgcctcagcaaagttacctgaatttaaaatgctacgattaggaaatgcagataactttaattacacaaaacaaggaggcagtcctgtgattgaaggagtggatgatgcaaaggagatggcacatactaggcaggcctgcactttgctaggaattagtgaatctcatcaaatgggaattttccgaatacttgctggcatccttcacttaggcaatgttggatttacatcccgagatgcagacagctgcacaatacctcccaagcatgaacctctctgcatcttctgtgaactcatgggtgtggactatgaggagatgtgtcactggctctgccatcggaaactggctactgccacagagacatacatcaagcccatctccaagctgcaggccacaaatgcccgcgatgctttggccaagcacatctatgccaagctctttaactggattgtagataatgtcaatcaggctctccattctgctgtcaaacagcactcttttattggtgtgctagacatttacggatttgaaacatttgagataaatagttttgaacagttttgcataaattatgcaaatgaaaaactacagcaacaattcaatatgcatgtcttcaaattggagcaagaagaatatatgaaggaacaaattccatggacactcatagatttttatgataatcagccttgtattaatcttatagaatcaaaactaggcattctagatttactggatgaggaatgcaagatgcctaaaggcacagatgacacctgggcccaaaaattgtacaacacacatttgaacaaatgtgcactctttgaaaagcctcgtctatcaaacaaagctttcatcatccaacattttgctgacaaagtggaataccagtgtgaaggatttctcgaaaagaataaagacaccgtttttgaagaacaaattaaagttcttaaatcaagcaagtttaagatgctaccagaactatttcaagatgatgagaaggccatcagtccaacttcagccacctcctcagggcgcacacccctcacacgaactcctgcaaagcccaccaaaggcagaccaggccaaatggccaaagagcacaagaaaacagtggggcatcagttcagaaactccctgcacctgcttatggagacactcaatgccactacccctcactatgtgcgctgtatcaagcctaatgacttcaagttcccattcacgtttgatgagaagagggcagtgcagcagctgagagcatgtggtgtcctggaaaccatccgaatcagtgcggccggtttcccctcacggtggacttaccaagaatttttcagccgctaccgtgtcctaatgaagcagaaagatgtgctgagtgacagaaagcaaacatgcaagaatgtgttagagaaactgatactggacaaggacaaataccagtttggtaagacaaagatctttttccgtgccggtcaagtggcctatctagaaaaattgagagctgacaaactgagagctgcctgcatccggatccagaagaccatccgagggtggctgctgagaaagaagtacctacgcatgcggaaggcagccatcaccatgcagagatacgtgcggggctaccaggcccgatgctatgctaagtttctgcgcagaaccaaggcagcaaccatcattcaaaagtactggcgcatgtatgtggtccgcaggaggtacaagattagacgagctgccactatcgttcttcagtcttacttgcgaggcttcttggccagaaataggtatcgcaagatactccgtgagcacaaagcagtcatcattcagaagcgagtccggggctggctggcccgcacacactacaagaggagcatgcatgccatcatctaccttcagtgctgcttcaggcggatgatggccaagcgtgagctaaagaagctcaaaatcgaggctcgctcagtggagcgctataagaagctgcacatcggcatggagaacaagatcatgcagctgcagcgcaaagttgatgagcagaacaaagactacaaatgccttgtggagaaactaaccaatctggaaggaatatacaactctgagactgagaaactacgaagtgacttagaacgtcttcaactaagtgaagaggaagcgaaagttgccactgggcgggtccttagtctgcaggaagaaattgccaagctccggaaagacctggagcaaactcgttcagagaaaaaatgcattgaggaacatgcagatcgatacaaacaagaaacagagcagctggtatcaaatctgaaggaagaaaatactttgctgaagcaagaaaaagaagccctcaatcaccgcatcgtgcagcaggctaaggagatgacagaaactatggagaagaagttagtagaagaaacgaaacaactggaactcgaccttaatgatgaaaggctgagatatcagaaccttctgaatgagttcagtcgcctggaagaaagatatgatgacctcaaggaagagatgacccttatggtgcatgtgcctaagcctggacacaagagaacagactccacccacagcagcaacgagtctgaatatatctttagctctgaaattgcagaaatggaagacattccatcaaggacagaggaaccaagtgagaagaaggtacctctggacatgtcattgttccttaagctccagaagcgggtcacagagctggagcaggagaagcaggtgatgcaggatgagctggaccgcaaggaggagcaggtgctccgcagcaaggccaaggaagaagaaagaccacaaattagaggtgcagaactggaatatgagtcactcaagcgtcaagaactagaatcagaaaacaaaaaactgaagaatgagctaaatgagttgcgcaaggccctcagtgagaaaagtgccccagaggtgaccgccccaggtgcacctgcctaccgtgtcctcatggagcagctgacctctgtgagcgaggagcttgatgtccgcaaggaggaagtcctcatcttaaggtctcaactggtgagccagaaagaggccatccaacccaagttacatgagaatacaatgacagattccacaatacttttggaagatgtacaaaaaatgaaagataaaggtgaaatagcacaagcatacattggtttgaaagaaacaaataggctcctggaatcccagctgcagtcacagaagaggagccatgagaatgaggccgaggccctccgtggggagatccagagcctgaaggaggagaacaaccgacagcagcagctgctggcccagaacctgcagctgcccccagaggcccgcattgaggccagcctgcagcacgagatcacccggctgaccaacgaaaacttggatttgatggaacaacttgaaaaacaggataagacggtccgtaaactgaaaaaacaactgaaagtatttgccaaaaaaattggcgaactagaagtgggccagatggagaacatatccccaggacagatcattgatgaacccatccgaccagtcaacattcccaggaaagaaaaggatttccaagggatgctggaatacaagaaggaggatgagcaaaaacttgttaagaacctgattctggaactgaagccacgtggtgtagcagtcaatttgattccaggattaccggcatatatcctgttcatgtgtgttcgacatgctgactacctgaatgatgatcagaaagtaaggtcgttgctaacatcaacaattaacagcatcaaaaaagtattgaagaaaagaggtgatgattttgaaaccgtctccttctggctctctaacacatgccgatttttgcactgcttgaaacagtacagtggagaagagggctttatgaagcacaacacatctcgccagaatgaacactgcctcaccaattttgacctggctgagtatcggcaggtgctgagtgacttggccattcagatctaccagcagctcgtgcgggtgttagagaacatccttcagccaatgattgtctcaggcatgctggaacatgaaacgattcagggcgtgtctggggtgaagcccacagggttgagaaagcgaacctccagtatcgccgatgagggcacctacacactggactccatcctccggcagctcaactccttccactcggtcatgtgtcagcatggcatggaccctgaactgatcaagcaggtggtcaagcagatgttctacatcataggggccatcaccctgaacaaccttctcctgcggaaggacatgtgctcctggagtaaaggcatgcagatcaggtacaatgtcagtcaactggaagaatggctgcgtgacaagaatctgatgaatagtggggctaaagaaaccctggaacctctcattcaggctgctcaacttttgcaagtgaaaaagaaaacagatgatgatgcagaagccatttgttctatgtgcaatgctttaactactgcccagattgtgaaagtgttgaatttgtatactccagttaatgagtttgaagaaagagtctctgtgtcgttcattcgtactatacagatgcgtttacgagacaggaaagactctccccagctgctcatggatgctaaacacatctttcctgtcacctttcctttcaacccatcttccctcgcactagaaaccatccagattccagccagcctcggcctgggcttcatttcacgggtctgaaagtgatgtccaggcaaaaattgacaatacatttcttgcccgaaataagaacccattatttccagtgagttactgaaaatacatttttaaagagaaagtactgattatctcccaaatgagaagtcattaactggaaatctccctagaatactttcatcactttggaaacaaagataggctctttcgtgctgtgttatctttatagcaacactcatccttaaccaactaggtaccgtgagtttacatacaggagaatgatggaaggaagggaggaaggaaaggaggagaaaaatgtgtcttcagctggcagcatttattttaaatccttagcactgagtttgaatggtataaaaagtataacttccatagatgagctgttgttaggaaggcaccaaagaacctcctctgcactaaacaggagaatggaaagaaaagtctccattgagtacatatcatgtcagtttagtaatcaattatgttgatattgttaaactggttcaaagaaataaactggcaatatgtaaagtaattcctcatttgtgtcactatgatatagagatattaaaggaatgttggtttgctaaatagtatagatgtccatttgtactatagtttactgagcattttaaattgctgctacatactgtcttcttaaaatgtaagtgatattaggcactacaataagtttctcttgtcaattctgtttacaattcaatcagatcacagttttaactggattatatgcaaatacctacagattcacctgcacaagtagcagacactggaaagtcatgtagtaatatgacaaaatgcttgacatttaggggtaggattagacaaagtggctattgttgatgtcattatttattcaggatgtattacattgatgtgctcattaattttccctgggtggatattgcgtcagggtacagtgttctgtgaagtgacttatttttaactaccagatctgattccttcagtgcatattttcaaccttgacaggttttctctcttcttaatttattaagaattaatctcggctgggcgcggtggctcacgcctgtaatcccagcactttgggaagccaaggtgggcggatcacttcaggttaggagttggagaccagcctggccaacatggcgaaaccctgtctctactaaaaatacaaaaattagccgggcgtggtggcacttgcctgtaatcccagctactcgggaggctgaggcacgagaatcgattaaacctgggaggcggagattgcaatgagatcgaaccactgcactccagcctgggtgacagagagagacactgccttggaaaaaaaaagaatctcactcactatctagagaggattgtcagaatattcacgattcaggtcttgaaactttgattatgcaaaagaaggtatataataaatatttcattatgattcagtttttaaggctttgcagcttctataagtgttctcagatgccactagataattttaaaagcatcatattagaaatactttaagaagacttatataagaaatagaagattgttgaattttacagaggatttggttcattaagacccagattctgtaagttttcattctgaaattctagttaaacatattcaccatttttcttaggaatcttatacaataaatccttcaggttgcacaaaagcaaattattagttttcattagaaactctggttctgaattacaatcataggttatataaatttaactgttagatggtctataaatcttattaaaatatgtgcaatatttatggaagtcaaacagcttcatatcagtgataaagattgttattaaaagataaatactgtctgttaatttacatgggcctcaagttcctcgtttataaaataagagagttggacactgattcttaacatctcctccacatttaaaattctctcttctcagcccttagattctagagagaaaaagctgcagttactcagtaagtccattctctgatggaaagaccagtgtgtagtgcctgtcaattccttaggattaatcaaatgtaaaatcacaagtttgtgtagctgtaacctttcttaaatgtacatgatttatgtacatgcttttagaaggtcctactatatttgtattataattagtttaagtaatttttattacatcatgtattgctttattcagtttgaatacatttatttatttatttgcagtatcaaccagaaacactaccaattgcatcaaattctcccagtttttcctggttgtcaatgcggttttcaatgcacaattaagtcatagccatttggttcgtaccaaatgtgtcagaatctaacagcatccgataggctgtaagttggggagttgctaagaaaatgcaacgtggtacaggctgtccgcctcagccctggaaatctcccagacctcccccagcttcatcctgtgtagcacgactcaacgtgcaccctgaatcttctcaggtcttccaggtcatgctgtagctgtcactgccatgcagcccttttttttactccggacagctcatgtactgaagcgtcatgaaagaaaggctgtggtctgagcccttctctcccatctcctgtctttgtcctgtcaagtgctggagccagagctcctacagctgcccttggtggtttctcctgttcagcgatggtggcacaaaggttctgctattccagggctccagcttcctcccaggtctacccagagctccagatgggggtctgaattaacctctcttggtggcctggagatttttagtcattgacaagaataccttgtaaccagggaaccccaaggcccagtaaatgattctgtataccattttcttgaaggtacaagaagattctgccgactatggggatctttgggccagtttgaggattgctttccctctgaggttctttctctctgtcagccacactttctcacccaacttcagacacaccctgccagcctttcccctactcattcactcttccccttccctcaacttaatcgtctatcccgttgcctgctgtttgactgtgcactgaaggcaggtggatggagtcagtcctcagttgcccctgctggccttcctggtgcttaccatcagcccaatctttgcacagtccttgttgttcttacttctctgcatgcattccttcagaagatcagtcatcaactttttcttaattcctctgtgacacacaatgggaattcaaaggaagagatcttaaaagtcacaacagttctttatcttaataatcccctccccattcaccttactacatgcagactcacctcacacccttacaacttgaagctgaaaatttaaaagtaatttccctttttgcagcttttcctcaggttaaggctttgatctgcctgagagtaactctaaaaggagggaagataaatatgggataaaatccacaaagtgtagcttctaattcctttggaagtttaaaaaatttccacatatctgatgcttcttttgtcaggtgcagaagcacaaaaacatattccgaagccaactgatagggaatttggggattattgtcagtttggagaatttgctgtgttatttcttcatttccatggatagctcatagttggctctttctgggtgagtaattatgtgtaatatagatcaaatcttttactaaggttacagctacatgttaggggaggctatgaaaatactatattattataatttcagtgcagtgattgttgtgagaaataactttcatggtaaccctaggaaaatgggcacctgccaccatcctgagaagtcctcacacaatgccctttctctcttacacacacacacacacacatacacacacacacacccccgtcactaattcatagagttccttagcaggcatagtcaaggatcctctgggtaatgtcagctgcttagtgataaaacagagccaaaactagtgcatcctgttgaaagtaatgcagaaacagtacctgggtccagatatgctttcctgcggcgctttcctctgttacctcgtttcatcctcacagcagcatggacggtaggtggggtcgcttctacaatcatttctgatgatagcttgggaatagagataggggcagtgacttgcctgatgtcgcacagccctctggctgtcctgctttcccatatggagcagtggtggtgtgggcacctgtgatgcaggagactttaaaaatgtcgtgaggtcacgtgctgcccctcctggtacgtgtggaatgcccctggccagcaaggggtgcttttttatcagagttggcagctggcatgtgggaaccgagcaagtgctgcgtaccaagttacttgttttaaggagaccaagtgctcagcgccaggtggttttcttttttgtcatagttacttgctataactcagcttgacttctgtcatgaatcagtgctctctgggaggatgcaatactctgtttgggcattaattggtagcaggttgtctcaaccaaaaagacaggaaacagcaaaagcctctctgaaattaagaggaaagttactctccccacacccatcagagtctttattggagccaccaggtgagctgtgcagcctggacaggcctgcagctataggccaccttcccagtttaggtcctcagcacaggggagcccaagtcactgggtgccttccgagggctgtcactgggcaggccatatacaagtcagtgtgtgcgtgggcactgcagtgtgtgcatgccgtaggtgttgatgggtgctaggaggggtgtcgtgtgcatgcgcgttgaagaggatctgtattgccgtgacctctgttcatggatgagtgcattgtaatttgttctcaggctgtgctgtgagggccgccttaacccttgctcccttcccttctagagctgccttaagttctccagaacttttcttctgtaaaggatatcttgcctggaagggatatcttgccctgtttctcaaggttttgtgagagttttgactggatgtggccctgcatgaccctccttctcctgtacttcctctttcctttccaaatgggaattagaactgtggggcagcaacagtctcagagccagtgagaggccagcttagagaatgcttctgagttagtgggactctgtgtcacaagtaagcaaatgaatatatgaaagaaattatggagataagttagattcttggtaatacttaaatgtcttgctttctactaaccttttgttactaaaggtaaagggtataactcaaactttttgtggacattcttttcaaaattttttaagaaccctgtactataaaaggttgagtaaaaacaggaaagcgtgctataagttcaaatctgttgtattaccctaaattagataaaccaacctgaattatagtagatttctcaatagatgaggaactgaaaaatactatgtaaaatatcttccaaaatgctttttatactttttttatttgtaatttggtctatctaaaatgttcgttagcttaacttaatgggcgttattggattcatatgactaacgtttcctcagtattgtaatgcttgaaatatttgaaagaaaaaatgttgttttttagttgaaactggtatatataattcagtgcttggcaggttagtatatttttatgcatttttcagagtcagcagtttcaaatcttattgttatcatgttataaaattttagcccacatttcaggctccgtaaatcatttgagccattattttttcccaacaaatggtgaattttttctttaaatgtggatatatatgttgtaatttatgattcctggttatgtatttttgtgggatcctgcagtaaaattgacttttttgtgtctttgggagatttaaattgcgctaacagtgttgcgcaaaaatgagttcatgccatttaacatattgtattttaattattaactgtattaatttactatgaaatggacatccttttaactaaaatggaattgaacattgcagttttcaaatatttttccttgttgggtctggaaaaggaattctactttgatctgcatagaaaattttgatacaattttttgaaagttcttaggtgaaacatttacccattaaaaaggaagcagaaatactgagacatgaaaggcattatcaactaactctagactctagaacccattctagcatatctcacgtgcaatttttaaaaataagttaataattcatctcatatcaacaaaagcctttgaaacatgggttttcactagatatcacctagtgctaagataaaaaccaaaacaatatcagaattacatttatgctctaaatttgtagttgtccattgttgtgcttagtaaatgtgtgtcattaatgctgtattctcctagctattatggaaacttgtttaaataaagatatggat

SEQ ID NO: 53758 - DNA, 5487 bp, Artificial Sequence
  derived and/or modified sequence
atggccgccagcgagctgtacaccaagttcgcccgggtgtggatccccgaccccgaggaggtttggaagagcgcggagctcctgaaagactataaacccggggataaggtgcttttgctgcacctggaggaaggtaaggatttagaataccatttggatccaaagactaaggagctaccccatctaaggaaccctgacatactggtaggggagaatgatctgaccgccctcagctacctgcatgagcccgcggttctgcataacctgagagtcaggtttatcgattctaaactgatctatacctattgcggcatcgttttggtggccatcaatccttatgagcagctccccatttatggcgaagatataattaatgcttattcggggcagaacatgggggatatggatcctcatatcttcgcagtagcagaagaggcgtataaacagatggcaagggatgagcgaaaccagtctattattgtttccggagaaagtggggctggtaagaccgtcagcgctaagtatgctatgcggtactttgccactgtctccggaagtgcgagcgaagctaatgtcgaagaaaaggtcctcgcaagcaacccgatcatggaaagtataggcaatgccaagacaacacgcaacgataactcctcccgcttcggtaagtatattgagattggcttcgataaacgctatcgcattataggcgctaacatgcggacgtacctgctcgaaaaatcacgagtggtgtttcaggcagaggaagagcggaactatcacattttctaccagctctgcgcgagcgccaagctgcctgagtttaagatgctgcgtctggggaatgctgataactttaattacacgaaacagggaggatctcccgtgatagagggcgtggacgacgcaaaggaaatggcgcacacccgccaggcctgtacactcctgggaatatcagaaagtcaccagatgggcatttttcggatcctggcaggtatcctgcacttgggcaatgtagggttcacatctagagatgccgattcctgtacaattccacctaaacacgagccgctctgtattttctgtgagttgatgggggttgactacgaggaaatgtgccactggctatgccaccggaaactggccactgcaactgagacctacattaagccaatttctaagctacaggctaccaacgccagagacgctctggctaagcacatctatgccaagctgttcaattggatcgtggataacgtgaaccaggctctccattctgccgtgaagcaacattctttcatcggggtgttggacatatatgggtttgaaacatttgagattaatagttttgagcagttctgcataaattatgccaacgagaaactgcagcagcagtttaatatgcacgtgtttaagctggaacaggaggagtatatgaaagaacagatcccgtggactctgatagacttttacgacaatcagccgtgtatcaatctgatcgaatccaagctgggaattttggacctcttggatgaggagtgtaagatgcctaaggggacagacgacacctgggctcaaaaattgtacaacacacatttaaacaaatgcgccctcttcgagaaaccccgtctgtctaacaaggcattcataattcagcactttgcagataaagtcgaatatcagtgtgaggggtttctggaaaagaataaagacaccgtgtttgaggagcagatcaaagtactgaaaagttccaaatttaaaatgctgcctgaactcttccaagatgatgagaaggccatatcccctacgagcgctacatctagcggcaggacccctctcacccgcacccccgcgaaacccacaaaggggagacctggacagatggcgaaggagcataaaaagacagtgggccaccagttccgtaatagcctgcatctcttgatggagactctcaacgccaccacgccacattacgtcagatgcataaaacccaatgatttcaaattccctttcacatttgacgagaagcgagctgtacaacagctgagggcctgtggagtgttagagaccattcggatcagcgcggccggctttccctcaaggtggacttaccaggagtttttctcaaggtacagggtactcatgaaacaaaaggacgttttgtcggacagaaagcagacgtgtaagaacgtgttagagaaactcattttggacaaagacaaatatcaattcggtaagaccaaaatcttcttcagggccggccaagtggcttacctcgaaaagctacgcgccgacaaactacgcgctgcttgcattagaatccaaaagacgatacgcggttggctcctaagaaaaaaatacctgcggatgcggaaggctgcgatcacgatgcagcgatatgtccggggatatcaggctagatgctacgctaaatttctacggagaacaaaggcggcaactattatccaaaagtactggcgtatgtacgtggtccgacgacgatataagatccgccgcgccgccaccattgtgctgcagagctacctgagaggcttcctcgcgcgaaaccgctaccggaagattctgcgagaacataaagcagtgatcatccagaagcgcgtacggggatggctagcacgtacccattataaacggagtatgcatgccatcatctacctgcagtgttgcttccggcgcatgatggcaaagagagaattgaagaagctcaagatcgaggccagaagtgtggaaaggtataagaaactacacataggcatggaaaacaagatcatgcaactgcagaggaaggtagatgagcagaacaaggattataagtgtctcgtggaaaagttaactaacctagagggaatctacaacagtgaaacggagaagctgagaagcgacctagagcgtctccaattgtccgaagaggaggccaaggtcgcgacggggcgggtgctcagtctgcaggaagagatcgccaagctcaggaaagatctggagcagacaaggtccgagaagaagtgcatagaggagcatgccgacagatacaaacaagagacagaacaattggtgtccaacttgaaggaggagaacacacttctaaaacaggagaaggaggcccttaatcaccgaatcgttcagcaggccaaggagatgactgagactatggagaagaaactggtggaggagaccaagcagctcgagctcgacctcaacgatgaacgactgaggtaccaaaatctcctcaacgaattctcccggcttgaagaaagatatgacgacctcaaagaggaaatgactttaatggtgcacgtccccaaacctggtcacaaaagaacagacagcactcactcatctaatgagtcagaatatattttctcatccgaaattgccgagatggaggatattccatctcgtacggaagagccttccgagaaaaaagtgcccctcgacatgtcactgttcctaaaactgcagaaaagagtgaccgaactggagcaggagaagcaagtgatgcaagacgagctggataggaaggaagagcaagttctgagaagcaaggctaaggaggaggagcgtccccagatcagaggggcggaactggaatacgagtctctcaagcgacaggagctcgaaagcgagaacaagaaactcaaaaatgagcttaacgagctcaggaaggccctgtctgaaaagtctgcccccgaggtaaccgcaccgggcgcgcccgcttacagagtactaatggagcagctgactagcgtctcagaggaactggatgttagaaaggaagaagtgctgattttacgcagtcagttggtaagccagaaggaggcaatccagcctaaagacgataagaatactatgactgattccaccatcctgctggaggacgtgcagaagatgaaggataaaggagagatcgctcaggcgtacattgggttaaaagaaactaaccgactactggaatcacaactgcagtcccaaaagcggtctcacgaaaatgaggctgaagccctacggggagagatccagtctctgaaagaggaaaataaccgccagcagcagctgctggcacagaacttgcagctgccaccagaggcccgaattgaagcgtcattgcagcacgagatcaccagacttactaatgagaatttggacctgatggaacaactagaaaagcaggataaaacagttaggaagctgaagaagcagctgaaggtatttgcaaagaagataggtgaactagaggtgggacagatggagaacatctcgcctggacagataatcgatgaacctattagacccgtcaatatccccaggaaggagaaagattttcagggaatgctggaatacaagaaggaagacgaacagaaactggttaagaacctaatcctggagctcaagcccagaggggtggcagtgaacctgataccagggttgcctgcctacatcctgttcatgtgcgtacgccacgctgattacctcaacgacgaccagaaggtgagaagtctcttgaccagcacaattaactccattaaaaaagtgctcaagaagcgtggcgacgatttcgagaccgtatcgttttggctcagcaatacgtgtagattcctgcactgcctgaaacaatatagtggagaggaggggttcatgaaacataatactagccgccagaacgagcattgtttaacgaatttcgacctggcagaatatcggcaggtactgtcagatttggcaatccagatctatcagcagctggtaagggtcctagagaatatcctgcagccaatgatcgtttcaggcatgcttgaacatgaaaccatccaaggggtgtctggcgtaaaacccacagggctgcggaagaggactagctcaatcgcagatgaaggcacctacactttggatagtattctgcggcagcttaactcatttcactccgtcatgtgccagcacggtatggatccagagcttataaagcaggtggtgaagcagatgttctatattataggagccattaccctgaataacctgctcctaagaaaggatatgtgcagctggtctaagggcatgcagattcgctataatgtttctcagctggaagagtggcttagggataagaacctgatgaattcaggcgcgaaagagacgcttgaacccttgatccaggcggctcaacttctccaggtgaaaaagaaaactgacgacgatgccgaagctatctgttcaatgtgtaatgccctgacaactgcgcagattgtcaaagtgcttaatctttacacaccagtcaacgagttcgaggaaagagtgtccgtttcctttatcagaacaatccagatgagattacgggatcggaaagacagcccacagttattgatggacgccaaacacatcttccctgtgactttcccgttcaacccatcctcattagctcttgaaacgatccagatccccgcgtctctgggactgggtttcatatctcgggtgtag

SEQ ID NO: 53759 - DNA, 4089 bp, Artificial Sequence
  derived and/or modified sequence
atgcacgtgttcaagctggagcaggaggagtacatgaaggagcagattccatggactttaattgacttctacgacaaccaaccctgcattaacctcatcgaatccaaactgggcatactggacctgcttgacgaagaatgcaagatgcctaagggcaccgatgatacctgggcccagaaactgtacaacacacacctgaacaaatgtgccttgtttgagaaaccccgactgtccaataaggcctttatcatccaacacttcgccgataaggtcgagtaccagtgtgaagggtttctggagaagaataaagacacagtgttcgaggagcaaatcaaagtgcttaagtccagcaagttcaaaatgcttcccgagctttttcaagacgatgaaaaggcgatctcacccacctctgccaccagttccgggcgtacacctctcacccgcacaccggctaaacccacaaaaggccgccccggccagatggctaaagagcacaagaagacagttggccaccagttccgtaattctctccacctactgatggagactctgaacgctacgactccacattatgtccgctgcataaaacccaatgacttcaaattcccctttacatttgatgaaaagagggccgtacagcagctgcgagcctgcggcgtcctcgaaacaatcagaattagcgccgcagggtttccaagccgctggacgtatcaagaattcttttcacggtaccgggttctgatgaagcagaaggacgtgcttagcgacaggaaacagacctgtaaaaatgtgcttgagaagttaatcctcgacaaggataagtaccagttcggcaaaacgaaaattttttttagggcagggcaggtggcctaccttgagaagttgcgggctgacaagctcagggcagcatgcatacgcattcagaaaacgattcgcggctggctgttacgcaaaaagtacctgagaatgaggaaggcagcaattaccatgcaaagatatgtgcgaggataccaggcccgctgttacgcaaagttcttgcgacggacgaaggccgcgacaatcatacagaaatattggaggatgtacgtggtgcggaggcgatataaaattcggagagcagccacgatagttttgcagtcttatctgcgcggctttctagcaagaaacagatatcggaaaattcttcgcgagcacaaagccgtgatcattcagaagagagtgcgcggctggttggctcggacccattacaagaggtccatgcatgccatcatctatctgcaatgttgtttcagaaggatgatggccaaaagggaattgaagaagctgaaaattgaggcacggtctgtggagcggtataaaaagctccacatcggcatggaaaacaagatcatgcagcttcaaaggaaagtggacgaacagaacaaagattataagtgcctggtggagaagctgaccaatctggaggggatctataacagcgaaactgaaaaactcagatctgacctcgagcgtctccaacttagcgaggaagaggcaaaggtcgctaccgggagagttctctctcttcaggaggaaatagcgaaactccggaaagacctcgagcagacgcggtcggagaaaaagtgtattgaggagcacgcggataggtacaagcaggaaacggagcaactggtatcaaacctaaaggaagagaacactctgctgaagcaggagaaggaagcccttaaccaccgcatagtccaacaagccaaggaaatgaccgagactatggagaagaaactggtcgaagaaaccaagcagctggaactggatctgaacgacgagcgattaaggtaccaaaaccttctgaatgaatttagccgcttggaagaaaggtatgatgaccttaaagaggaaatgacactgatggtgcatgttccaaagccgggccataaacgaacggattcaacacattctagcaacgagtccgaatacatcttctcatcagagattgctgagatggaggacatcccttcaagaactgaggaaccttccgagaagaaagtgcccctggatatgagcctattcctaaaactccaaaaacgggtcaccgagctcgaacaggaaaaacaggttatgcaggacgaactagatagaaaagaggaacaggttctgaggagcaaagcgaaagaggaagaaaggccccagatccgaggcgccgagttggaatatgagagtcttaaaagacaggaactggagagcgagaataagaaacttaagaatgagctgaacgagttgcgcaaggcgctgagtgagaagtctgcccccgaagttaccgcaccaggcgctccagcataccgggtcctcatggagcagctgacgtcagtgtcagaggaactcgacgtaagaaaggaagaggtgctgattctgcgatcgcagctggtgtcgcagaaagaggccatccagcccaaggacgataagaacaccatgacagacagtaccattcttttggaggacgtacaaaaaatgaaggacaagggagaaattgcgcaggcctacatcggactgaaggaaaccaataggctcctagagtcacagctgcaatcccaaaagcgcagccatgagaacgaagccgaagccttgcggggggagatccaatctcttaaagaggagaacaaccgacagcaacagctcctggctcagaatttgcaactgccccctgaggctaggattgaggctagcctacagcatgagataacccgcctgacaaatgagaacctggatctgatggagcaactcgaaaagcaagataagactgtccgcaagcttaagaaacagctcaaagtgttcgccaaaaagatcggcgagctcgaggtgggacagatggagaatatttcccctgggcaaatcatcgatgagcccataaggccagtcaatattcctaggaaggagaaggacttccagggaatgctcgagtacaaaaaggaggatgaacagaagctcgtgaaaaatctcattctcgaactcaagcctagaggggtcgccgttaatctgattcctggactgcccgcctatatcctttttatgtgtgttcgccatgctgactacctaaacgacgatcaaaaggtgcgcagtctgttaacaagcaccattaacagcattaaaaaagttctcaaaaaacggggagacgacttcgaaactgtgtctttctggttaagtaacacctgtcgcttcctgcattgtctgaagcagtattcgggggaagagggctttatgaagcacaacacctcccgccagaatgagcactgtctcaccaacttcgatctcgccgagtacaggcaggtgctgagtgacctggccatccagatatatcagcagctggtgagagtgctcgaaaatatcctgcagcctatgatcgtgtctggaatgttggagcacgagacaatccagggggtatcaggggtgaagccgactggcttaaggaagaggacctcctccattgccgatgaggggacctatactttagactcaatactgaggcaactcaactcattccattccgtgatgtgccagcatggcatggacccagaattgattaagcaggtggtcaagcagatgttttacataattggcgcgataacactaaataacctgctgctgcggaaggacatgtgctcttggagcaagggtatgcagatccgatataatgtgagccagctcgaagaatggctgagagacaagaatttaatgaattctggcgctaaagagactctagaacccctcattcaggccgcccagctgctccaggtcaaaaagaaaacagatgacgatgctgaagctatatgcagcatgtgtaatgccctgactacagcccaaatagtcaaagttctgaacctctacacccccgtcaatgagtttgaggagcgagtgtccgtatcattcatccgcacaattcagatgcgacttcgagaccgcaaagattctccacaactactcatggatgccaagcatatttttccagtcaccttccctttcaacccgtctagcttggctctcgagacaatacagattcctgcttcgttgggcctcgggtttatctcacgggtctag

SEQ ID NO: 53760 - DNA, 4377 bp, Artificial Sequence
  derived and/or modified sequence
atgtgccactggctgtgccaccggaagctggccaccgccaccgagacgtacataaaacctatcagcaagctgcaggccacaaatgctcgagatgcgttggcaaagcatatctacgccaagctgtttaattggatcgttgacaatgtcaatcaagcactccattccgccgtcaaacagcattcctttatcggggtgctggacatttatggctttgagacattcgagataaacagcttcgaacagttttgcatcaattacgccaatgagaaattacagcagcagttcaacatgcacgtttttaaactggagcaagaggaatatatgaaggaacagatcccctggacactgattgacttctacgacaatcaaccatgcatcaacctaatcgaaagcaagctgggcatcttggacttgttggacgaggagtgcaagatgccaaagggcactgacgacacttgggcgcagaaactctataacacccacttgaacaaatgtgccttgtttgagaagcccaggttatcaaacaaggcctttattattcagcactttgctgacaaggtggagtatcagtgtgaagggttccttgagaagaacaaagatacagtgttcgaggaacagattaaagttcttaaaagctctaagttcaaaatgcttcccgagctgttccaggacgatgaaaaggccatctcacctactagcgccacaagcagcggccgtacccctctgactcgaacccccgcaaaacctaccaaaggaagacccggacagatggctaaggaacataaaaaaacagtggggcatcaatttcggaactccctccacttattaatggaaacattgaatgccaccaccccccactatgtgcggtgcataaagcccaacgacttcaaattccccttcacatttgacgagaagagggccgttcagcagctgcgagcatgcggagttttggagacaattaggatcagtgctgcagggtttccctcacgttggacgtaccaggagttcttctctaggtatcgcgtactgatgaaacagaaggacgtcctgtccgacagaaagcagacatgtaaaaatgttttggagaagctgatcctggacaaggacaagtatcagttcggcaagacaaagatattcttccgagccggacaggtggcatacctggaaaagctccgcgccgacaagctacgcgccgcctgtatccgcatccagaaaaccatccgcggatggctgctccgcaagaaatatctgcggatgagaaaggcagctatcaccatgcagaggtacgtcagaggataccaagcgcgttgctacgcaaagttcctgcgccggaccaaagctgcaacaattatccagaaatattggagaatgtacgtcgtgaggaggagatataaaattaggagggccgctaccatcgtgctgcagtcctacctacgtggctttttggctagaaacagataccggaaaattttgcgcgaacacaaagccgttatcatccagaaacgcgtcagaggctggctagctagaactcactataaacggtccatgcacgccataatttacctgcagtgttgctttcggcggatgatggccaaaagagagcttaaaaagctgaagattgaggctaggagtgtggagagatacaaaaagttacacattggaatggaaaacaagataatgcagctccagcgtaaagtcgacgagcagaataaagactacaaatgcctcgtggagaagctcactaatttagagggcatttataactctgaaacagaaaagctgcgtagcgacctggagagacttcagctgtcagaggaagaggcgaaggttgcgactggtagagtgttatctttgcaggaagagatcgcgaaactcagaaaagatctcgagcagacacgaagtgagaaaaaatgcattgaagaacatgcagatagatacaaacaggagaccgaacagctcgtctctaatctgaaggaagagaacactctcctcaagcaggagaaggaggcactcaatcaccgcatcgtccagcaggcaaaagagatgaccgagacgatggagaagaagttagtggaagaaactaaacagcttgagctcgatcttaatgatgaacgactccgctaccagaacctgcttaatgagttctcccgcctggaggagagatatgacgatctcaaggaggaaatgaccctgatggtccatgttccgaagccagggcacaagcggacggacagcactcactcatccaacgagtccgagtatattttctcttctgagatcgccgagatggaggatattccctcacgcacggaagagcccagtgagaaaaaggtacctctagatatgtccctctttctgaagctgcagaagcgggtgaccgagttggaacaagaaaaacaggttatgcaggacgagctggaccggaaagaggaacaagtgctgaggagcaaggcaaaagaagaggaacgccctcaaatccgtggggccgagctggaatacgagtctctgaagagacaggaactggagtcggagaacaagaagttgaagaatgagcttaatgaacttcggaaggcacttagcgaaaaatctgctccagaagtaaccgccccgggtgcgccagcctaccgcgtactcatggagcagctaacctcagtcagcgaagagctggacgtgaggaaagaggaggtgctgattttgaggagtcaacttgtaagccagaaggaagctattcaaccaaaactgcatgaaaacacaatgaccgattccactatcctcttagaagacgtgcagaaaatgaaagacaagggagaaattgctcaagcatatatcgggctcaaagagacaaacagattgcttgagtctcagttacagagccagaaacgctcacacgagaacgaggcagaggcccttcgtggagagattcagagcctgaaggaggagaataacagacagcagcaactgctggcgcagaacctccagctgccaccggaagctcgaattgaagcctccctccagcacgagattactaggcttaccaacgagaaccttgacctgatggaacagctggagaaacaggacaaaaccgtgcgcaaacttaaaaaacagcttaaagtcttcgccaagaagatcggggagttggaagttgggcagatggaaaacatcagtcccggccagataatagacgagccaataagacctgtgaatattcctcgaaaagagaaggatttccagggcatgctcgaatacaagaaagaggatgaacaaaaactggttaaaaacctcatcctcgagctaaaacctcggggtgtggcggtaaaccttatcccaggactgcccgcctacatcctgttcatgtgcgtgcggcatgccgactacttgaacgatgatcaaaaggtccggtccctgctcacttcaactattaactcaatcaaaaaggtcctaaagaagcggggagacgacttcgagaccgtgtccttttggctgtcaaatacatgccggttcctacactgcctcaagcagtacagtggtgaggaggggttcatgaaacataacacttctcgtcagaatgagcactgcctgaccaatttcgatctggccgagtatagacaggttctgagcgatctcgctattcagatctatcaacagctggtacgggtgctggagaatatccttcaacccatgatagtttccggtatgttagaacatgagactatccagggcgtttctggagtgaaaccaactggtctacgcaagcggactagttcaatagcagacgaaggaacttatactcttgactctatccttagacaactgaattcctttcatagcgttatgtgccagcatggtatggatcctgaactgattaaacaggtcgtgaagcagatgttttatattatcggggcaatcacactgaataacttgcttttgcgcaaggatatgtgtagctggagcaaaggcatgcagatacgctataatgtatcacagctagaggagtggctgcgcgacaaaaaccttatgaattcaggcgcaaaagagacattggaacccctgatccaggccgctcagcttctgcaggtcaaaaaaaagaccgacgacgacgccgaggccatttgttccatgtgtaatgccctcacaactgctcagattgttaaggtccttaacctttacacccctgtaaatgaattcgaggagcgtgtgagcgtctcctttattagaacaatccaaatgagactgcgggatcgcaaggacagccctcagttgttaatggacgcgaagcatatatttccagtgaccttcccctttaatccctcatccctcgctttagagaccattcagattcctgcctccttaggtctgggcttcatttcacgagtgtag

SEQ ID NO: 53761 - DNA, 5486 bp, Artificial Sequence
  derived and/or modified sequence
atggccgcttccgagctgtatactaaattcgctagggtgtggatccctgacccagaagaggtctggaaatccgccgaactgctgaaagactacaagccgggagataaagtactgttgttgcatctggaggagggtaaagacctggaataccatctcgatcctaaaactaaggaactgccccacctgcggaaccccgacattctggttggcgaaaatgacctgaccgccctgagctacctgcacgagccggctgtcctgcataatctgcgggtccgctttatcgattcaaaactcatttatacgtattgtggtatcgtactcgttgccatcaatccctatgagcagctgccaatttacggggaggacattatcaatgcttatagcggccagaacatgggggatatggaccctcacatattcgctgtcgctgaggaagcctacaagcagatggctagggatgaacgaaatcagtccattatagtgagcggcgaaagcggggctggaaagactgtcagcgccaagtatgccatgcgctatttcgcaactgtcagcggttctgcaagcgaagcaaacgtggaagaaaaggtactggcgtctaaccccataatggaatccatcggtaacgcgaagacgacccgcaacgataactcaagccggttcgggaaatatatcgagatcggcttcgataaacgctacagaattataggagctaacatgaggacctacctgcttgagaaatctcgagtggtgtttcaggccgaagaggagaggaactaccacattttctaccagctgtgtgcctcggcgaaattgcccgaatttaagatgctcagactcgggaacgctgacaacttcaactacaccaagcaaggtggatcacctgtgattgaaggggtcgacgacgctaaggagatggcacacacgagacaggcttgtaccttactcggtatttctgaatcccaccagatgggaatcttccgaattctcgctggaattctccatctcggtaacgtggggttcacttcccgcgacgctgattcctgtacaatcccacctaagcacgaacccctgtgtattttctgcgaattaatgggggtcgactatgaagagatgtgtcattggttgtgccatcggaaactggcgacggccactgaaacctacatcaaaccaattagtaaattacaggccactaacgctcgcgacgctctggccaaacatatctacgcaaagttatttaactggatcgtggacaatgtgaaccaggcgttgcactccgccgtgaaacagcactctttcatcggcgtgctagatatttatggattcgagaccttcgagatcaactcattcgagcaattctgcatcaactacgcgaacgaaaagctccagcaacagttcaacatgcatgtgttcaagttagaacaagaggaatacatgaaagaacaaatcccctggaccttaattgacttttacgataaccagccttgtatcaacttgattgagtcgaagctgggaatcttggatcttcttgacgaggagtgtaagatgccaaagggcaccgatgacacatgggcgcagaagctctacaatacacacctcaacaagtgtgccctcttcgaaaagccgaggttatctaataaagcgttcataatccagcactttgctgataaagtggagtaccagtgtgaggggttcttggaaaaaaacaaagacaccgtgttcgaagaacaaatcaaagtgttgaagtcctcaaagttcaagatgctccctgaactgtttcaggatgatgaaaaggctatttctcctacttccgctacctccagcggtaggacacctcttacccgcacacccgctaagcctacaaagggccgacccggacaaatggccaaggagcacaagaagactgtgggccaccagtttcgtaactctctgcacctgctgatggagaccctgaatgccactacccctcactacgtacgctgtatcaagccaaacgactttaagttcccttttacctttgacgaaaagagggctgtgcaacagcttagggcctgcggtgtgctcgagactattaggatctccgccgctggctttccgagtaggtggacttatcaagagttcttttcgcgatatcgagtcctaatgaagcagaaagacgttctttccgatcgcaaacagacatgtaaaaacgtcctggagaagcttatcttagacaaagataagtatcagttcgggaagactaagatctttttccgtgccggtcaagtggcctatctggaaaaactgcgagctgacaaactgcgggctgcctgtatcaggatacagaagacaatccggggatggctgctccgaaaaaaatacctacgaatgcggaaagccgctataactatgcagcgttacgtacgcggttaccaggcaaggtgctatgcaaagtttctgcgtcgcactaaggccgcaacaataattcagaaatattggcgcatgtacgtggttaggagacggtacaagatacggagggccgcaaccatcgttttgcagagctaccttcggggatttctggccagaaatcgctataggaaaattctgcgggagcataaggcagtcatcattcagaaacgagtgagaggctggcttgcaagaacccactacaaacgatcaatgcatgccattatctatcttcaatgttgctttcggcgaatgatggcaaagcgggagctgaaaaaactaaagatagaggcaaggtcggttgagaggtacaagaagctccacatcggtatggagaataagattatgcagctgcagagaaaagtcgacgagcagaacaaggactataaatgcttggtggagaaactgaccaatctggagggaatctacaattccgaaactgagaagctccgaagtgaccttgagcgattacagctgagtgaagaggaagccaaagtcgccaccgggagagttctgtctttacaggaagaaatcgcaaagctgcggaaggacctcgaacagacccggtcggagaagaagtgtatcgaagaacatgccgatcggtacaagcaggagacggaacagctggtctccaaccttaaggaggagaacactctgctgaagcaggaaaaggaggccctgaatcacaggatagtacagcaggccaaggagatgacagagacaatggaaaaaaagctggttgaagaaactaagcagttggaactcgacctgaatgatgaacggctgagatatcagaatctgttgaatgagtttagtcgactggaggagaggtacgatgacctgaaggaagaaatgacactgatggttcatgtacccaagcccggacataagagaaccgactctactcactcgtcaaatgagtccgaatatatcttcagcagcgagattgctgagatggaggatatcccctcccgaacggaggaaccctccgaaaagaaggtcccattggatatgagccttttcctcaagctacaaaaacgcgtgacagaactggagcaggagaaacaggttatgcaagacgaactggaccgaaaagaggaacaggtgctgcgtagtaaagctaaggaggaagaaaggccacaaattcggggagccgagctagaatacgagtccctcaagcggcaagagctggaaagtgagaataaaaaacttaagaacgaactcaacgaactgagaaaagcactatcggagaagtctgctccagaggtgactgcaccaggcgcacccgcttaccgtgtgcttatggagcagctgacaagtgtctctgaggagctagatgttcggaaggaagaggttcttattttacgcagtcaactggtcagtcagaaagaggccatacagcctaaggacgacaagaatactatgacagacagtactatcctgctggaggatgtccaaaagatgaaagacaaaggcgaaatcgcccaggcatatatcgggcttaaggaaacgaacaggctgcttgaatcacagctgcagtcccagaaaaggtcccacgagaacgaagctgaagcactgcgcggagagattcagtctctgaaagaagagaacaaccggcagcaacagttgttggcccagaaccttcaattaccccctgaggctagaatcgaagcttcacttcagcacgagattaccaggctgaccaacgagaatcttgacctcatggagcaactggagaaacaggataaaacagtgcggaaattgaagaagcaactgaaggtcttcgccaaaaagatcggagaactcgaggttggacagatggaaaatatctcccctggccaaattatcgacgagcccatcaggcctgtaaacatccccagaaaagagaaggactttcaaggaatgttagaatataagaaggaagacgagcagaaacttgtaaaaaaccttattctggagctgaagcctcgcggtgtcgccgtaaatctcataccaggtctccccgcttacatcctctttatgtgcgtgcgtcacgctgattatctcaatgacgatcaaaaagtcagaagtctgctgacctcaactattaacagtattaagaaagtcctgaaaaaacggggtgacgacttcgagaccgtatctttttggttgagcaatacctgcaggtttctacattgccttaaacagtacagcggtgaggaggggttcatgaagcacaataccagtcgacagaatgaacattgcctgacgaatttcgatttggccgagtaccgacaggtactgagcgacctggcaattcagatctaccagcagcttgtgcgtgtgctggaaaacatcctgcagcctatgattgtcagcggcatgctagagcatgagactattcaaggggtatctggcgtgaagccaactggcttgagaaaacgaacaagcagcattgcggacgaaggaacctatactctagactccatactgcggcagctgaattcctttcatagcgttatgtgtcagcatggaatggatcccgagctgataaagcaggtggttaaacagatgttttacattatcggggctatcactctcaacaatctgcttcttaggaaggacatgtgttcctggagcaagggaatgcaaatccgctacaatgtatcccaactggaggaatggcttagggataaaaatttgatgaattcaggtgccaaagagacccttgaaccattaatccaagctgcgcagctgctccaggttaagaagaaaactgacgacgacgcagaagccatttgttcgatgtgcaatgccctgacgaccgcgcagattgttaaagtcctcaatttatacactcctgttaatgaatttgaggagagggtctctgtaagtttcatccgtactatacagatgcggctcagggaccgcaaagacagtccacagctactgatggacgccaagcatatcttccctgtcacctttccattcaaccccagcagtttggccctagagactatccagatccctgcttcccttggcctgggatttatctctagagtcta

SEQ ID NO: 53762 - DNA, 4089 bp, Artificial Sequence
  derived and/or modified sequence
atgcacgtttttaaattggagcaagaagagtacatgaaagaacagatcccatggacactgatcgatttctatgacaaccagccctgtataaacttgattgagagcaaacttggaatactagatctgttagatgaagaatgtaaaatgcctaaggggacggacgacacctgggctcaaaagctctacaatactcacctgaataagtgcgcattattcgaaaagccgaggctgtctaataaggcgtttattatccagcattttgccgacaaggtggagtaccaatgcgaaggctttttagagaagaacaaggacaccgtgtttgaggagcagattaaggtgttgaagagctctaaatttaaaatgctgcccgagttgttccaagatgacgagaaggcaattagccccactagcgccacttcttccggtaggaccccgctgactagaacccccgcaaagcctaccaagggccgtccagggcagatggccaaagaacacaaaaagaccgttggacaccagttcagaaattccctccatttgctgatggagaccctgaatgctaccacaccacattatgtccgctgtatcaaacctaatgatttcaaattcccattcaccttcgatgagaagcgggcagtgcagcagctcagagcgtgcggagtactggagaccatacgaattagcgccgctggcttcccgagtcgttggacataccaggaatttttcagtcggtaccgcgtcttaatgaaacagaaggacgtgctgtcagacaggaaacagacgtgcaaaaatgttctggagaagctcattcttgataaagataaatatcagttcgggaaaacgaagatcttttttagagcaggccaggttgcttatctggaaaagttacgggctgacaaactccgggctgcctgtatcagaatccagaagactataaggggatggttgttacgtaagaaatacctgcggatgcggaaagccgcaattacaatgcagaggtatgtaaggggataccaggcacggtgctacgctaaattcctcagacggaccaaagctgcgactattatccagaagtactggaggatgtatgtggtcaggcggcgttataaaatccgcagagctgccacaatcgtgttgcagagctatttgcgcggattcttggcaagaaaccgctatcgaaaaatcctgagagagcataaggctgtcattatacagaaacgcgtgagagggtggcttgctcgcactcactataaaaggtctatgcatgccattatctatctgcagtgttgcttcaggcgaatgatggcaaagcgagagctgaagaagctgaagattgaagctcgcagcgtggaacgctataaaaagcttcacattgggatggagaacaagattatgcagctgcagcgcaaggtcgatgaacagaataaggattataagtgcctggtcgagaagctgactaacctggaagggatttacaacagtgagaccgagaaactcaggtctgatttggagagactgcagctttctgaagaagaggcaaaggtggccacaggtagagttctgagcctccaggaggagatcgccaaacttaggaaagatctagaacagacccggtccgaaaagaaatgtatcgaggagcatgcagatagatacaaacaagagacagagcagctcgtcagcaatctaaaagaggaaaacactctcttaaagcaggagaaggaggctctgaaccaccgaatcgtccagcaagccaaagagatgacggaaaccatggagaaaaagctggtggaagagactaagcagctggagttagatttgaacgacgagcgcctccggtatcagaacctgttaaatgagttctctagattagaagagcgctatgatgacctgaaggaagagatgacacttatggttcatgtgcctaagcctgggcataagcggacagatagcacacacagctctaatgagagcgaatatattttctcatctgaaattgccgagatggaggatattccatctagaaccgaagagccatctgagaagaaggtccctctggacatgtccctcttccttaagctccagaagagagttaccgagctcgagcaggagaagcaggtcatgcaggacgaactcgatcgaaaagaggaacaggtgctgcgctcaaaagctaaggaagaagaacggcctcagatcaggggggcagaactggaatatgagtccctcaaacggcaggagctggagagtgagaataagaagctgaaaaatgagctgaatgagctgcggaaggcgcttagcgagaagtcagctcccgaggttaccgcccctggcgctccagcatacagggttctcatggaacagttaacctctgtgagcgaagagctggacgttagaaaggaagaagtgttgatcctccgctctcagcttgtgtctcagaaggaggctattcaacccaaggatgacaagaataccatgacggatagtactatcttactggaggacgtccaaaaaatgaaagacaaaggggaaatcgcccaggcctatattggccttaaagaaacaaatcgactgctggagtctcaactccagagtcagaagaggtcacatgagaacgaggctgaggctctcagaggggaaatccagtccctgaaagaagagaataaccgccagcagcagctgctcgctcaaaatttgcaactaccacccgaagcccgaattgaggcctccctgcagcatgagatcacccgccttaccaacgagaatctggatctgatggaacagctcgagaaacaagacaaaaccgtgcgcaaactgaagaaacaactaaaggtctttgccaaaaaaattggagagctggaggtcggacagatggagaatataagtcctggccagatcattgatgaacccattcgtccggtgaatattcctcggaaggaaaaagattttcaggggatgttagaatataagaaggaggacgaacagaagttggtgaagaatctcatcctcgaactcaagccaaggggtgtggccgtcaacttgatccctgggttaccagcttatattctcttcatgtgtgtaagacacgcagactatttgaacgacgaccagaaggtccgctctctgttgacgtcaacaatcaactccataaaaaaagtgctcaagaagcggggtgatgatttcgaaacagtctcgttctggctgtcaaacacatgcagattccttcactgtctgaagcaatacagcggggaagagggcttcatgaagcacaacacttcgcggcaaaacgagcattgcctgaccaactttgatttggccgagtatcgccaggtgttgagcgacttggccattcaaatctaccagcaactcgtgagagtattggagaacattctacaacctatgattgtaagcgggatgctcgagcacgagacaattcagggagtttcaggagtcaagcccacaggactaaggaagcgtacttcttccatagctgacgagggaacatacaccttagactccatcctacgtcagctcaacagttttcatagcgtgatgtgccagcacgggatggatcccgagctgatcaagcaggtcgtgaaacagatgttctacattatcggtgctatcacccttaacaacttgttgctgcggaaggatatgtgttcttggtccaaagggatgcagattaggtacaacgtttctcagcttgaagagtggctacgcgataagaacctgatgaattcaggggctaaagagaccctggagcctctgattcaggctgcgcagctgttgcaggtcaaaaagaaaactgacgatgatgccgaggccatatgttctatgtgcaacgctttaactaccgcacagatcgtgaaggtactgaacttgtatacccccgtgaacgagttcgaagagagggtttcggtatcgttcataaggactatacagatgcggctccgagatcgaaaggactcacctcaactgttaatggatgccaagcatatcttccccgtcacattcccgttcaatcctagctccctagctctggagactattcagattcccgctagcctcgggctgggtttcattagcagagtatag

SEQ ID NO: 53763 - DNA, 4376 bp, Artificial Sequence
  derived and/or modified sequence
atgtgtcactggttatgccataggaaactcgccaccgccacggagacctacatcaaaccgatttctaaattgcaagccacgaatgcaagagatgcactggccaaacacatctacgccaaactattcaattggattgtggataatgtaaaccaagccttgcactctgcggtgaagcagcatagcttcatcggggttctcgatatctatggatttgagacgttcgagattaactccttcgagcaattctgcataaattatgcaaatgagaagctccagcagcagttcaacatgcacgtattcaagttagagcaagaagagtacatgaaagaacaaatcccttggacactgattgacttttatgacaaccaaccatgtataaacctaatcgaatccaaactgggcattttagatctgctcgatgaagaatgcaagatgcctaaaggcacagacgatacatgggcacagaaactctataatacacatctcaacaaatgcgctctctttgaaaagcccaggctgagtaacaaagccttcatcatccagcattttgcggacaaagtagagtatcagtgtgaaggtttccttgagaagaataaggataccgtgttcgaagaacaaatcaaagtgctgaagtcttcaaagtttaagatgttgcctgagctctttcaggatgacgaaaaggccatatcaccaactagtgccactagcagtggccgaactccactgacaaggacccccgctaagccgacaaaggggcgtcctggtcagatggcgaaagagcataagaagacggtcggccaccagttcaggaattccttgcatctgctcatggagaccctgaatgccactaccccacattacgtgagatgcatcaaacccaacgacttcaaattcccctttacattcgacgaaaagcgagctgtccagcagttgagagcctgcggggtactggagaccatacggatctcggcggcaggattcccttcccggtggacatatcaagaattcttctcccggtacagggttctgatgaaacagaaggatgttctgagtgatagaaaacagacatgtaagaatgtactggagaagctaattttggataaagataaatatcagttcggcaagacaaagattttctttcgcgctggacaggttgcgtatctggaaaaattgcgagctgacaaactcagagcagcctgtatccgaatccagaagactatcagagggtggctgctacggaaaaaatacttgcgcatgcggaaagccgcaatcaccatgcaacgatacgtgagaggctaccaagctcgatgctacgccaaatttctcagacggacaaaggcagcaaccattattcagaagtactggcgcatgtacgtcgtacggagacggtataagatccgacgggcagcaactatcgtgcttcagtcatacctgcgcggattcctagcccgaaataggtatagaaagatcttgagggagcataaagccgtcattatccagaaaagggtccggggttggcttgccaggacacactataagagatccatgcatgccattatatacctgcagtgttgcttccgacgaatgatggcaaagagagaactgaaaaagctgaagatagaggcgagaagtgtggagcgctacaaaaaactgcacatcggtatggagaataagataatgcagctgcaacggaaagtggatgaacagaataaggattataagtgtctagtcgaaaagctgacgaacttggagggaatttacaactctgagacagaaaagctccggtccgacctggagcgactgcagctgagcgaggaggaagctaaagtggccactggtagggttcttagtctgcaggaagagattgccaagctgaggaaggatttggagcagacccggtctgagaagaagtgcattgaagaacacgcagacagatataagcaggagactgagcagctagtctctaacctgaaggaagaaaacaccctgctgaaacaggagaaggaagccctgaatcatagaatcgttcagcaggccaaggagatgaccgaaacaatggagaagaaactcgtggaagagacaaagcagttagaactggatctgaatgatgaacgtctcagataccagaacctgctgaatgaattttcaaggctggaggaaaggtatgatgatctaaaagaggagatgacactaatggtgcacgttccaaagcccggtcataaaagaaccgactctacacactcatctaacgagagcgaatacatttttagctccgaaattgcagaaatggaggatatcccttctcgaaccgaagagccatctgaaaagaaggttccactagacatgagtctatttctgaagctgcagaaacgtgtcacagagctagaacaggaaaagcaggttatgcaagacgaactggaccgcaaagaagaacaggtcctgaggtcaaaggctaaagaggaggaaaggccccagatacgcggagccgaactggagtatgagagtctgaaacgccaggagctggaatccgagaataagaagctcaagaacgagctcaatgagctgcgcaaagctctctccgagaagtccgccccagaagttacggcccctggagccccagcttatcgggtgcttatggaacagctgactagtgtgtccgaggaactcgatgtgcgaaaagaggaagtgctgatcctgcggtcccaactggtgagtcaaaaagaggccatccagcccaagcttcacgagaacaccatgaccgatagcactattctactggaggatgtacagaaaatgaaagacaaaggggaaattgcccaagcctatattgggctgaaggaaacgaaccggctgctcgagtcccagctacagtctcagaagaggagccacgagaacgaggctgaggcattgcgaggagagatccagtcgctgaaggaggagaacaatcgccagcagcaacttctggcccaaaatctccagctgcctcccgaggcccgtatagaagcaagtctgcagcacgagattacgaggctaacaaatgagaatctggatcttatggagcaacttgaaaaacaggataagacggtcagaaagctgaagaagcaacttaaagtgttcgcaaaaaagattggggagcttgaagtgggacagatggagaatattagccccggtcagattattgacgagcctattcgtccagtgaatattccaaggaaggaaaaggacttccagggtatgctggaatacaagaaggaggacgagcagaagctggtgaaaaatctcattctagagctgaagccacgcggagtggctgttaatctgattccaggtctcccagcgtatattctctttatgtgcgtgaggcatgccgattatctgaatgatgatcagaaagtgcgcagcctcctgacctccactattaattcaataaagaaggtccttaagaaaaggggggacgatttcgagaccgtgagcttctggctttccaacacttgcagattcctccattgtctgaaacagtattccggagaggagggctttatgaaacacaatacatctcgccagaatgaacattgtcttacaaattttgatttggcagaataccgccaggttctgtctgatcttgccattcaaatttatcagcagctggtcagagtcctggaaaatatactgcagcctatgatcgtaagtggcatgctggaacacgagactatacaaggcgtgagcggcgttaaaccaacgggactgcggaaacgcacaagctctattgccgatgaggggacatacactctcgattcgattctgcgacagttgaactcatttcattctgtgatgtgccagcacggaatggacccagagctcatcaaacaggttgtgaaacagatgttttacatcattggggcaatcacgctgaataatctcctgttgagaaaggatatgtgctcatggagcaagggcatgcagatcaggtacaacgttagccaactagaggagtggctgagggacaagaaccttatgaactccggggcaaaagagacgctcgaaccactcatacaggccgcacagctcctccaggtgaagaaaaaaactgatgatgacgctgaagccatttgttcaatgtgcaacgccttaacgacagcccagatagttaaggtccttaatttgtacacacccgttaacgaattcgaggaacgggtgagcgtctcattcatccgaaccatccagatgagattgcgggacagaaaggactctcctcagttgcttatggatgctaaacacatttttcccgtcacttttccttttaacccctcgtctctggcactggagactatccagatccccgcatctctaggactgggattcattagtagagtcta

SEQ ID NO: 53764 - DNA, 5487 bp, Artificial Sequence
  derived and/or modified sequence
atggccgccagcgagctgtacaccaagttcgccagagtgtggatccccgaccccgaggaggtgtggaagagcgccgagctgctgaaggactacaagcccggcgacaaggtgctgctgctgcacctggaggagggcaaggacctggagtaccacctggaccccaagaccaaggagctgccccacctgagaaaccccgacatcctggtgggcgagaacgacctgaccgccctgagctacctgcacgagcccgccgtgctgcacaacctgagagtgagattcatcgacagcaagctgatctacacctactgcggcatcgtgctggtggccatcaacccctacgagcagctgcccatctacggcgaggacatcatcaacgcctacagcggccagaacatgggcgacatggacccccacatcttcgccgtggccgaggaggcctacaagcagatggccagagacgagagaaaccagagcatcatcgtgagcggcgagagcggcgccggcaagaccgtgagcgccaagtacgccatgagatacttcgccaccgtgagcggcagcgccagcgaggccaacgtggaggagaaggtgctggccagcaaccccatcatggagagcatcggcaacgccaagaccaccagaaacgacaacagcagcagattcggcaagtacatcgagatcggcttcgacaagagatacagaatcatcggcgccaacatgagaacctacctgctggagaagagcagagtggtgttccaggccgaggaggagagaaactaccacatcttctaccagctgtgcgccagcgccaagctgcccgagttcaagatgctgagactgggcaacgccgacaacttcaactacaccaagcagggcggcagccccgtgatcgagggcgtggacgacgccaaggagatggcccacaccagacaggcctgcaccctgctgggcatcagcgagagccaccagatgggcatcttcagaatcctggccggcatcctgcacctgggcaacgtgggcttcaccagcagagacgccgacagctgcaccatcccccccaagcacgagcccctgtgcatcttctgcgagctgatgggcgtggactacgaggagatgtgccactggctgtgccacagaaagctggccaccgccaccgagacctacatcaagcccatcagcaagctgcaggccaccaacgccagagacgccctggccaagcacatctacgccaagctgttcaactggatcgtggacaacgtgaaccaggccctgcacagcgccgtgaagcagcacagcttcatcggcgtgctggacatctacggcttcgagaccttcgagatcaacagcttcgagcagttctgcatcaactacgccaacgagaagctgcagcagcagttcaacatgcacgtgttcaagctggagcaggaggagtacatgaaggagcagatcccctggaccctgatcgacttctacgacaaccagccctgcatcaacctgatcgagagcaagctgggcatcctggacctgctggacgaggagtgcaagatgcccaagggcaccgacgacacctgggcccagaagctgtacaacacccacctgaacaagtgcgccctgttcgagaagcccagactgagcaacaaggccttcatcatccagcacttcgccgacaaggtggagtaccagtgcgagggcttcctggagaagaacaaggacaccgtgttcgaggagcagatcaaggtgctgaagagcagcaagttcaagatgctgcccgagctgttccaggacgacgagaaggccatcagccccaccagcgccaccagcagcggcagaacccccctgaccagaacccccgccaagcccaccaagggcagacccggccagatggccaaggagcacaagaagaccgtgggccaccagttcagaaacagcctgcacctgctgatggagaccctgaacgccaccaccccccactacgtgagatgcatcaagcccaacgacttcaagttccccttcaccttcgacgagaagagagccgtgcagcagctgagagcctgcggcgtgctggagaccatcagaatcagcgccgccggcttccccagcagatggacctaccaggagttcttcagcagatacagagtgctgatgaagcagaaggacgtgctgagcgacagaaagcagacctgcaagaacgtgctggagaagctgatcctggacaaggacaagtaccagttcggcaagaccaagatcttcttcagagccggccaggtggcctacctggagaagctgagagccgacaagctgagagccgcctgcatcagaatccagaagaccatcagaggctggctgctgagaaagaagtacctgagaatgagaaaggccgccatcaccatgcagagatacgtgagaggctaccaggccagatgctacgccaagttcctgagaagaaccaaggccgccaccatcatccagaagtactggagaatgtacgtggtgagaagaagatacaagatcagaagagccgccaccatcgtgctgcagagctacctgagaggcttcctggccagaaacagatacagaaagatcctgagagagcacaaggccgtgatcatccagaagagagtgagaggctggctggccagaacccactacaagagaagcatgcacgccatcatctacctgcagtgctgcttcagaagaatgatggccaagagagagctgaagaagctgaagatcgaggccagaagcgtggagagatacaagaagctgcacatcggcatggagaacaagatcatgcagctgcagagaaaggtggacgagcagaacaaggactacaagtgcctggtggagaagctgaccaacctggagggcatctacaacagcgagaccgagaagctgagaagcgacctggagagactgcagctgagcgaggaggaggccaaggtggccaccggcagagtgctgagcctgcaggaggagatcgccaagctgagaaaggacctggagcagaccagaagcgagaagaagtgcatcgaggagcacgccgacagatacaagcaggagaccgagcagctggtgagcaacctgaaggaggagaacaccctgctgaagcaggagaaggaggccctgaaccacagaatcgtgcagcaggccaaggagatgaccgagaccatggagaagaagctggtggaggagaccaagcagctggagctggacctgaacgacgagagactgagataccagaacctgctgaacgagttcagcagactggaggagagatacgacgacctgaaggaggagatgaccctgatggtgcacgtgcccaagcccggccacaagagaaccgacagcacccacagcagcaacgagagcgagtacatcttcagcagcgagatcgccgagatggaggacatccccagcagaaccgaggagcccagcgagaagaaggtgcccctggacatgagcctgttcctgaagctgcagaagagagtgaccgagctggagcaggagaagcaggtgatgcaggacgagctggacagaaaggaggagcaggtgctgagaagcaaggccaaggaggaggagagaccccagatcagaggcgccgagctggagtacgagagcctgaagagacaggagctggagagcgagaacaagaagctgaagaacgagctgaacgagctgagaaaggccctgagcgagaagagcgcccccgaggtgaccgcccccggcgcccccgcctacagagtgctgatggagcagctgaccagcgtgagcgaggagctggacgtgagaaaggaggaggtgctgatcctgagaagccagctggtgagccagaaggaggccatccagcccaaggacgacaagaacaccatgaccgacagcaccatcctgctggaggacgtgcagaagatgaaggacaagggcgagatcgcccaggcctacatcggcctgaaggagaccaacagactgctggagagccagctgcagagccagaagagaagccacgagaacgaggccgaggccctgagaggcgagatccagagcctgaaggaggagaacaacagacagcagcagctgctggcccagaacctgcagctgccccccgaggccagaatcgaggccagcctgcagcacgagatcaccagactgaccaacgagaacctggacctgatggagcagctggagaagcaggacaagaccgtgagaaagctgaagaagcagctgaaggtgttcgccaagaagatcggcgagctggaggtgggccagatggagaacatcagccccggccagatcatcgacgagcccatcagacccgtgaacatccccagaaaggagaaggacttccagggcatgctggagtacaagaaggaggacgagcagaagctggtgaagaacctgatcctggagctgaagcccagaggcgtggccgtgaacctgatccccggcctgcccgcctacatcctgttcatgtgcgtgagacacgccgactacctgaacgacgaccagaaggtgagaagcctgctgaccagcaccatcaacagcatcaagaaggtgctgaagaagagaggcgacgacttcgagaccgtgagcttctggctgagcaacacctgcagattcctgcactgcctgaagcagtacagcggcgaggagggcttcatgaagcacaacaccagcagacagaacgagcactgcctgaccaacttcgacctggccgagtacagacaggtgctgagcgacctggccatccagatctaccagcagctggtgagagtgctggagaacatcctgcagcccatgatcgtgagcggcatgctggagcacgagaccatccagggcgtgagcggcgtgaagcccaccggcctgagaaagagaaccagcagcatcgccgacgagggcacctacaccctggacagcatcctgagacagctgaacagcttccacagcgtgatgtgccagcacggcatggaccccgagctgatcaagcaggtggtgaagcagatgttctacatcatcggcgccatcaccctgaacaacctgctgctgagaaaggacatgtgcagctggagcaagggcatgcagatcagatacaacgtgagccagctggaggagtggctgagagacaagaacctgatgaacagcggcgccaaggagaccctggagcccctgatccaggccgcccagctgctgcaggtgaagaagaagaccgacgacgacgccgaggccatctgcagcatgtgcaacgccctgaccaccgcccagatcgtgaaggtgctgaacctgtacacccccgtgaacgagttcgaggagagagtgagcgtgagcttcatcagaaccatccagatgagactgagagacagaaaggacagcccccagctgctgatggacgccaagcacatcttccccgtgaccttccccttcaaccccagcagcctggccctggagaccatccagatccccgccagcctgggcctgggcttcatcagcagagtgtag

SEQ ID NO: 53765 - DNA, 4089 bp, Artificial Sequence
  derived and/or modified sequence
atgcacgtgttcaagctggagcaggaggagtacatgaaggagcagatcccctggaccctgatcgacttctacgacaaccagccctgcatcaacctgatcgagagcaagctgggcatcctggacctgctggacgaggagtgcaagatgcccaagggcaccgacgacacctgggcccagaagctgtacaacacccacctgaacaagtgcgccctgttcgagaagcccagactgagcaacaaggccttcatcatccagcacttcgccgacaaggtggagtaccagtgcgagggcttcctggagaagaacaaggacaccgtgttcgaggagcagatcaaggtgctgaagagcagcaagttcaagatgctgcccgagctgttccaggacgacgagaaggccatcagccccaccagcgccaccagcagcggcagaacccccctgaccagaacccccgccaagcccaccaagggcagacccggccagatggccaaggagcacaagaagaccgtgggccaccagttcagaaacagcctgcacctgctgatggagaccctgaacgccaccaccccccactacgtgagatgcatcaagcccaacgacttcaagttccccttcaccttcgacgagaagagagccgtgcagcagctgagagcctgcggcgtgctggagaccatcagaatcagcgccgccggcttccccagcagatggacctaccaggagttcttcagcagatacagagtgctgatgaagcagaaggacgtgctgagcgacagaaagcagacctgcaagaacgtgctggagaagctgatcctggacaaggacaagtaccagttcggcaagaccaagatcttcttcagagccggccaggtggcctacctggagaagctgagagccgacaagctgagagccgcctgcatcagaatccagaagaccatcagaggctggctgctgagaaagaagtacctgagaatgagaaaggccgccatcaccatgcagagatacgtgagaggctaccaggccagatgctacgccaagttcctgagaagaaccaaggccgccaccatcatccagaagtactggagaatgtacgtggtgagaagaagatacaagatcagaagagccgccaccatcgtgctgcagagctacctgagaggcttcctggccagaaacagatacagaaagatcctgagagagcacaaggccgtgatcatccagaagagagtgagaggctggctggccagaacccactacaagagaagcatgcacgccatcatctacctgcagtgctgcttcagaagaatgatggccaagagagagctgaagaagctgaagatcgaggccagaagcgtggagagatacaagaagctgcacatcggcatggagaacaagatcatgcagctgcagagaaaggtggacgagcagaacaaggactacaagtgcctggtggagaagctgaccaacctggagggcatctacaacagcgagaccgagaagctgagaagcgacctggagagactgcagctgagcgaggaggaggccaaggtggccaccggcagagtgctgagcctgcaggaggagatcgccaagctgagaaaggacctggagcagaccagaagcgagaagaagtgcatcgaggagcacgccgacagatacaagcaggagaccgagcagctggtgagcaacctgaaggaggagaacaccctgctgaagcaggagaaggaggccctgaaccacagaatcgtgcagcaggccaaggagatgaccgagaccatggagaagaagctggtggaggagaccaagcagctggagctggacctgaacgacgagagactgagataccagaacctgctgaacgagttcagcagactggaggagagatacgacgacctgaaggaggagatgaccctgatggtgcacgtgcccaagcccggccacaagagaaccgacagcacccacagcagcaacgagagcgagtacatcttcagcagcgagatcgccgagatggaggacatccccagcagaaccgaggagcccagcgagaagaaggtgcccctggacatgagcctgttcctgaagctgcagaagagagtgaccgagctggagcaggagaagcaggtgatgcaggacgagctggacagaaaggaggagcaggtgctgagaagcaaggccaaggaggaggagagaccccagatcagaggcgccgagctggagtacgagagcctgaagagacaggagctggagagcgagaacaagaagctgaagaacgagctgaacgagctgagaaaggccctgagcgagaagagcgcccccgaggtgaccgcccccggcgcccccgcctacagagtgctgatggagcagctgaccagcgtgagcgaggagctggacgtgagaaaggaggaggtgctgatcctgagaagccagctggtgagccagaaggaggccatccagcccaaggacgacaagaacaccatgaccgacagcaccatcctgctggaggacgtgcagaagatgaaggacaagggcgagatcgcccaggcctacatcggcctgaaggagaccaacagactgctggagagccagctgcagagccagaagagaagccacgagaacgaggccgaggccctgagaggcgagatccagagcctgaaggaggagaacaacagacagcagcagctgctggcccagaacctgcagctgccccccgaggccagaatcgaggccagcctgcagcacgagatcaccagactgaccaacgagaacctggacctgatggagcagctggagaagcaggacaagaccgtgagaaagctgaagaagcagctgaaggtgttcgccaagaagatcggcgagctggaggtgggccagatggagaacatcagccccggccagatcatcgacgagcccatcagacccgtgaacatccccagaaaggagaaggacttccagggcatgctggagtacaagaaggaggacgagcagaagctggtgaagaacctgatcctggagctgaagcccagaggcgtggccgtgaacctgatccccggcctgcccgcctacatcctgttcatgtgcgtgagacacgccgactacctgaacgacgaccagaaggtgagaagcctgctgaccagcaccatcaacagcatcaagaaggtgctgaagaagagaggcgacgacttcgagaccgtgagcttctggctgagcaacacctgcagattcctgcactgcctgaagcagtacagcggcgaggagggcttcatgaagcacaacaccagcagacagaacgagcactgcctgaccaacttcgacctggccgagtacagacaggtgctgagcgacctggccatccagatctaccagcagctggtgagagtgctggagaacatcctgcagcccatgatcgtgagcggcatgctggagcacgagaccatccagggcgtgagcggcgtgaagcccaccggcctgagaaagagaaccagcagcatcgccgacgagggcacctacaccctggacagcatcctgagacagctgaacagcttccacagcgtgatgtgccagcacggcatggaccccgagctgatcaagcaggtggtgaagcagatgttctacatcatcggcgccatcaccctgaacaacctgctgctgagaaaggacatgtgcagctggagcaagggcatgcagatcagatacaacgtgagccagctggaggagtggctgagagacaagaacctgatgaacagcggcgccaaggagaccctggagcccctgatccaggccgcccagctgctgcaggtgaagaagaagaccgacgacgacgccgaggccatctgcagcatgtgcaacgccctgaccaccgcccagatcgtgaaggtgctgaacctgtacacccccgtgaacgagttcgaggagagagtgagcgtgagcttcatcagaaccatccagatgagactgagagacagaaaggacagcccccagctgctgatggacgccaagcacatcttccccgtgaccttccccttcaaccccagcagcctggccctggagaccatccagatccccgccagcctgggcctgggcttcatcagcagagtgtag

SEQ ID NO: 53766 - DNA, 4377 bp, Artificial Sequence
  derived and/or modified sequence
atgtgccactggctgtgccacagaaagctggccaccgccaccgagacctacatcaagcccatcagcaagctgcaggccaccaacgccagagacgccctggccaagcacatctacgccaagctgttcaactggatcgtggacaacgtgaaccaggccctgcacagcgccgtgaagcagcacagcttcatcggcgtgctggacatctacggcttcgagaccttcgagatcaacagcttcgagcagttctgcatcaactacgccaacgagaagctgcagcagcagttcaacatgcacgtgttcaagctggagcaggaggagtacatgaaggagcagatcccctggaccctgatcgacttctacgacaaccagccctgcatcaacctgatcgagagcaagctgggcatcctggacctgctggacgaggagtgcaagatgcccaagggcaccgacgacacctgggcccagaagctgtacaacacccacctgaacaagtgcgccctgttcgagaagcccagactgagcaacaaggccttcatcatccagcacttcgccgacaaggtggagtaccagtgcgagggcttcctggagaagaacaaggacaccgtgttcgaggagcagatcaaggtgctgaagagcagcaagttcaagatgctgcccgagctgttccaggacgacgagaaggccatcagccccaccagcgccaccagcagcggcagaacccccctgaccagaacccccgccaagcccaccaagggcagacccggccagatggccaaggagcacaagaagaccgtgggccaccagttcagaaacagcctgcacctgctgatggagaccctgaacgccaccaccccccactacgtgagatgcatcaagcccaacgacttcaagttccccttcaccttcgacgagaagagagccgtgcagcagctgagagcctgcggcgtgctggagaccatcagaatcagcgccgccggcttccccagcagatggacctaccaggagttcttcagcagatacagagtgctgatgaagcagaaggacgtgctgagcgacagaaagcagacctgcaagaacgtgctggagaagctgatcctggacaaggacaagtaccagttcggcaagaccaagatcttcttcagagccggccaggtggcctacctggagaagctgagagccgacaagctgagagccgcctgcatcagaatccagaagaccatcagaggctggctgctgagaaagaagtacctgagaatgagaaaggccgccatcaccatgcagagatacgtgagaggctaccaggccagatgctacgccaagttcctgagaagaaccaaggccgccaccatcatccagaagtactggagaatgtacgtggtgagaagaagatacaagatcagaagagccgccaccatcgtgctgcagagctacctgagaggcttcctggccagaaacagatacagaaagatcctgagagagcacaaggccgtgatcatccagaagagagtgagaggctggctggccagaacccactacaagagaagcatgcacgccatcatctacctgcagtgctgcttcagaagaatgatggccaagagagagctgaagaagctgaagatcgaggccagaagcgtggagagatacaagaagctgcacatcggcatggagaacaagatcatgcagctgcagagaaaggtggacgagcagaacaaggactacaagtgcctggtggagaagctgaccaacctggagggcatctacaacagcgagaccgagaagctgagaagcgacctggagagactgcagctgagcgaggaggaggccaaggtggccaccggcagagtgctgagcctgcaggaggagatcgccaagctgagaaaggacctggagcagaccagaagcgagaagaagtgcatcgaggagcacgccgacagatacaagcaggagaccgagcagctggtgagcaacctgaaggaggagaacaccctgctgaagcaggagaaggaggccctgaaccacagaatcgtgcagcaggccaaggagatgaccgagaccatggagaagaagctggtggaggagaccaagcagctggagctggacctgaacgacgagagactgagataccagaacctgctgaacgagttcagcagactggaggagagatacgacgacctgaaggaggagatgaccctgatggtgcacgtgcccaagcccggccacaagagaaccgacagcacccacagcagcaacgagagcgagtacatcttcagcagcgagatcgccgagatggaggacatccccagcagaaccgaggagcccagcgagaagaaggtgcccctggacatgagcctgttcctgaagctgcagaagagagtgaccgagctggagcaggagaagcaggtgatgcaggacgagctggacagaaaggaggagcaggtgctgagaagcaaggccaaggaggaggagagaccccagatcagaggcgccgagctggagtacgagagcctgaagagacaggagctggagagcgagaacaagaagctgaagaacgagctgaacgagctgagaaaggccctgagcgagaagagcgcccccgaggtgaccgcccccggcgcccccgcctacagagtgctgatggagcagctgaccagcgtgagcgaggagctggacgtgagaaaggaggaggtgctgatcctgagaagccagctggtgagccagaaggaggccatccagcccaagctgcacgagaacaccatgaccgacagcaccatcctgctggaggacgtgcagaagatgaaggacaagggcgagatcgcccaggcctacatcggcctgaaggagaccaacagactgctggagagccagctgcagagccagaagagaagccacgagaacgaggccgaggccctgagaggcgagatccagagcctgaaggaggagaacaacagacagcagcagctgctggcccagaacctgcagctgccccccgaggccagaatcgaggccagcctgcagcacgagatcaccagactgaccaacgagaacctggacctgatggagcagctggagaagcaggacaagaccgtgagaaagctgaagaagcagctgaaggtgttcgccaagaagatcggcgagctggaggtgggccagatggagaacatcagccccggccagatcatcgacgagcccatcagacccgtgaacatccccagaaaggagaaggacttccagggcatgctggagtacaagaaggaggacgagcagaagctggtgaagaacctgatcctggagctgaagcccagaggcgtggccgtgaacctgatccccggcctgcccgcctacatcctgttcatgtgcgtgagacacgccgactacctgaacgacgaccagaaggtgagaagcctgctgaccagcaccatcaacagcatcaagaaggtgctgaagaagagaggcgacgacttcgagaccgtgagcttctggctgagcaacacctgcagattcctgcactgcctgaagcagtacagcggcgaggagggcttcatgaagcacaacaccagcagacagaacgagcactgcctgaccaacttcgacctggccgagtacagacaggtgctgagcgacctggccatccagatctaccagcagctggtgagagtgctggagaacatcctgcagcccatgatcgtgagcggcatgctggagcacgagaccatccagggcgtgagcggcgtgaagcccaccggcctgagaaagagaaccagcagcatcgccgacgagggcacctacaccctggacagcatcctgagacagctgaacagcttccacagcgtgatgtgccagcacggcatggaccccgagctgatcaagcaggtggtgaagcagatgttctacatcatcggcgccatcaccctgaacaacctgctgctgagaaaggacatgtgcagctggagcaagggcatgcagatcagatacaacgtgagccagctggaggagtggctgagagacaagaacctgatgaacagcggcgccaaggagaccctggagcccctgatccaggccgcccagctgctgcaggtgaagaagaagaccgacgacgacgccgaggccatctgcagcatgtgcaacgccctgaccaccgcccagatcgtgaaggtgctgaacctgtacacccccgtgaacgagttcgaggagagagtgagcgtgagcttcatcagaaccatccagatgagactgagagacagaaaggacagcccccagctgctgatggacgccaagcacatcttccccgtgaccttccccttcaaccccagcagcctggccctggagaccatccagatccccgccagcctgggcctgggcttcatcagcagagtgtag

SEQ ID NO: 53767 - protein, 263 aa, Artificial Sequence
  derived and/or modified sequence
MENLKHIITLGQVIHKRCEEMKYCKKQCRRLGHRVLGLIKPLEMLQDQGKRSVPSEKLTTAMNRFKAALEEANGEIEKFSNRSNICRFLTASQDKILFKDVNRKLSDVWKELSLLLQVEQRMPVSPISQGASWAQEDQQDADEDRRAFQMLRRDNEKIEASLRRLEINMKEIKETLRQSLESSSGKSPLEISRFKVKNVKTGSASGCNSEKIRKLVAVKRQQEPLGEDCPSELREIIDECRAHDPSVRPSVDEILKKLSTFSK

SEQ ID NO: 53768 - DNA, 792 bp, Artificial Sequence
  derived and/or modified sequence
atggagaacctgaagcacatcatcaccctgggccaggtgatccacaagagatgcgaggagatgaagtactgcaagaagcagtgcagaagactgggccacagagtgctgggcctgatcaagcccctggagatgctgcaggaccagggcaagagaagcgtgcccagcgagaagctgaccaccgccatgaacagattcaaggccgccctggaggaggccaacggcgagatcgagaagttcagcaacagaagcaacatctgcagattcctgaccgccagccaggacaagatcctgttcaaggacgtgaacagaaagctgagcgacgtgtggaaggagctgagcctgctgctgcaggtggagcagagaatgcccgtgagccccatcagccagggcgccagctgggcccaggaggaccagcaggacgccgacgaggacagaagagccttccagatgctgagaagagacaacgagaagatcgaggccagcctgagaagactggagatcaacatgaaggagatcaaggagaccctgagacagagcctggagagcagcagcggcaagagccccctggagatcagcagattcaaggtgaagaacgtgaagaccggcagcgccagcggctgcaacagcgagaagatcagaaagctggtggccgtgaagagacagcaggagcccctgggcgaggactgccccagcgagctgagagagatcatcgacgagtgcagagcccacgaccccagcgtgagacccagcgtggacgagatcctgaagaagctgagcaccttcagcaagtag

SEQ ID NO: 53769 - DNA, 792 bp, Artificial Sequence
  derived and/or modified sequence
atggagaatttaaagcacattataacacttggacaagttatacacaaaaggtgcgaggagatgaagtattgcaaaaagcagtgccggcggctggggcaccgcgtcctcggcctgattaaacctctggaaatgctgcaggatcagggtaagcgctccgttcctagtgaaaagctcaccactgctatgaatcgcttcaaagctgccctggaggaggctaacggggagattgaaaagttctccaacaggtccaatatctgtagatttctcactgccagccaggacaagattctcttcaaagacgttaatagaaagctgtccgatgtatggaaggaactatcactgctgcttcaggttgagcagaggatgcccgtgtccccaatttcacagggagctagctgggctcaggaagaccaacaagacgccgatgaagatcggcgagcctttcagatgttgcggcgcgataacgagaaaatcgaagcctccctgagacgactggagattaacatgaaggaaattaaagagacactgcgacagtcactggagtcctccagcggcaagtctcccctcgagatatcaaggttcaaggtaaaaaatgtgaagacaggctccgcaagcgggtgcaattccgagaagatccggaaactagtggcggtgaagaggcagcaggagccactgggcgaggattgcccaagcgagctgagagagattatcgatgaatgtagggcacacgacccgtcagtgcggccgtccgttgatgaaatcctaaaaaaactgagtacattctctaagtag

SEQ ID NO: 53770 - DNA, 792 bp, Artificial Sequence
  derived and/or modified sequence
atggagaacctgaagcacatcatcaccctgggccaggtgatccacaagagatgtgaggagatgaagtactgcaagaagcagtgccggcggctgggccaccgggtgctgggcctcatcaagcccctggagatgctgcaggaccagggcaagaggtctgtgcccagcgagaagctgaccacagccatgaaccgcttcaaggccgccctggaggaggccaatggagaaattgagaagttcagcaacagaagcaacatctgccgcttcctgacagccagccaggacaagatcctcttcaaggatgtgaacaggaagctgagtgatgtgtggaaggagctgagcctgctgctgcaggtggagcagaggatgcctgtgagccccatcagccagggcgcctcctgggcccaggaggaccagcaggatgctgatgaagatagaagagccttccagatgctgcggcgggacaatgagaagattgaggccagcctgcggcggctggagatcaacatgaaggagatcaaggagaccctgcggcagagcctggagagcagcagcggcaagagccccctggagatcagccgcttcaaggtgaagaatgtgaagacaggcagcgccagcggctgcaacagcgagaagatcaggaagctggtggccgtgaagaggcagcaggagcccctgggggaggactgccccagcgagctgcgggagatcattgatgaatgtcgggcccatgaccccagcgtgcggcccagcgtggatgagatcctgaagaagctgagcaccttcagcaagtag

SEQ ID NO: 53771 - DNA, 792 bp, Artificial Sequence
  derived and/or modified sequence
atggagaacctgaagcacatcatcaccctgggccaggtgatccacaaaagatgtgaggagatgaagtactgtaaaaagcaatgcaggagactggggcatcgcgtgcttggcttaataaaacctttggagatgctacaggatcagggtaagaggtccgtcccaagcgaaaaactcaccacggccatgaacagattcaaagcagccctagaggaggcaaacggggagattgaaaagttcagcaacagatctaacatctgcaggtttctgacagctagccaggacaaaattctgttcaaggacgtgaaccgcaagctgagcgacgtgtggaaagaactgtcgctccttcttcaggtggagcagcgcatgcctgtatcccccatctctcaaggggccagttgggctcaagaggatcagcaggatgcagacgaagaccgtcgggcttttcagatgttacgccgggataatgagaagatagaggctagcttgaggagactggaaatcaacatgaaagaaattaaagagactctgcggcagtccctggagtcatctagcggcaaatccccactggagataagccgcttcaaagtcaagaacgtcaaaaccggatcggcttccgggtgcaattcagagaaaatccgcaaattagtagctgtgaagcgtcagcaggaacctttgggtgaggactgcccatcggagctcagagagatcatcgacgagtgccgcgcccacgatccaagcgtgaggccgtctgttgacgagatcctcaaaaaactgagcactttcagcaaatag

SEQ ID NO: 53772 - DNA, 1880 bp, Artificial Sequence
  derived and/or modified sequence
agaaagcggctccagggagccagggcaccgtgagcctggtggttggcagctggagccacgtcggagggggaagtgtcgcagcattctctgcaggcatcacagacctgaggcagtggcctccggagggcactggacagaaacagccatccaagtggctgagtggagggaccctgctcaagtgcagctgcagtggccggggtttccctcaggtagggatcggggcgccttgtcgccgccagccacgtgtggcgtccggtacagtcagcagagtgcagggtgcgggcaccaggaaagggggcgcaggggaactcccgcgggcctcgcgtttgcaaacttctcgcctgggcaggaggcggtcgtgggaaagaaggtggaagagcgagctttttggaactgtgcacgggacagattggacgcacacccctcgggaggcgcgaaggcatggaaaatttgaagcatattatcacccttggccaggtcatccacaaacggtgtgaagagatgaaatactgcaagaaacagtgccggcgcctgggccaccgcgtcctcggcctgatcaagcctctggagatgctccaggaccaaggaaagaggagcgtgccctctgagaagttaaccacagccatgaaccgcttcaaggctgccctggaggaggctaatggggagatagaaaagttcagcaatagatccaatatctgcaggtttctaacagcaagccaggacaaaatactcttcaaggacgtgaacaggaagctgagtgatgtctggaaggagctctcgctgttacttcaggttgagcaacgcatgcctgtttcacccataagccaaggagcgtcctgggcacaggaagatcagcaggatgcagacgaagacaggcgagctttccagatgctaagaagagataatgaaaaaatagaagcttcactgagacgattagaaatcaacatgaaagaaatcaaggaaactttgaggcagtctttggaatcgtcctctgggaaatcgccactggagatatcccgtttcaaggtgaagaatgtgaagactggctcagccagtggctgtaattctgagaagatccgcaagctggtggctgtgaagcggcagcaggagccactgggtgaagactgcccttcagagctgcgggagatcattgatgagtgccgggcccatgatccctctgtgcggccctctgtggatgaaatcttaaagaaactctccaccttttctaagtagtgtatcaaaatctaaaccaaggagtctctggacaagaagctgggagaggcacaaactggacatctctctctctcatatccttcggcattgggttatctatgggtgcaaggagtgggcacgcttctctgttacaaatagaaaacgattccagtcatacaggacacatcccactccaaatgatatttccaaaaacatacctctgacagtaactttgatagatggtttgtcaaatgtatctttctgggtatccacacctcttggcaatgaaatttgcagctcctcccttccataaatgaagtctctttccccaccatttgaatctgggctggcactgtgacttgatttgatcaatagaatgtggaagaagtgactgtatgccagttccaagcctaggtttcaagaggccttataaatgtctgttggaaccttacccagccatgaacatgttgagtgagcatgctggagaatgagagaccacatgaagcagaaacatgctttcctagctgaagtcatactagcccaaccaacatggcagctaacacatgaatgaggccaatcaagaccagaagaaccactcaagcagatcccagcccaaattgcccattcacacaatcaggagctaaataaattactgttgtcttaacact

SEQ ID NO: 53773 - DNA, 792 bp, Artificial Sequence
  derived and/or modified sequence
atggagaatctcaaacatataatcactttagggcaagtgattcacaagcgatgcgaggaaatgaagtattgcaaaaaacaatgtagacgcctgggccacagagtgctgggtctcatcaaaccactcgagatgctgcaggatcagggcaaaagaagcgttccaagcgagaaactcactactgcgatgaacaggttcaaggctgcactggaggaggctaacggggaaatcgaaaaattttctaaccggtctaatatctgccgcttcctcacggcttctcaggataagatcctcttcaaggacgtgaatcgaaaactgtccgacgtctggaaggagctttcactgctcctccaggtcgagcaacgtatgccagttagtcccattagccagggggcatcttgggcgcaggaggaccagcaggatgcggatgaggacaggcgggctttccagatgctcaggcgcgacaacgagaaaatcgaagccagtttacggcgactggaaattaacatgaaagaaattaaggagaccctaaggcagtcactcgagtccagttccggtaagagccccttggagataagtagattcaaagtaaagaacgtgaaaactggctccgcctccggctgcaacagcgagaaaatccgaaagctcgtggccgtgaagaggcaacaggaacctctcggcgaagactgcccctccgagctccgggaaataatcgatgagtgccgcgctcatgacccgtccgttaggccctccgtggatgagatcctgaaaaaattaagcactttcagtaaatag

SEQ ID NO: 53774 - DNA, 1356 bp, Artificial Sequence
  derived and/or modified sequence
atgttcgacatcgagtacttccgcaaggacccccgccccttcttcaagttcgccaaggagatctaccccggccagttccagcccagcctgtgccacaagttcatcgccctgagcgacaaggagggcaagctgctgcgcaactacacccagaacatcgacaccctggagcaggtggccggcatccagcgcatcatccagtgccacggcagcttcgccaccgccagctgcctgatctgcaagtacaaggtggactgcgaggccgtgcgcggcgacatcttcaaccaggtggtgccccgctgcccccgctgccccgccgacgagcccctggccatcatgaagcccgagatcgtgttcttcggcgagaacctgcccgagcagttccaccgcgccatgaagtacgacaaggacgaggtggacctgctgatcgtgatcggcagcagcctgaaggtgcgccccgtggccctgatccccagcagcatcccccacgaggtgccccagatcctgatcaaccgcgagcccctgccccacctgcacttcgacgtggagctgctgggcgactgcgacgtgatcatcaacgagctgtgccaccgcctgggcggcgagtacgccaagctgtgctgcaaccccgtgaagctgagcgagatcaccgagaagcccccccgcacccagaaggagctggcctacctgagcgagctgccccccacccccctgcacgtgagcgaggacagcagcagccccgagcgcaccagcccccccgacagcagcgtgatcgtgaccctgctggaccaggccgccaagagcaacgacgacctggacgtgagcgagagcaagggctgcatggaggagaagccccaggaggtgcagaccagccgcaacgtggagagcatcgccgagcagatggagaaccccgacctgaagaacgtgggcagcagcaccggcgagaagaacgagcgcaccagcgtggccggcaccgtgcgcaagtgctggcccaaccgcgtggccaaggagcagatcagccgccgcctggacggcaaccagtacctgttcctgccccccaaccgctacatcttccacggcgccgaggtgtacagcgacagcgaggacgacgtgctgagcagcagcagctgcggcagcaacagcgacagcggcacctgccagagccccagcctggaggagcccatggaggacgagagcgagatcgaggagttctacaacggcctggaggacgagcccgacgtgcccgagcgcgccggcggcgccggcttcggcaccgacggcgacgaccaggaggccatcaacgaggccatcagcgtgaagcaggaggtgaccgacatgaactaccccagcaacaagagc

SEQ ID NO: 53775 - DNA, 1502 bp, Artificial Sequence
  derived and/or modified sequence
gggaaataagagagaaaagaagagtaagaagaaatataagagccaccatgtttgacattgagtattttcggaaagaccctaggccgttctttaagtttgccaaagaaatctaccctgggcagttccagcccagcctttgccacaagtttatcgccttgtcggataaagagggaaaattgcttaggaactacacccagaacatcgatacgttggaacaggtcgcagggatccagaggatcatccagtgccacgggtcatttgctactgcatcctgtctcatttgtaagtacaaagtggattgtgaggcggtgcggggagatatctttaatcaagtcgtaccccgatgccctcgctgcccagcggacgaaccattggcgatcatgaagcccgaaatcgtctttttcggcgaaaatctcccagagcagttccatcgcgccatgaagtatgacaaggatgaagtggacttgctgatcgtcatcggctcgtcactgaaagtaagacccgtagcgttgattccctcgtcaattccccatgaggtgcctcaaattctgattaacagggagccccttccccatctccacttcgatgtcgagcttttgggggactgtgacgtcatcattaacgaactgtgtcaccgacttggaggggaatatgcgaaattgtgctgcaacccggtgaaattgtcggagattacagaaaaaccgcccagaacgcagaaagagctggcgtacctctccgagctgcccccgacccctctgcatgtgtcggaggacagctcctcgcccgaacggacctccccaccggactcatcggtcattgtgacgctccttgaccaggcagcgaagtcgaatgatgatctggatgtaagcgagtcaaagggctgtatggaagagaagccccaagaagtgcaaacgtcgcgcaatgtggagtcaatcgccgaacaaatggagaaccctgacctcaaaaacgtaggatcgtcaacaggggaaaagaacgaacggacgtcggtggccggaacagtcagaaagtgctggcctaatagagtagccaaggagcagatctcgcggcgactggatgggaatcaataccttttccttcccccaaacaggtatatcttccacggagcggaggtatattcagattcggaggacgatgtattgtcatcatcgagctgtggatcaaactcggattcgggtacatgccagagcccctcgctcgaggagcctatggaggacgaaagcgagatcgaggagttctacaatggactcgaggacgagcctgacgtcccagaaagggcgggtggagcggggttcggtactgatggagatgaccaagaagcaattaacgaagccatctccgtgaagcaggaagtgacggatatgaactatccgtccaataagtcctgataagctgccttctgcggggcttgccttctggccatgcccttcttctctcccttgcacctgtacctcttggtctttgaataaagcctgagtaggaag

SEQ ID NO: 53776 - DNA, 1356 bp, Artificial Sequence
  derived and/or modified sequence
atgtttgacatcgaatattttcggaaagatccccggcctttcttcaagttcgccaaagaaatctatccaggacagttccaaccttccctgtgtcacaaattcattgcactgagcgataaggagggcaagctcctgaggaactacactcagaatattgatacactggaacaggtggctggcattcagcggattattcagtgccatgggtcatttgccaccgctagctgcctgatctgtaagtacaaggtcgactgtgaggccgtgagaggagacatatttaaccaggtcgtcccacgatgtccaaggtgtcccgccgacgagccactagccatcatgaagccagaaatcgtgttttttggggaaaatctgcccgagcagttccacagagcaatgaaatatgacaaggatgaggttgatttactgattgtcattggttcttcgttgaaggtgcgacccgtagccctgatcccctcttctatcccgcacgaggtgccccaaatactgattaacagagaacccctcccacacctgcattttgacgtggagctactgggagactgcgatgtcattattaacgagctttgtcatagactgggaggggagtacgctaagttgtgttgcaaccccgtgaagttatcagaaataaccgagaaacctcctcggactcagaaggagcttgcttacctctctgagcttcctccaactccgttgcacgtttccgaggatagcagttcccctgagcggaccagccctcccgacagctcagtgatcgttactcttctcgaccaggctgcaaagtccaacgatgatctggatgtgagtgagtctaaaggctgcatggaagaaaagccacaagaagtgcaaaccagcagaaacgttgagtctatcgcggagcaaatggagaatcctgatttgaagaatgttgggtcttccaccggtgagaagaatgagcgtacttccgtagcaggcacggtaaggaagtgctggcccaaccgcgtcgctaaagagcagatctcgagacgcttggatggaaaccaatacctgtttttgcctcccaacaggtatatttttcatggggctgaagtgtactctgattccgaagatgacgtactgtctagtagtagttgtggttcaaattccgatagcggaacttgtcagagcccaagtctggaggaacctatggaggatgaatccgagatcgaagaattttacaacgggttggaggacgaaccggacgttccggagcgcgccgggggtgccgggttcgggaccgacggcgacgatcaggaggccattaacgaggccatatctgtgaaacaggaagttaccgacatgaactacccttccaataaatcc

SEQ ID NO: 53777 - DNA, 1356 bp, Artificial Sequence
  derived and/or modified sequence
atgtttgacatagaatacttccgtaaggacccgaggccctttttcaaatttgcaaaggagatttaccctggacagttccagccttcactgtgtcacaagtttatcgctctttccgataaagaagggaaacttctgcgcaattacactcagaatattgacaccctggaacaggtggcaggtattcaaagaatcattcaatgccatggttctttcgcgaccgcatcttgtctgatctgcaagtacaaggtggactgcgaggccgtgagaggtgatatctttaaccaggttgtccctagatgtcctagatgccctgcggacgagcctctggcaatcatgaagcccgaaattgtgtttttcggagaaaacctgccagagcagtttcaccgagctatgaaatacgataaagacgaagttgatttgctcattgtcattgggtcgtccctgaaggtccgtccggtggccctcattccctcaagcatcccgcatgaagttccacaaattctgatcaacagggaacctcttccacaccttcactttgatgtggagctgcttggagattgtgacgtcataatcaacgaactgtgtcatcggcttggaggtgagtacgccaagctgtgctgtaacccagtcaagttgtcagaaattactgaaaaacctcctaggactcagaaagaactggcctacctcagtgagcttccccctactccacttcatgtgagtgaagatagctcttcgcccgaaagaacctcccctcccgactcgtcagtcatcgtgaccttgcttgatcaggcggcaaagagcaacgatgacctcgatgtgtcagaatccaagggctgtatggaggaaaagccccaagaggtccaaacctcccgaaacgtcgagtccatagctgagcaaatggaaaaccctgatctgaaaaacgtgggttcatcaacgggagagaagaacgagcgtaccagcgtcgcaggcaccgtgcggaagtgttggccaaacagggtggcaaaggaacagatttcccgacggcttgatggaaatcaatacttgtttttgccgcccaatcggtacatatttcatggtgccgaagtgtattccgattccgaggacgatgtcctttcttcatcgtcttgtgggagcaattccgattcgggaacttgccaatcaccttcccttgaagagcctatggaggatgaatcagagatcgaagagttctacaacgggcttgaagatgaaccagatgtgcctgaacgggcaggtggtgcaggctttggtactgacggcgatgatcaggaagcgatcaatgaagcaatttccgtcaagcaagaggtcacggacatgaactacccgtccaacaaatcc

SEQ ID NO: 53778 - DNA, 1356 bp, Artificial Sequence
  derived and/or modified sequence
atgtttgacatagagtattttcggaaagacccgcgcccattctttaaattcgcaaaagagatttatcctggacagttccagcccagtctgtgccacaagttcattgccctttccgataaagaaggtaagctactgcgcaactacacacagaacatagacaccctggagcaggtggccggcatccagagaattattcagtgtcacggctcttttgcaacagcctcgtgccttatctgcaagtataaggtagattgcgaggccgtaaggggcgatatcttcaaccaggtggtccctcggtgccccaggtgtcccgctgacgagcccctggcaatcatgaagcctgagatagtctttttcggcgagaacttacccgagcaatttcaccgcgcgatgaagtatgacaaggatgaggtcgatctactcatagtaattggctctagccttaaggtgcgccctgtggcgctgatcccaagttctattccccatgaggtgccccaaatccttatcaatagagaaccattaccgcacctccactttgacgtggagctcctgggagactgtgatgttataataaatgagttatgccataggctcgggggtgagtacgctaagctatgctgtaatcccgtgaagctctccgagattactgagaagccccctcggacccagaaggagctcgcgtacctcagcgagcttcccccgacacccctacacgtgagcgaggatagttcctctccagaacggacctctccccctgacagctctgtgattgttacactcttggaccaggccgcgaagagcaacgatgatcttgatgtctccgagtccaaagggtgtatggaggaaaagccacaggaagtgcaaacctcacgcaatgtagaatccatcgcagaacagatggagaatccagacctaaaaaatgttggctcgagtaccggagagaaaaacgagaggacttccgtggctggcactgtcagaaaatgttggccaaatagggttgccaaggagcagatttctcgtcgtctggacgggaaccagtacttgtttctccccccgaatcgttatatattccacggggccgaagtctatagtgacagtgaggatgatgtgctgtcaagcagttcatgcggctctaattccgactccgggacctgccagagtccgtcacttgaggaaccgatggaagacgagtctgaaatcgaggagttctacaatggattggaagacgagccagatgtcccagaacgtgccggcggggctggcttcggcacagacggtgacgatcaggaagcaattaacgaggcaatttcggtgaagcaggaagtaactgacatgaactatccatcgaataagtca

SEQ ID NO: 53779 - DNA, 1356 bp, Artificial Sequence
  derived and/or modified sequence
atgttcgatattgagtacttcagaaaggaccccaggcctttctttaagttcgcgaaggaaatctatccgggacagttccagccgtccctgtgccataagtttattgccttgagcgacaaggaggggaaacttctgaggaattacacccaaaacatcgacactctggaacaggtggcaggaatccaacgcatcatacagtgccacggatcgttcgcgactgcgagctgcttgatctgcaagtacaaagtggactgcgaggctgtcaggggggatatcttcaatcaggtcgtgccacggtgtccccggtgtccggcggacgagcccctcgctatcatgaaaccggagatagtgtttttcggagaaaacctcccagaacaattccacagagcaatgaaatacgataaagacgaagttgacctgctgatcgtgatcgggtcatcattgaaagtccgcccggtcgccttgatcccctcgtcgattcctcatgaagtgcctcaaatccttatcaatcgcgagccgctgccgcacctgcatttcgatgtcgagctgttgggcgattgcgatgtgatcatcaatgagctgtgtcacagactcggtggtgagtacgcaaaattgtgctgcaacccggtgaagctgagcgaaattaccgagaagcctcctcgcacccagaaggaactcgcatacctgagtgaactgccgccaaccccactccacgtgtcggaggattcctcttccccagaaagaacctcacctccagacagctcagtcattgtgaccctgctggaccaggccgccaagtcgaacgacgacctggatgtgtccgaaagtaagggatgtatggaggaaaagccgcaagaggtacagacgtcgagaaatgttgaaagcatcgccgaacaaatggaaaatccggacctgaagaacgttggaagcagcactggggagaaaaacgagcggacctccgtcgccggtactgtccgcaaatgctggcctaaccgcgtggcaaaggagcaaatctcgcggcgtctggacggaaaccagtacctgttcctgcctccgaaccgctacatcttccatggcgctgaggtgtactccgactcagaggacgatgtactgtcctcctcttcgtgcggatccaattcagactcgggaacttgccagagcccgtcgctcgaagaacccatggaggatgaatccgaaatcgaagagttttacaacggactcgaagatgaacctgatgtgccagagcgggccggaggggcgggctttggtaccgatggagatgaccaggaagcgatcaacgaggcgatctcggtcaagcaggaggtgactgacatgaactacccaagcaacaagtcc

SEQ ID NO: 53780 - DNA, 1356 bp, Artificial Sequence
  derived and/or modified sequence
atgttcgacatcgaatacttcaggaaggatccaagaccgtttttcaagttcgccaaggagatctacccaggacaatttcagccgtcattgtgccataagttcatcgccctttccgacaaggagggcaaattgctgcgcaactacacccaaaacatcgataccctggagcaagtcgccgggatccaacgaatcatccaatgccacggatcgtttgctaccgccagctgcctgatttgcaaatacaaagtggattgcgaagccgtgagaggcgacatcttcaaccaggtggtcccacgctgtcctcgctgcccggcggacgagcccctggctatcatgaagccagaaatcgtgttcttcggtgaaaaccttcctgaacagttccatagggcgatgaaatacgacaaggacgaggtcgacctgctcatcgtgattgggtcatcgctcaaagtgcgtccggtcgcactgatcccgtcatcgatcccgcatgaagtgccacagatcctgatcaaccgcgagcctctgccacatctgcattttgatgtggaactgctcggagactgcgatgtgattatcaatgaactttgccataggctgggaggtgagtacgcaaagctctgctgcaaccctgtgaagttgtcggaaattactgaaaagccgccgcgcacccagaaggaactggcgtacctgtcagaattgccgccaacgccgctgcacgtgtcggaagattcctcctccccggaaagaacgtctccgcctgatagctcggtcatcgtgactctccttgatcaggccgcgaagtcgaacgatgatctggatgtgtcggagtcgaagggatgcatggaggaaaagccgcaggaagtgcagaccagccggaatgtggagtcgatcgctgagcagatggagaacccggatctgaagaacgtgggatcctcgaccggggaaaagaatgaaagaacttcggtggcaggcaccgtgcgcaagtgctggccgaatcgcgtcgccaaagaacagatctccagacggctggatggcaaccagtacttgttcctgccgcctaatcgctacatcttccacggtgccgaggtgtactccgactcagaagatgacgtgctgtcctcatcaagctgtggctcgaacagcgattccgggacctgccagtccccatcgctggaggaaccaatggaagatgaaagtgaaatcgaggagttctacaacggcctcgaagatgaaccagacgtgccggagcgggccggaggagctggattcggaaccgacggagacgatcaggaagcgatcaacgaagccataagcgtgaagcaggaagtgactgacatgaactacccgtcgaacaagtcg

SEQ ID NO: 53781 - DNA, 1356 bp, Artificial Sequence
  derived and/or modified sequence
atgtttgacatcgagtattttaggaaagatccgcgcccatttttcaagtttgcgaaagagatttatcccggtcagttccaaccgagtctgtgccacaagtttatagctcttagtgacaaggagggaaaactgttacgcaactatacccagaacattgacacccttgaacaagtagcaggtattcaacggatcatacagtgccatggctctttcgccaccgccagctgcctgatctgcaagtataaagtcgattgtgaggccgtgcgaggcgatatcttcaaccaggttgtgcctcgctgtccccgctgccctgctgatgaaccacttgccatcatgaaaccagaaatcgtttttttcggagaaaacttgcctgaacagttccatcgggcgatgaagtatgacaaggacgaagtggacttattaattgttatcgggtcttccttgaaagtgcggccggtcgctcttattccgagtagtatcccgcacgaggtacctcagatactcataaaccgtgaacccctcccacacttgcattttgacgtagagctactcggagattgtgatgttattattaacgaattgtgccaccggctgggcggagagtacgcaaaattgtgctgtaacccagtgaagctcagtgaaatcactgagaagccacctcgcacgcagaaggaattagcttacttgagtgagctgcccccgacacctctgcatgtgtcggaagactcgtcaagtcccgagcggacgtccccgccggactcgtctgtgatcgtcacacttcttgatcaagccgctaaatcgaacgatgatctagacgtttccgaaagtaagggttgcatggaggaaaagccacaagaggtgcagacatcaaggaacgttgagtcaatagccgaacaaatggaaaacccagacctgaagaacgttggaagctccaccggcgagaaaaacgagagaacgtctgttgcaggcacagttcgaaaatgctggcctaaccgtgttgcaaaggagcagatatcccgccggctagacggaaatcaatacctctttttaccacccaaccgctacatcttccacggcgctgaggtttactccgactcagaagatgatgtcctctcctcatcatcctgcgggtccaactccgatagcggcacttgccaatcaccaagcctggaagagcctatggaagacgagagcgagatagaggaattctataatgggctggaagacgaacctgatgtgcccgaaagggccgggggcgctggctttggcacggatggtgacgatcaagaggcaatcaatgaagcaatcagtgtgaagcaagaggtcacagatatgaactacccctccaataagtcc

SEQ ID NO: 53782 - DNA, 1356 bp, Artificial Sequence
  derived and/or modified sequence
atgtttgacattgaatatttccggaaagatcctcggcctttctttaaattcgccaaggagatttacccaggccagtttcagccctcactttgccacaagtttattgcactgtccgataaggaaggaaaattactgcgcaattatacccagaacatagatacgctggagcaggtggcagggattcagcggattatccagtgtcacggttcctttgctaccgccagttgccttatttgtaaatacaaagtcgattgcgaagctgtgagaggcgacatatttaatcaggtggtcccacgctgcccacgttgccccgccgacgagccactggctatcatgaaaccagaaattgtgtttttcggcgagaacctgcctgaacagtttcaccgggccatgaaatatgataaggatgaggtggatctgctgatcgtcataggatcatccctgaaggtccgaccggttgcgctcattccttcctccatccctcacgaagtgccgcagatacttattaaccgcgaacccttgccccacttgcatttcgatgtcgagttactcggggactgtgatgtgataatcaatgagctgtgtcacagactcggaggagagtatgctaaattatgttgtaatcctgttaaactgagcgagatcactgaaaaacctcctcgaacccagaaggaactggcctatctgagcgagctccctcctacccctctgcacgtgtcagaagactcaagttcacccgagcggactagccccccggactctagcgtaattgtgactctgctcgatcaagctgctaaatccaacgacgacttggacgtgtccgagagcaagggctgcatggaggaaaaaccccaggaagtccagacaagcagaaatgtcgagtcgattgccgagcagatggaaaatccagatctgaagaacgtggggagctctacaggagaaaagaatgaaagaacttctgtggcagggacggtgcggaagtgctggcctaaccgggtggctaaagagcagatctctcggcggttagatggaaatcagtatctcttcctcccccccaataggtacattttccacggggccgaagtctattccgattctgaagacgatgtccttagctcaagctcatgtggctccaactctgactcggggacttgtcaatctccttctctggaggagccgatggaggacgaatcagagattgaggaattctataacgggttagaggacgagccagacgtgcccgaaagggccgggggggctgggttcggaacagacggagatgaccaggaagctattaatgaagctatatctgttaagcaggaagttaccgatatgaattaccctagcaataagagc

SEQ ID NO: 53783 - DNA, 1356 bp, Artificial Sequence
  derived and/or modified sequence
atgttcgatatcgaatatttccgcaaagaccctcgccccttctttaaatttgccaaagaaatctacccagggcagtttcagccttctctctgccacaaatttattgctctcagtgataaggaaggaaaattactgcggaattacactcagaatatagatacacttgagcaggtggctggaatccagaggatcatccagtgccatggatcctttgctacagcctcatgtctgatatgtaaatataaagtggattgtgaagcagttcgtggagatatctttaaccaggtggtgccccgctgccctcggtgcccagctgatgagccactggcaataatgaaacctgaaattgttttttttggagaaaatctccctgagcagtttcatcgggccatgaaatatgataaagatgaagtggatctgctgatagtcatagggagttccctcaaagttaggcctgtggcccttattccgtcttccatccctcacgaggtgccccagattttaatcaatagagagcctcttcctcatcttcacttcgatgtcgaacttttgggagattgcgacgtgatcatcaatgaactgtgtcacagactagggggggagtatgctaaactgtgttgtaaccctgtgaagctatcggaaatcacagaaaaaccaccccgaactcagaaagaacttgcatatctgtccgaactgccccctacgcccctgcatgtgtccgaggattcaagttcgcctgagagaacttccccccctgattcatctgtgatcgtgacacttttagatcaggctgctaagtcgaatgatgatcttgatgtgtctgaatctaaagggtgcatggaggaaaaaccccaagaagtacagacatcccggaatgtggagtccatagcagagcagatggagaatcccgatctgaaaaacgtggggagttcaactggggaaaaaaatgaacgcacttctgttgctggaactgtcaggaaatgttggccaaatcgggttgcaaaagaacagatctctaggcgactcgatggaaatcagtacctcttcctgcctcccaacaggtatatcttccacggagctgaggtctactctgattctgaagatgatgtcctgtcctcctctagttgcggaagtaattctgattccggaacgtgtcagagtcctagtctcgaagaaccaatggaagatgaatccgaaattgaggaattctacaacgggctcgaagatgagcccgatgtgccagaaagagccgggggagccgggtttggaacagatggggacgaccaggaagctatcaatgaagctatatcagtcaagcaggaagttacagatatgaattatccttctaacaaatcc

SEQ ID NO: 53784 - DNA, 1356 bp, Artificial Sequence
  derived and/or modified sequence
atgtttgacattgagtattttaggaaagacccgcgaccgttcttcaaatttgcgaaagaaatttatccgggtcaattccagccgtcactatgccataaatttatagcgctgtcagacaaagagggtaagttattaagaaattatacacaaaatattgatactcttgagcaagttgctggaatccaacgcattattcaatgtcatggtagctttgccacagcttcatgtctgatttgtaagtataaagtggattgcgaagccgtacgcggcgacatttttaatcaagtggttccacgctgccctcgatgtcctgcagatgaacccttagccattatgaagccggaaatagtcttcttcggcgaaaatttaccggagcaatttcatcgcgccatgaaatatgataaggacgaagtggacctgcttatagtcataggatcctctttaaaagtccgcccggtagccttaataccgtcaagcattcctcatgaagtaccccagatcctcataaatcgtgaacctctgccgcaccttcattttgacgtggaattgttaggcgattgtgatgtcatcatcaacgaattgtgtcacagactagggggcgaatatgcaaaactctgctgcaaccctgtcaaactgtccgaaataacggaaaagcctccgcgcacacagaaggaattagcgtatttgagcgaactgccaccaaccccgcttcacgtctctgaagatagctcgtctccagaacggacaagtccgccggacagctctgtgattgtcacgttgttggatcaggcagctaaatccaacgatgatttagacgtcagcgaatctaaaggctgcatggaagagaaaccgcaagaagtgcagacaagtcgaaacgttgagagcattgcagagcaaatggagaatccggaccttaaaaacgtaggatcttctactggcgagaaaaatgagcggacctcagttgcggggacagtgcgcaaatgttggcctaaccgagtggctaaagaacagatttcccgcagattggacggaaatcagtatctctttctgccaccaaataggtatatatttcatggagccgaggtgtactctgattctgaggacgacgtgttatcaagttcttcatgtggatcaaacagtgattcaggtacgtgccaatcaccgtctttggaggagcccatggaagatgagagcgaaatcgaagaattctataatggcttggaagatgaaccagatgtgccggagagagcgggtggcgctggctttggaacagatggagacgaccaagaggcaattaatgaagctatcagcgtgaagcaagaagtcacggacatgaattatccttccaataaatcc

SEQ ID NO: 53785 - DNA, 1356 bp, Artificial Sequence
  derived and/or modified sequence
atgtttgacattgagtacttccggaaggaccccagacctttcttcaagttcgctaaagaaatttaccccgggcaattccagccatcactatgccacaaatttatcgccctttcagacaaagaggggaaactcctgcgaaattatacccagaacatcgacacattggaacaggtcgccggcatccaacgcattatacaatgtcatggcagcttcgctactgcctcttgcctgatctgcaagtataaggtggactgcgaagcagtgcgcggcgacattttcaatcaagtcgttcctcgctgtcccaggtgccccgcagatgaacccctcgccattatgaagcccgaaattgtgttctttggcgagaatctacccgagcagttccatagggcaatgaagtacgataaggatgaggtggatttactgatcgttataggatcatccctgaaggtgagaccggtagcactgattccttcctctatcccgcacgaggtgccccagatcctgataaacagggagccactaccgcacctgcattttgacgtggaattgctgggcgactgtgatgtgataataaacgaactgtgtcaccgcctggggggcgaatacgctaaactgtgctgcaacccagtgaagcttagcgagataactgagaagccacctcggactcagaaggaattggcctatcttagtgagcttcctcccacaccactgcatgtctccgaagatagcagcagccctgaacggacctccccacctgattcaagtgttattgttacactgctggatcaagcagctaaaagcaacgacgatttagacgtatccgagtcaaaaggctgtatggaggaaaagccacaagaagttcaaacatctagaaatgtggagagcatagcagagcagatggaaaatccggatctgaaaaacgtcggcagcagtacaggggaaaaaaatgagagaacatctgttgctggcactgtccggaaatgctggcctaaccgggtagccaaggaacagatcagtaggagactggatggtaaccagtacctgtttctgccaccgaataggtacatcttccatggagcagaggtgtacagcgacagcgaggacgacgtgctctccagctcctcttgtggatctaacagcgatagcgggacatgccagtcaccaagtttggaggaacccatggaggacgagagtgaaattgaggagttctacaatgggctcgaggatgaacccgatgttcctgagagagcaggtggtgcaggatttggcacagacggagatgaccaggaggcaatcaacgaagctataagcgtgaaacaggaggtgaccgacatgaactatccctctaacaaaagc

SEQ ID NO: 53786 - DNA, 1356 bp, Artificial Sequence
  derived and/or modified sequence
atgtttgatatcgagtacttcaggaaggacccacggccattctttaagttcgcaaaggagatttacccaggacaatttcaaccctcgctctgccataagttcatcgctctgtcagacaaagaaggaaaactgttgcgcaactacacccaaaacatcgacaccctggaacaagtggcagggatccagagaatcatccagtgccacgggagcttcgcaactgcatcatgcctcatctgcaagtacaaggtggactgcgaagcagttcgcggagatatcttcaaccaggtggtgcctagatgccctcgctgccctgccgacgagccgctggccatcatgaagccggagatcgtgttcttcggagagaacctcccggaacagttccatcgcgcaatgaaatacgacaaagatgaagtggacctgctgatcgtcatcggatcatcccttaaagtgcggccggtcgcgctgatcccgtcatccatccctcacgaagtgccgcagattctcatcaatcgagaacccctgccgcacctccactttgacgtagagctgctgggcgactgcgacgtcatcatcaacgagttgtgccatcggttgggcggagagtacgccaagctgtgctgtaaccctgtcaagctgtcagagatcaccgaaaagccaccgcggacgcaaaaggagctggcatacctctcggaactgccaccgactcccttgcacgtgagcgaggattcgtcgagcccggagcggacctcccctccggactccagcgtgatcgtcactctgctggaccaggccgccaagtcgaatgatgacctcgacgtgtcggaatcgaaaggttgcatggaggagaagccacaggaggtccagaccagccgcaacgtggaatccattgctgaacagatggaaaatccagacctcaagaacgtaggatcaagcaccggcgaaaagaatgagcggacttccgtggcggggactgtccggaagtgctggccaaacagagtcgcaaaggaacaaatctcccgccggttggacggcaaccaatacctcttcctccctcccaatcggtacatctttcacggcgccgaagtgtatagcgactcagaagatgatgtgctgtcctccagctcatgcggatcgaactccgattcggggacttgccagtcccctagcctggaagagccaatggaggacgaatcagaaatcgaggagttctacaatgggctcgaggatgagcccgatgtcccagaacgcgcgggaggagccggcttcggaaccgacggagacgaccaggaggcgatcaacgaagccatctcagtgaagcaagaggtcacggatatgaattacccatcgaacaagtcg

SEQ ID NO: 53787 - DNA, 1356 bp, Artificial Sequence
  derived and/or modified sequence
atgttcgacattgaatactttagaaaggaccccagaccctttttcaagtttgcaaaagagatttaccctgggcagttccagcctagcctttgtcacaaattcatcgccctttcggataaggaaggaaagctccttcggaactacacccagaacattgataccctggaacaagtggcagggattcagcgtataatccaatgccacggatcctttgcaaccgcgagctgtctcatctgcaagtacaaggtcgattgcgaagcagtgcgaggtgatatcttcaatcaggtggtgccccggtgtcctcggtgtccagcagatgaacctctggcaatcatgaaacctgaaatagtgttctttggtgaaaatctccctgaacaatttcatagggcgatgaagtacgataaggatgaagtggatttgttgatcgtcattggttcgtctctgaaagttcgacctgtggcacttataccaagctctatcccacatgaagtgcctcagatccttatcaacagagaacccctgccccatctgcattttgatgtggaactgttgggcgactgtgacgtgatcatcaacgagctgtgtcaccggctgggaggtgaatacgccaaactttgttgtaatcccgtgaagttgtccgaaattaccgagaaaccccctcggacccagaaggaactcgcatatctctcagagcttccaccaaccccacttcatgtctccgaggattcgtcaagcccagagcgtaccagccctccggactcgtcagtcatcgtgactctccttgatcaagcagcgaagtccaacgatgatctcgacgtgtcggaaagcaagggatgcatggaggagaagcctcaagaagtccaaacctcgagaaatgtggaatcgattgctgaacagatggaaaacccagacctcaagaatgtcgggtcgtcaactggagaaaagaacgaacgcacttcggtcgcagggactgtccggaagtgctggccaaacagggtggcaaaggagcaaatttccagacggctggacggcaaccagtacctgtttctgccgccgaaccgatacatttttcatggagcggaggtttactccgattcggaagatgacgtgctctccagctccagctgtggatctaactcggactcaggcacctgtcaatcaccgtcccttgaggaacctatggaagatgaatccgaaatcgaggaattctataacggtctggaagatgaaccggatgtcccagaaagggcaggcggcgcaggatttgggactgatggtgatgatcaagaagcgatcaacgaagctatttcggtgaaacaggaagtgactgatatgaattacccaagcaataagtcg

SEQ ID NO: 53788 - DNA, 1356 bp, Artificial Sequence
  derived and/or modified sequence
atgttcgacattgagtactttagaaaggacccgcgaccttttttcaagttcgccaaagaaatctacccaggacaatttcaaccgtcgctgtgccataagtttattgctctctccgacaaagaagggaagctcctgagaaactacacgcaaaacattgacaccctggaacaagtcgcaggaatccagaggattatccaatgtcatggctcgttcgcaactgccagctgtctcatctgtaaatacaaggtcgactgtgaggctgtgcggggtgacattttcaaccaagtcgtgccgagatgcccacggtgtcccgcggatgagccacttgcgataatgaagcctgaaatcgtgttttttggggaaaacctgcctgagcaatttcatagggcaatgaaatacgataaggacgaagtggaccttcttattgtcatcggatcgtccctgaaggtccgaccagtcgcacttataccgtcatccatcccccacgaagtgccacaaatcctcattaacagagaacctttgcctcatttgcattttgacgtggagctcctgggggattgtgatgtgatcataaacgaactttgtcatcgcctgggaggagagtacgcgaaactgtgctgcaatcctgtgaaactgtcagagattaccgagaaaccccctaggacccagaaagaattggcatacctgagcgaacttcctccaactcccctccacgtcagcgaagatagctcctccccggaaaggacttccccacctgattccagcgtcattgtgaccctgctcgatcaagcagcaaagtccaacgatgatcttgacgtctccgaatcgaaaggatgcatggaggagaagccacaagaagtgcaaacctcccgtaacgtggaatcaatcgcggagcaaatggaaaacccagatcttaagaatgtgggatccagcactggagaaaagaatgagcgcacgtcggtcgcaggaaccgtgagaaagtgttggcccaaccgggtcgcaaaggaacaaatatcgagacgactggatggtaaccaatacctgttcctcccaccgaaccggtatatctttcacggggcagaagtgtactcagattccgaagatgacgtgttgagcagcagctcctgcggatcgaactcggactccgggacctgccaatcgccatcccttgaagaacctatggaagatgagtcagagattgaagaattctacaatggtctggaagatgaacctgatgtgccggaacgggcaggtggtgctggctttggcactgacggcgatgaccaggaagctatcaacgaggccatatcggtgaagcaagaggtcaccgacatgaattacccaagcaataagtcc

SEQ ID NO: 53789 - DNA, 1356 bp, Artificial Sequence
  derived and/or modified sequence
atgtttgatattgaatactttcgcaaggatccaagaccattctttaagtttgcaaaagagatctacccaggtcagttccagccttcactttgtcataagtttattgcgctgtccgataaagaaggaaagttgctgcgaaattacacccaaaacatagataccctcgaacaggtggctggtatccagcgcataattcaatgtcacggctccttcgcaactgcctcctgtcttatttgcaagtacaaagtggattgtgaggccgtgcgaggcgacatctttaaccaggttgtgccccgctgtcctaggtgccctgcagatgaaccactggccattatgaaacctgaaattgtgttttttggagaaaacctccctgagcaatttcatcgcgccatgaagtatgacaaggacgaagtcgaccttctgatcgtgattggatcctcactgaaggtgcggccagtggcactcatcccctcttcgattccccatgaagtgcctcagatcctcatcaaccgtgaacctctgcctcatcttcactttgacgttgaactgctgggggattgcgatgtgattatcaatgagctctgtcaccgactcggaggcgaatacgcaaagctgtgctgcaatccagtgaagctgtccgagatcactgaaaagccgccccgcactcaaaaggaacttgcgtacctttcggagttgcctcctactccactccatgtgtcggaggattcctcgagccccgaacggacttcaccacccgacagctctgtgatcgttaccctgctggatcaagcagcaaagtcgaacgatgacctcgacgtgtcggaatcaaagggctgtatggaggaaaaacctcaggaagtccagacctcccgaaatgtcgagtccatcgccgaacagatggaaaatcctgaccttaagaatgtgggatcctcgaccggtgagaagaacgagaggacctcggtggcaggaacggttagaaagtgttggccgaaccgggtcgcaaaggagcaaatctcccggaggcttgatggaaaccagtacctgtttcttccaccaaatcgatacattttccacggggcagaagtctactccgatagcgaggatgatgtcctgtcctcgtcatcttgtgggtccaactccgattcgggcacgtgtcagtcgccctccctggaggagcctatggaagatgagagcgagattgaagagttctataatgggctggaagatgagccagatgtgccggaacgggccggtggagcagggtttggaaccgatggagacgatcaggaggcaatcaatgaggcaataagcgtgaaacaagaggtgactgacatgaattacccttccaacaagagc

SEQ ID NO: 53790 - DNA, 1356 bp, Artificial Sequence
  derived and/or modified sequence
atgtttgacatcgagtacttcagaaaggatccaagaccttttttcaagtttgctaaggagatataccctggtcaattccagccttccctgtgtcacaaattcatcgctctgtcagacaaggaaggaaagctgttgcgcaattacacccaaaacattgacactctggaacaggttgcaggtatccaacggataatacaatgccacggttcgttcgcgacggcctcctgcctcatctgcaaatacaaggtggattgcgaagcagtccggggagacatctttaaccaagtggtacctagatgtcctaggtgcccagcagacgaacctcttgcgattatgaaaccagaaatcgtgtttttcggagaaaacctgcctgagcaatttcatagagccatgaagtacgataaggatgaggtcgatctcttgattgtcattgggtcgtccctcaaagtaagacctgtggcacttattccatcatcaattccacatgaggtcccacagattctgatcaaccgtgagcctcttccacatttgcacttcgatgtggaactcctgggagattgtgacgtgattatcaacgaactttgtcataggttgggcggagagtacgccaaactttgttgtaatccggtgaagctctccgagatcacggaaaaaccaccacggacccagaaagagcttgcatatctctctgaactccctccaactccactgcatgtctcggaagattcctcgagtcctgaacgtaccagccctcctgatagctcagtcatagtcactctcctggaccaagccgcgaagtctaatgatgatctcgatgtgtccgagtcgaaagggtgtatggaggaaaagcctcaagaggtgcagacctctcgcaacgtcgaatctatagcagaacaaatggagaacccagaccttaagaacgtgggatcgtcgactggcgaaaagaacgagagaacctcagtcgcaggcactgtccgaaaatgttggcctaatagggtcgcaaaggaacaaattagccggcggcttgatggaaatcagtacctgtttcttccgccgaacaggtacatctttcatggagctgaagtgtacagcgacagcgaagatgacgtgctttcctcatccagctgtggtagcaattccgactcgggaacctgtcagtctccttcccttgaggagcctatggaagatgaaagcgaaattgaggagttttacaacggtctggaggacgaaccggacgtgcccgaacgtgccggcggagcaggtttcggaaccgatggggatgatcaagaggcaattaacgaggccattagtgtgaagcaggaagtgactgatatgaactatccttcaaataagtca

SEQ ID NO: 53791 - DNA, 1356 bp, Artificial Sequence
  derived and/or modified sequence
atgttcgacatagagtactttagaaaggatccgcgccctttctttaagttcgcaaaagagatttacccgggacaatttcagccgagcctctgccacaagttcatcgcgctgtcggacaaggagggaaaactgctcaggaattacacgcagaatattgacaccctggagcaggtggccggcatccagagaatcatccaatgtcatgggtctttcgctactgcgtcctgcctcatttgtaagtacaaggtggattgcgaagccgtcagaggggatatcttcaaccaggtggtgccacgctgtccgcgttgccccgccgacgaaccgcttgccatcatgaaaccggagatcgtgttcttcggggagaacctgcctgaacagtttcatagagcaatgaaatacgataaggacgaagtggacctcctcatcgtgatcggatcatccctgaaggtccgcccagtggcgctgattcccagcagtatccctcatgaagtgcctcagatcctcatcaacagagaaccactcccgcacctccacttcgacgtcgagctgctcggagattgcgatgtcatcattaacgagctgtgccaccggctcggaggagagtacgcgaaactgtgttgcaaccccgtcaaactttccgagatcaccgagaagcctccccgcacccagaaagaactcgcctacctctcagagctgccgccgaccccacttcatgtgtccgaggatagtagctcgccggagagaacttccccaccggacagctccgtcatcgtgaccctgctggatcaggctgcaaaatcgaacgatgaccttgacgtgtcagaatcgaagggatgcatggaagaaaagcctcaggaagtccaaactagccgcaacgtggagagcatcgccgagcagatggaaaacccggacctgaaaaacgtggggagctccactggggaaaagaacgaaaggacctcggtggcgggaactgtccggaagtgttggccaaaccgggtagcgaaggaacaaatctcccgccgccttgacgggaaccaatacctcttcctgccaccgaaccggtacatcttccacggcgccgaggtgtactccgattcagaagatgatgtgctttcctcctcctcgtgcggctctaactcggactcgggtacctgtcagtcaccgtcccttgaagaaccgatggaagatgaatccgaaatcgaggagttttacaatggcctggaggatgaacctgacgtcccggagcgcgcgggaggcgcaggcttcggaactgacggggacgaccaagaggccatcaatgaagccatttcggtcaagcaggaagtgacggatatgaactacccgtcaaacaaaagc

SEQ ID NO: 53792 - DNA, 1356 bp, Artificial Sequence
  derived and/or modified sequence
atgtttgatattgaatactttcggaaggacccccggccttttttcaagttcgccaaagagatctaccctggccaattccaaccatccctctgccataagttcatcgctctcagcgacaaagaggggaaacttctgcgaaattacacccagaatatcgatacgcttgagcaggtggcaggcatccagaggatcattcagtgtcatgggtctttcgcaaccgcaagttgtctgatatgcaaatataaagtcgattgcgaagcagtcagaggagatatcttcaaccaggtagtaccgcggtgcccccgctgcccagccgacgagccactcgcaattatgaaacccgagattgttttctttggcgaaaacctgcccgagcagttccatagggccatgaagtacgataaggacgaggtcgacctgctgattgtgataggatcttccctgaaagtgcggccagttgcactgataccctcatccattcctcatgaggtgccacaaattctcatcaacagggagccattgccacaccttcacttcgatgtcgagcttctgggcgattgcgatgtgattattaatgagctctgtcaccgactggggggggagtatgccaagctttgttgtaaccctgtgaaactctctgaaatcacagaaaagccccctagaacccagaaagaactggcgtacctcagcgagctgcctcctaccccactgcatgtgagtgaggacagtagttctcccgagaggacgagcccaccagactcaagcgtgatcgtgacactgctggaccaggcagccaagagtaatgacgatctggacgtgagtgaatctaaaggctgtatggaggaaaagccgcaagaggtgcagacatcaaggaatgtggagtccattgccgagcaaatggagaacccggacctgaagaatgtcggaagctctacaggcgaaaagaacgaacggactagcgttgctgggacagtacgcaagtgctggcccaatcgcgtggccaaggaacagatcagtcgacgcttggatggaaaccagtacctgttccttcctccaaaccggtatattttccatggggcagaagtatactcagacagcgaggacgacgtcctctcttctagtagctgcgggtcaaatagcgatagcgggacttgtcagtctccttcactggaggaaccaatggaagatgagtccgagatcgaagagttctacaacggattggaagatgagccagatgtgcccgaaagagcaggcggggctggattcgggaccgacggagatgatcaagaagcaattaatgaggcgatcagcgttaaacaagaagtgactgacatgaattatccttcaaacaaatca

SEQ ID NO: 53793 - DNA, 1356 bp, Artificial Sequence
  derived and/or modified sequence
atgtttgatatagaatacttccggaaagatcctcgtccgtttttcaagttcgccaaggaaatctacccaggccagttccaaccctccttgtgtcataagtttatcgcgctctcggataaggagggaaaacttctgcggaactacacccagaatattgataccctggaacaggtggctgggatacagaggataattcagtgccacggttcgtttgcaacggcttcctgtctgatttgcaagtataaagtggattgcgaagcggtgagaggtgacattttcaatcaggttgtgccgcgctgcccacgatgtccagcagacgagcctctcgccatcatgaagcctgagattgtgttttttggagagaatttgccagaacagtttcaccgggcaatgaaatacgataaggatgaggtggatctgctgattgtgatcggctcatcacttaaagtccgtcctgtcgcactcatcccctcatccattccccatgaggtgccccagattcttatcaacagagaacctcttccacaccttcattttgacgtggaactgcttggcgactgcgatgtgattatcaacgaactgtgccatcgtctgggtggagaatacgccaaactttgctgtaacccagtgaaactttcggaaatcactgaaaagcctccgcgtacgcagaaagagttggcctatctttccgagcttcctcccaccccactccacgtctctgaagattcgtcgtcacctgaacgtacttcgccacctgactcatccgtcatagtgaccttgctggatcaggcagctaagtcaaacgatgatctggacgtttccgaatcaaaggggtgtatggaagaaaagccacaggaagttcaaaccagtagaaacgtggaatcgatcgcagaacaaatggaaaatccggatctgaaaaatgtgggatcatccaccggagagaagaatgaaagaacttcggtggcaggcactgtgcgaaagtgttggccaaatagggtggccaaggagcagatctcaagacgactcgatggaaaccaatacctctttcttcctccaaacagatacatctttcatggagcggaagtgtactcggactcagaggatgacgtgctgtcgtcgtcctcctgtggatctaactctgatagcgggacttgtcaatcgccttccctggaagaaccgatggaggatgaatccgaaatcgaggagttttacaacggcctggaagatgagcctgatgtgcctgaacgggcggggggagcgggttttggtacggatggggatgatcaagaggcgattaatgaagcaatctccgtgaagcaagaggtcaccgatatgaactacccttccaataagagc

SEQ ID NO: 53794 - DNA, 1356 bp, Artificial Sequence
  derived and/or modified sequence
atgttcgatattgagtacttcaggaaagatccaaggccattcttcaagtttgccaaagagatctatccaggtcagttccaaccaagtctctgtcacaagtttatcgccctgagtgataaggagggaaagctgctgcgcaattacacgcagaatatcgacactttggagcaggtggcaggaatacaaaggattatccagtgtcatggctcttttgcgacggctagttgtcttatctgcaaatacaaggtggactgcgaggcagtgcgcggcgatatctttaaccaggttgtacctaggtgtccgagatgcccagctgacgaacctttggccattatgaagccggaaattgtatttttcggagagaacctgcccgagcagttccaccgcgcgatgaaatacgacaaggacgaagtcgatttgttgattgtcattggctcctcattgaaggttagaccggtagctcttattcccagcagtatcccccatgaagtacctcagatccttatcaatagagagcctttgcctcatctgcacttcgatgtagagctgctgggcgattgcgacgtgatcatcaacgagctgtgtcaccgcctgggtggtgagtacgctaaactgtgttgcaacccagtaaagctcagcgagattacggagaaacctcctcgcacccagaaggagcttgcctacctttcagaactccctcccacccccctgcacgtgtctgaggactcatctagtccggagcgcacaagcccacctgactcatccgtaatcgttactctgctggatcaggctgctaagtctaatgacgatctcgacgtctccgaaagtaagggctgtatggaggaaaagccccaggaagtgcagacctcaaggaacgtagagagcatcgctgagcagatggaaaaccccgatcttaagaacgtgggttctagcacaggtgaaaaaaacgagcgcacaagcgtggcaggaactgtcagaaaatgctggcccaacagagtggctaaagagcaaatctctaggaggctggatggaaaccaatacctcttcctgccgcctaatcgctatattttccatggtgctgaagtatactcagactctgaggacgacgttctgtcatcatcatcttgcggttccaacagcgatagcggcacttgccaaagtccgtctcttgaagaaccgatggaagacgagtcagagatcgaagagttttacaacggccttgaggacgagcctgatgttccagagcgcgcgggtggagctggatttggcacggacggcgatgaccaggaggccataaacgaagcaatcagcgtcaagcaggaggtcactgacatgaactacccgagcaacaagtct

SEQ ID NO: 53795 - DNA, 1356 bp, Artificial Sequence
  derived and/or modified sequence
atgttcgatattgagtacttccgcaaggacccgcgtcctttctttaagttcgcgaaggagatttacccgggccagtttcaaccatccctctgccataagtttatcgccctgagtgacaaggagggtaagctccttcggaactacacccagaacatcgataccctcgagcaggtcgccggtatacagaggatcatccaatgtcatggctcgttcgctactgcgtcatgccttatctgcaagtacaaggtggattgcgaggcagtgaggggagacatctttaaccaggtggttccgaggtgccccaggtgcccggccgacgagcccctggccataatgaaaccggaaatcgtgttcttcggagagaatttgccagagcagttccatcgtgcaatgaagtatgacaaagatgaggtcgacctgctcatcgtgattggatcctcacttaaggtccgcccggtggccctgatccccagctccatccctcatgaagtgccgcagatcttgatcaatcgggagccactgccacacctgcacttcgacgtggaactcctgggggactgtgatgtgatcatcaacgagttgtgccaccgccttggtggagagtacgccaagttgtgctgtaacccggtcaagttgtcggagattaccgaaaagcccccgcgcacccagaaggaactcgcttacctgtctgaactcccgcctactccactgcacgtgagcgaggactcgtcgtcgccggagagaacttccccgccggactcatcggtgatcgtcactctgttggaccaggccgcaaaatcgaacgacgatctggacgtgtcggaatccaaaggctgcatggaagagaagcctcaagaggttcagaccagcagaaacgtggagagcattgccgaacaaatggaaaacccagacctgaagaacgttggtagctccacgggggagaaaaatgagaggacctcagtcgccggaactgtccggaagtgctggccaaatcgggtggcaaaagaacaaatttcccggcggctggacggaaatcagtacctgttcctgccacctaaccggtacatcttccacggagcagaggtgtactccgattcggaggacgacgtgctgtcatcctccagctgcggatcgaactcggacagcggaacctgccagtcccctagcctggaggaaccaatggaggatgaatcggaaatcgaggagttttacaacgggctggaagatgaaccggacgtcccggagcgggcgggtggagccggcttcgggaccgatggagacgaccaggaggcgattaacgaggcgatctcggtgaaacaggaagtgaccgatatgaactatccgtccaataagagc

SEQ ID NO: 53796 - DNA, 1356 bp, Artificial Sequence
  derived and/or modified sequence
atgtttgatatcgagtactttaggaaagacccccgacctttctttaagtttgctaaggagatttaccctggacagttccagccttcgctttgtcacaagtttatcgcactgtcggacaaagagggtaaacttctgagaaactacactcagaatatagacaccctggaacaagtggcaggaattcaacgaatcattcagtgccacgggtcctttgcaactgcatcgtgtctgatatgtaagtacaaggttgattgcgaggcagttaggggagatatcttcaaccaagttgtgccgagatgtcccaggtgtcctgccgatgaacctcttgcaatcatgaaaccagaaattgttttctttggtgagaacctgcccgaacagttccatagggcaatgaaatatgataaggacgaagtggatctcttgatcgtaattggaagctcgcttaaagtcaggcctgtcgctctgattccctcgtcgattcctcacgaggtcccccaaatcctcatcaatagagagccgcttccccacctgcactttgacgtggaacttctgggggattgcgacgtgatcatcaatgaattgtgtcatcgtctcggaggagagtacgcaaagctgtgttgtaacccagtgaagctcagcgaaatcaccgagaagccgccccgaacccagaaggaactggcatatctctcggaacttccccctaccccattgcacgtgtctgaggactcctcaagccccgagcgcactagcccccctgattcctccgtcattgtgactcttcttgatcaggccgccaaatcaaacgacgacctggacgtgtcagagtccaagggctgtatggaagagaagccccaagaagttcaaaccagcaggaatgtcgagtcgattgcagaacaaatggaaaacccagaccttaagaacgtgggaagcagcaccggcgaaaagaacgagcgtacttcagtggcaggaactgtgcgcaagtgttggccgaaccgtgtggcaaaagaacagatttcgcgcagactggacggtaatcagtacctctttctgccccctaatagatacatttttcatggagcggaggtctacagcgattcggaggacgatgtgctctcgagctcgtcgtgtggcagcaattccgattccggtacttgtcagagcccttcgcttgaagagccaatggaagatgagtccgaaattgaagaattctacaatggcctcgaagatgaaccagatgtgcctgaacgcgccggaggtgcaggttttgggacggatggggatgatcaggaagccataaatgaagcaatatccgtgaagcaggaggtgactgatatgaactacccgtctaacaaatct

SEQ ID NO: 53797 - DNA, 1356 bp, Artificial Sequence
  derived and/or modified sequence
atgtttgacatagagtattttaggaaggacccccggccgttttttaagtttgcaaaggaaatttacccaggccaatttcagccctccctttgccataagttcattgcgctgtccgataaggaagggaaattgctgcgcaattacactcaaaatatcgataccctggagcaggtagcgggcatccagaggatcatacagtgccatggctctttcgccactgcgagttgcctgatttgcaaatataaagttgattgtgaagcagtccggggtgatattttcaatcaggtggtgccccgatgcccccgatgtccagccgacgagccgctcgccatcatgaaaccagagatcgtcttcttcggagaaaatctgccagaacaattccatcgagccatgaagtacgataaagacgaagtggacttgctgatcgtgatcgggtcatccctgaaggtgcgccccgtagctttgattccctccagcatcccccacgaggtcccccagatcctgatcaaccgggagcccctgcctcatctgcattttgacgtggagctgctaggggattgtgacgtgatcattaatgaactctgccacaggcttggcggcgaatatgcgaaactgtgttgcaaccccgtaaaactttctgagataacggagaagccaccgcgtacgcagaaagaacttgcctacctctctgaactgcctcccactcccctgcatgttagtgaagattccagcagtcccgaaaggacaagtcctccggattcatcggtgattgtcactttgttggatcaggcagcaaaaagtaatgatgatcttgatgtttccgaatctaagggctgcatggaggaaaaaccccaggaagtgcaaacaagtcggaatgtggaaagtatagctgagcagatggagaatcctgatctgaagaacgtaggaagttcgactggagaaaaaaacgaaagaacgagtgtggccggaactgtcagaaaatgctggcccaatcgggtcgcaaaggagcagatttctaggcgcctggacgggaatcagtatctgtttctgccaccaaaccggtatatttttcacggagcagaagtgtactctgactccgaagacgacgtgctgagttctagcagttgcgggtctaactcagatagtgggacttgccagagtccctctctggaggagcccatggaagacgaatccgaaatcgaggaattctataatgggctcgaggacgagccggatgtgcccgaacgcgccggaggggccggcttcggaaccgatggggacgaccaagaagctatcaatgaggctatttctgtgaagcaagaagttactgacatgaactatcctagcaacaagagt

SEQ ID NO: 53798 - DNA, 1356 bp, Artificial Sequence
  derived and/or modified sequence
atgttcgatattgaatatttcagaaaagacccaagaccattttttaaattcgctaaagaaatttatcctggacaattccaaccatctttatgtcataaatttatagctttatcagataaagagggtaaacttttaagaaattatactcaaaatattgacactttggagcaagttgctggaatacaaagaataattcaatgtcatggatcattcgctactgcatcatgtttgatatgtaaatataaagtagattgtgaagcagtaagaggagatatttttaatcaagttgttccaagatgtccaagatgtccagcagatgagcctcttgcaattatgaagccagaaattgtattttttggtgaaaatcttccagaacaatttcatagagctatgaaatatgataaagatgaagttgatttacttatagttattggatcaagtcttaaagtaagaccagttgcacttatcccatcttcaattccacatgaagttccacaaatacttataaatagagaaccattaccacatcttcattttgatgttgaattattaggtgattgtgatgttattattaatgaattatgtcatagattaggaggagaatatgctaaactatgttgtaatccagttaaactttccgaaataactgagaagccaccaagaactcaaaaagaacttgcttatctttctgaattgccacctactccattacatgtatcagaagattcttcatctccagaacgtacttcaccaccagatagtagtgtaattgttacattacttgaccaagcagctaagtctaatgatgatttagatgtatcagaatcaaagggatgtatggaggaaaaacctcaagaagttcaaactagtagaaatgttgaatcaattgctgaacaaatggaaaatccagatttaaaaaatgttggatcttccacaggtgaaaaaaatgagaggacatctgttgctggtacagttagaaaatgttggccaaacagagttgctaaggaacaaatttctagacgtcttgatggaaatcaatatttattcttaccacctaacagatatattttccatggagcagaagtttatagtgatagtgaagatgatgttttaagttctagttcatgcgggtcaaactctgatagcgggacttgtcaatctcctagtttagaagaacctatggaagatgaatcagaaattgaagaattctacaatggattagaggatgaaccagatgttcctgaaagagcaggaggtgctggattcggaacagatggagatgatcaagaagcaattaacgaagcaatttcagttaaacaagaagttactgatatgaattatccatctaataaaagt

SEQ ID NO: 53799 - DNA, 1356 bp, Artificial Sequence
  derived and/or modified sequence
atgtttgatatcgagtacttcagaaaggaccctcgtcctttctttaagtttgctaaggagatatatcctgggcagttccagccaagcctatgccacaaatttattgcattgtcagataaggagggcaagctgttaaggaactatactcagaacattgacactcttgaacaggtagctggcattcagaggattattcagtgtcatggttctttcgccactgcgagctgccttatttgcaagtacaaagttgactgtgaagccgtgcgcggtgacattttcaaccaggtagttcccagatgccctcgttgtccagctgacgaacctctggccatcatgaagcctgaaattgtgttcttcggagaaaatctgcctgaacagtttcatagggccatgaaatacgataaagatgaggtcgaccttcttatcgttatcggatcatcacttaaggttagaccggtggccctcattcctagctccatcccccacgaagttcctcagattcttatcaaccgggagccgctaccccatttgcattttgacgttgagctcttaggtgactgtgatgtgatcattaacgagttgtgccataggctcggaggagaatacgcgaagctttgctgcaacccggtgaagttatctgaaatcactgaaaagcctccaaggactcagaaggaacttgcctacttgtctgaactcccacccacacctcttcatgtaagcgaggacagctcttctcccgagagaacgtctcctccagattctagtgttattgtaactctgctcgatcaggctgctaagtcaaatgatgatttggatgtgtcggaaagtaaaggatgcatggaggagaagccacaggaagtgcagacgtctcgaaatgttgaatcaatagctgaacagatggagaatcctgatcttaagaacgttggctccagtacaggtgagaaaaacgagagaacaagcgttgctggtaccgtaaggaagtgttggcctaacagagtcgctaaagagcaaataagcagaagactagacggtaatcagtatctgtttctccctcccaacagatacatttttcacggcgctgaagtgtactcagattccgaagacgatgtgcttagtagtagcagctgcggaagcaatagcgactcgggtacatgtcagtctccctccctggaggaaccgatggaggacgagtctgagatcgaggaattttataatggtctcgaagacgaacctgatgtgcccgaaagggcaggaggtgccggttttggaactgatggagatgaccaagaggcgataaatgaggcgataagcgttaagcaagaagtcaccgacatgaactatccatcaaataagtca

SEQ ID NO: 53800 - DNA, 1356 bp, Artificial Sequence
  derived and/or modified sequence
atgttcgacattgaatacttcaggaaggatccccgaccgttcttcaagttcgccaaagagatttaccccgggcaattccagccttctttatgccacaaatttatcgccctgtcagacaaagaaggcaagctacttagaaattatactcagaacattgacactctggaacaggtggcggggattcaacgaattatacaatgtcatggctcgtttgcgacggcctcctgtcttatctgcaagtacaaagtggactgcgaggccgtgcggggtgacatttttaatcaggttgtgcctagatgtccccggtgccccgcagacgagcctctcgcaataatgaagccagaaatcgtgttctttggcgaaaatcttcctgaacagtttcacagagccatgaagtacgacaaggacgaagtggatctccttatcgtgatcggcagtagcctgaaggttcggccggtggcactgattccaagcagcattccacacgaagtgccccagatcctgataaatcgggagcctctcccgcatctacactttgatgtcgagctgctcggcgactgcgatgtgatcatcaacgagctctgccaccggctggggggggaatatgcgaagctctgttgtaatcccgtcaaactgagcgagataactgagaagcccccccgaacccagaaggaacttgcatatctcagtgagctaccacctacaccgctgcacgtgtcagaggactcctcatcccccgaacgtaccagccctccagatagcagcgtgatcgtaaccctcctggatcaggcggccaagagcaatgacgacttggatgtgtcagagtcgaaagggtgtatggaggagaagccacaggaagtccagacttccagaaacgtcgagtcaatcgctgaacaaatggaaaatcccgatcttaaaaatgtcggcagctctactggcgagaagaatgagagaaccagtgtggccggcaccgtacggaagtgctggccgaacagagtggctaaggaacagattagtcgacgcctcgacggaaaccagtacttgttcctgccgcccaatcggtatatattccatggggctgaggtgtattccgactctgaggacgatgtgctgtcctcgtcatcttgcggctctaactctgactcggggacatgtcaatctccttcactcgaagaacctatggaagacgagtctgagatcgaggagttctataacggactggaggacgaaccggacgtgcccgaaagagctggcggcgccggcttcggcacagacggagacgatcaggaagccatcaatgaagccatcagcgtgaagcaggaggtgaccgacatgaattatccctcaaacaaaagt

SEQ ID NO: 53801 - DNA, 1356 bp, Artificial Sequence
  derived and/or modified sequence
atgttcgacatcgaatacttccgaaaggacccccgtccgttttttaagttcgcgaaggaaatatatcccgggcagttccagccctcgttgtgtcacaagtttatagctctgtccgacaaagaggggaagcttttgcgaaactatactcagaatattgataccctggagcaggtagcaggcatccagcgcattatccaatgccacggctcttttgccaccgccagttgccttatttgcaagtacaaagttgattgtgaggccgtgcggggggacatatttaaccaggtagtcccacggtgtccacggtgccctgccgatgagccccttgcaatcatgaagccagaaatcgtttttttcggcgagaatctgccggaacagttccatcgtgcaatgaagtacgacaaggacgaggtggacctgctgatcgtcattgggtcttcactcaaggtgcggccggtcgccctgatccccagtagtatcccgcacgaggtgccccagatactcatcaatcgggagccactgcctcaccttcatttcgacgtcgagttgttgggagactgcgacgttatcattaacgaactgtgccatcggcttggcggcgagtatgctaagttgtgttgtaaccctgtcaaacttagcgagataaccgagaagccaccccggactcagaaagaactggcctatctctcggagctgccgcccaccccactccatgtgtctgaagatagcagctctccggagcggacctccccacctgattcctctgtgatcgtaactctgctggaccaggctgcgaagtcaaatgatgatcttgacgtgtcggaaagtaaaggatgcatggaagagaaaccgcaggaagtccagacctcacggaacgtcgagtccattgccgaacagatggaaaaccccgatctcaagaatgtggggagctcaacgggagagaagaacgagagaacatccgtcgctggaaccgtgcggaagtgttggcctaatcgggtggccaaggaacagatatctaggaggcttgacggcaaccaatacctgttcctgccacccaatcgatatatcttccacggcgccgaggtgtatagcgatagcgaggacgatgtgctctcttccagctcctgcggcagcaattctgactctggtacatgccagagtccatctctggaggagcccatggaagacgagtcagaaatcgaggagttctacaacggtttggaggacgagcctgatgtgcctgaacgggccggcggcgcagggttcggaaccgacggggatgaccaggaagctatcaacgaggctatttccgtaaaacaagaggtgaccgatatgaactacccctccaacaagtcc

SEQ ID NO: 53802 - DNA, 1356 bp, Artificial Sequence
  derived and/or modified sequence
atgttcgacatcgaatacttcaggaaggatcccagacccttcttcaaatttgcaaaggagatctaccccggacagttccaacctagcctgtgccataagtttatcgcgctgtccgataaggagggcaagctgctccgcaattacactcaaaacattgataccttggagcaagtcgcagggatccagagaatcatccaatgtcatgggtcgttcgctactgcttcatgtctgatctgtaagtataaggtggattgcgaggccgtccggggcgacatcttcaaccaagtggtcccgagatgtccgcggtgtcctgccgacgaaccactcgctatcatgaagccggagatcgtgttctttggcgaaaacttgccggagcagttccaccgcgccatgaagtatgacaaagacgaggtcgatctgctcattgtcatcggatcctcccttaaggtccggccggtggccctgatcccgtcatcgattccacacgaggtgccacaaatcctgatcaatcgggaaccgctcccgcatctccattttgacgtggaactcctgggcgactgtgacgtgatcatcaacgaactttgccatcgcctggggggagagtacgctaagctgtgctgcaacccggtgaaattgagcgaaataactgagaagccaccgagaactcagaaagagctggcgtacctttccgaactcccgccgacccccctgcatgtttcggaagattccagctcccctgagcgcactagcccaccagattcctcagtgatcgttactctgctggatcaggcggcgaagtcaaacgacgacctcgatgtgtcagaatccaaggggtgtatggaggagaagccgcaagaagtccagaccagccggaacgtcgagtctatcgctgagcagatggaaaacccggacctgaaaaacgtgggttcaagcactggagagaaaaacgagcgcacgagcgtggctggcaccgtcagaaagtgctggccaaatcgggtggcgaaagaacagatctccagaaggttggacggaaatcagtatctctttctgccgcctaacagatacatctttcacggtgccgaagtctactcggactctgaagatgacgtgctgtcatcatcatcctgcggttcaaactctgattccgggacttgccagtcaccctccctggaagaacctatggaggacgagtcagaaatcgaagagttctacaatggactcgaggacgagccggacgtgcctgagcgggccggaggagccggatttggcacggatggtgacgatcaggaggcgatcaacgaagcgatctcagtgaagcaagaggtcaccgacatgaattacccatcgaataagtcc

SEQ ID NO: 53803 - DNA, 1356 bp, Artificial Sequence
  derived and/or modified sequence
atgtttgacatcgaatactttcgcaaagaccctaggccctttttcaagtttgccaaggaaatctaccctggacagttccaaccatcgttgtgtcataagttcatcgctctttcagacaaggaagggaaactgcttcggaattacacgcagaacatcgacacgctggagcaggtcgccggaatccagcggattatccaatgccatgggagctttgcaaccgcatcctgtctgatatgtaagtacaaggtggattgtgaagccgtccggggagacattttcaaccaggtcgtgcctcggtgtcctagatgccctgcagacgaacctcttgcaattatgaaaccagagatcgttttctttggagagaacctgcctgaacagttccatcgggcaatgaagtacgataaggacgaggtggatctgctgattgtgatcggctcctcgcttaaggttcgcccagtggccctgatcccctccagcatcccacacgaagtcccccaaattctcattaacagggaaccacttccacatttgcattttgatgtcgagctcctgggagattgtgatgtcattatcaatgaactttgccacagattgggtggggagtacgcaaaactctgctgtaaccctgtgaagctgagcgaaattactgagaagcccccgagaacccagaaggagctcgcctacctttctgagcttccgcccacgcctctgcatgtgagcgaagattcctcctcccctgagcgaacctcacctccggactcatccgtgattgtgactcttcttgatcaggcagcaaagtccaacgatgaccttgatgtctccgagtcaaagggatgtatggaagaaaagcctcaagaagtgcaaacctctcgcaatgtcgaatccattgcagagcaaatggaaaacccggatcttaagaatgtaggaagctcgactggtgagaagaacgaacggacttccgtggcaggaaccgtgagaaagtgttggccgaacagggtggcgaaggagcaaatcagcaggaggctggatggaaaccaatacctgtttctcccgccgaatcgatacatctttcatggcgccgaggtgtattcggacagcgaggatgatgtcctttcctcgtcatcgtgtgggtctaattcggactcgggaacttgtcagtcccctagcctcgaggagcctatggaggatgaatcagaaatcgaagagttttacaacggactggaagatgaaccagatgtgcctgaacgtgctgggggagcaggctttggaaccgacggagacgatcaagaagcgattaacgaggcaatttcggtgaaacaggaagtcaccgatatgaactacccttccaacaaaagc

SEQ ID NO: 53804 - DNA, 1356 bp, Artificial Sequence
  derived and/or modified sequence
atgttcgatattgagtactttcgcaaggacccccggccttttttcaaatttgccaaggagatttaccctggtcagtttcaaccttcgctgtgccacaagtttatcgctttgtcagataaggagggaaagctcctccgtaactatacgcagaatatcgatacgctggaacaggtggccggaatacaaagaatcatccagtgtcacggatcgtttgcaactgcatcctgtttgatttgcaaatacaaggtggactgtgaggcagtccgcggagatatctttaaccaagtggtccctcgctgcccgcgctgcccagcagatgaacctcttgccatcatgaagcctgaaattgtgttttttggagaaaatcttccagagcagttccatcgggccatgaagtacgataaggatgaagtggatctgttgattgtgattggatcctcgttgaaagtcaggcccgtggccctgattccatcgtcgattccacatgaagtccctcaaatactgattaacagagaaccgctgcctcaccttcactttgacgtcgaactgttgggagactgcgatgtgattatcaacgagctctgtcatcggctcggaggagaatacgcaaagttgtgttgtaaccccgtgaaactcagcgagattactgaaaaaccaccaagaacccaaaaggaacttgcatacctgtccgagctgccgcccacccctctccatgtgtcggaagatagctcctccccggaacgaactagcccccctgattccagcgtgatcgtgactcttcttgatcaagctgcaaagtcaaacgacgacctggatgtgagcgaatcaaaaggatgcatggaggaaaagcctcaagaggtgcaaaccagcagaaacgtggagtcgattgcagagcaaatggaaaaccctgatctgaaaaatgtgggttcatcaaccggcgaaaagaacgaacggacttccgtggctggtactgtccgaaagtgttggcctaaccgtgtcgccaaggagcagatttcgcggagactggatggcaaccagtacctgttccttccaccaaaccgctacattttccacggagccgaagtgtactcggattccgaagatgatgtgctgtcgtcctcttcgtgcgggagcaattcggactcggggacttgccagtccccaagcctcgaggaacctatggaggatgaatccgaaatcgaggagttttacaacggtcttgaggatgagcctgatgtgcccgagagagcgggtggtgcgggtttcggaaccgatggcgacgaccaagaagcaattaacgaagcaatatctgtgaaacaagaggtgacggacatgaactacccatccaacaagtca

SEQ ID NO: 53805 - DNA, 1356 bp, Artificial Sequence
  derived and/or modified sequence
atgttcgatatcgagtattttcggaaggatcccaggccattctttaagttcgccaaggaaatctaccctggtcagtttcaaccatcgctgtgccataagtttattgcactgagcgataaggaagggaagttgctgaggaactatacgcagaatattgatactttggagcaggtagccggcatccagcgcataattcagtgccacggctccttcgctaccgcatcttgtctcatatgcaaatataaagtggactgcgaggccgtaaggggcgacatttttaaccaggttgtgccccgatgcccccgatgtccggctgacgagcctctggcaatcatgaagcccgaaatcgtgtttttcggagaaaatttgcctgagcagtttcatcgcgcgatgaagtatgataaagatgaggtcgatcttctgatagtcattgggtcttcccttaaagtacgccctgtggcgctgatcccgtcttcaatcccccacgaagtgccacagatcctgattaatagagagccattgccacatcttcatttcgacgttgagctgctgggggattgcgacgtaatcattaacgagctctgtcaccggttaggaggagaatatgcaaaactctgttgcaatccagttaagctgagcgaaataacagagaaacctccaaggacacagaaggagttagcttatctatctgaactgcccccaaccccgttgcatgtgtctgaagacagctcatctccagaacgtacctcaccgcccgacagctccgtgatcgtcactcttctggatcaagctgccaagtccaacgacgacctggacgtctctgaaagtaagggctgcatggaggagaaaccacaggaggtccagactagccggaatgtcgagtcgattgccgagcaaatggagaatcctgacctgaaaaatgtgggaagcagtacaggggagaaaaacgaaagaacttctgtggctggcacagttcgcaaatgctggcctaatagggtggccaaagaacaaattagtcgaagattggatggtaatcagtacctcttcctgccgcccaaccggtatatcttccatggcgcagaggtgtattcagattcagaggacgatgttctcagctcatctagttgcggctcaaacagtgactccggcacatgtcagtccccctctcttgaagagcctatggaagacgagtctgaaatcgaagagttctacaacgggcttgaagacgaaccagatgtacccgagcgggctgggggcgcaggtttcggtacagacggggatgatcaagaggccattaatgaagccatttccgtcaagcaggaggttacagatatgaattatcctagtaacaagagc

SEQ ID NO: 53806 - DNA, 1356 bp, Artificial Sequence
  derived and/or modified sequence
atgttcgatattgaatacttcagaaaggatccgcgtcccttctttaagttcgcaaaggaaatatacccagggcagttccaacccagcctgtgtcacaaatttatcgcgttgagcgataaggaaggaaagttgctgaggaattacacccagaacatcgatacactagagcaggtcgctgggatccagcggattattcagtgccatggcagcttcgcaactgcgtcttgtctcatctgcaagtacaaagttgactgcgaggccgtccggggggatatttttaaccaggtagttccgcgatgtcccaggtgccctgcagacgagccactggccatcatgaagcctgagatcgtattctttggcgagaatctgcctgagcaatttcatagagctatgaaatatgacaaagacgaagtagacctgctgatcgtgatcgggtcttccctgaaggtgcgcccggtggcattgattcctagctcgatcccccatgaggtgccacagatcctgattaacagggaacctctcccccacttgcattttgatgtagagttgctgggcgattgtgatgtcattattaatgagctctgtcacagactgggcggcgaatatgcgaagctgtgttgcaaccccgttaagctgtccgagataacagagaaaccaccgcgaactcagaaagaattggcctacctgtctgagctgccacccacaccattgcacgtcagcgaggacagcagcagtcccgaacgcacatctcctccagatagttcagttatcgtcacgctgctcgaccaggctgcaaaaagcaacgatgacctcgatgtcagtgaaagcaagggatgtatggaggagaaaccacaggaagtacaaacatcgcgaaatgttgagagcatcgctgaacaaatggagaacccagatctgaaaaacgtgggttcatcaacaggcgaaaaaaatgagagaacttcggtggcgggcacagtgcggaagtgttggcccaatcgcgtggcgaaagaacaaatcagccgccggttggacggaaaccagtacttatttctcccgcccaacaggtatattttccatggggccgaagtctactctgactctgaggatgacgtcttgagttcttcctcctgtggttctaattcggactctgggacatgtcagagcccgtctcttgaagagccaatggaagatgagtctgagatcgaagaattctataatggactggaggatgagccagatgttccagagcgcgctggcggcgcgggattcggcacggacggcgatgatcaggaggcgattaacgaggcaatttctgttaaacaggaggttacagacatgaactacccctctaataagagc

SEQ ID NO: 53807 - DNA, 1356 bp, Artificial Sequence
  derived and/or modified sequence
atgtttgatattgaatacttcaggaaggacccaaggcctttctttaagtttgctaaagaaatctatcctgggcaatttcagccatccctgtgtcataaattcattgcacttagtgataaagaaggcaaactgctcaggaactacacacagaacatcgatacccttgagcaggtggccggtatacaaagaatcattcaatgccatggtagctttgctactgccagttgcctgatctgcaagtataaggtcgattgcgaagctgtgcgtggagacatcttcaaccaggtggttcccaggtgtcctaggtgtcctgctgatgaaccactggccataatgaaaccagaaattgtgttcttcggcgaaaacctgccagagcagtttcaccgagcaatgaagtatgataaggatgaggtggacctgctcattgttatcgggagttcattaaaagtgcgacccgtagcactcatccccagctcgatcccccatgaagtgccccaaatattgattaacagggagcctctcccacacttgcattttgacgttgaattgcttggcgattgcgatgtgataattaacgagttgtgccaccggctggggggcgagtatgccaaactttgctgcaacccagtaaaactcagcgaaatcacagaaaagcctcccaggactcagaaagagctggcttacctgagcgagctcccaccaactccactccacgttagcgaagacagttcaagtcctgaaaggacgagtccccccgattcttctgtgattgttactctgctagatcaggctgccaagagcaatgacgatcttgatgtgtccgagtccaaaggatgtatggaggagaaaccacaagaggtgcagacttctcgcaatgtcgagtctatcgcagagcagatggaaaaccctgatcttaagaatgtcgggtcttccaccggggaaaaaaatgagaggacgagcgttgcgggaaccgtacgcaaatgctggccgaacagagtcgccaaagaacaaatttctaggagactggatggcaaccagtatcttttccttccgcctaacaggtatatcttccacggagcagaggtgtattccgactcggaggacgacgtcctgagctctagctcttgtggaagcaacagcgacagcggaacatgtcaatccccatcccttgaagagcccatggaagatgagagtgagatcgaggagttttataatgggcttgaagatgaaccagatgtacctgagcgcgccggaggggcaggattcggaaccgacggtgacgatcaagaggcaatcaacgaagctattagtgtgaaacaggaagtgaccgatatgaactatccaagtaacaaaagc

SEQ ID NO: 53808 - DNA, 1356 bp, Artificial Sequence
  derived and/or modified sequence
atgttcgacatcgagtactttcgaaaggatcctcgccctttttttaaattcgcaaaagagatttatccaggccagttccagccaagcctgtgccacaaatttattgctctgtccgacaaggagggcaagctgctgcgcaattacacgcagaatattgatacgttggaacaggtggctggtatccaacgcattatacagtgtcacggatcctttgctaccgcgtcctgtttgatctgtaagtacaaggttgattgcgaagccgtccgcggagacatcttcaatcaggtcgttccgcgctgtccacgctgccctgcggatgagccgttagcaatcatgaagccagaaatcgtgttcttcggagaaaatctgccagagcagtttcaccgcgcgatgaagtacgacaaggatgaggtggatttgctgatcgtgattggtagctcattaaaggttcgcccagttgcactgatccctagcagcattcctcacgaagtgccgcaaatcctgataaaccgcgagccgctgccgcatctgcactttgatgttgaacttttgggcgactgcgatgtcattattaacgagctgtgtcatcgtctgggtggagaatacgctaagttatgttgtaatcccgtaaaactgagtgaaatcaccgaaaagcccccgcgcacccagaaggaactggcctacctgagcgagctgccacctacccctctgcacgtgagcgaggattcctcatcaccggagcgcacttcaccgcctgattcttccgtgatcgtcacactgttggatcaggccgccaaatcaaacgacgacctggatgtcagcgaatctaagggttgtatggaggaaaagccacaggaagttcaaacctctcgcaatgtcgagagcattgcggagcagatggagaacccggacctaaagaacgtcgggtctagcaccggtgagaagaacgagcgcacgtccgtcgctggaaccgtgcgcaagtgctggccaaaccgggttgcaaaagagcagatctctcgccgcctcgatgggaatcaatatctcttcctgccgccgaaccgttacatttttcacggtgcggaggtgtacagcgatagcgaggacgacgtgcttagctcttcgagttgtggttccaacagcgactcaggcacgtgtcagagccctagcctggaggagccaatggaggacgagagcgagatcgaggaattctacaacggtttggaggatgagccggacgttccagaacgcgcgggtggtgctggctttggtaccgacggggacgatcaggaggccattaacgaagctatcagcgtaaagcaagaggtgaccgatatgaattacccgagcaataaaagc

SEQ ID NO: 53809 - DNA, 1356 bp, Artificial Sequence
  derived and/or modified sequence
atgtttgatatcgagtactttcgcaaggaccctcgcccgttctttaagttcgcaaaagagatttaccctggccagttccagccctcgctctgtcataagtttatagctctgtcggataaggaagggaagctgctgaggaattacacccagaatatcgatacccttgagcaagtggcgggaatacaacggatcatccagtgccatggcagcttcgcaaccgcatcatgcctgatctgtaagtacaaggtcgattgcgaagcagtcagaggagacatattcaatcaagtggtcccaagatgtccgaggtgcccggcagatgaacccctcgcaattatgaaacctgaaattgtcttttttggagagaatcttccagaacagttccacagggccatgaagtacgataaagatgaggtggatttgctgattgtgattggctcatccctgaaggtcaggccagtcgccctcatcccgtcgtcaattcctcatgaagtgccccagattctgatcaatagagagcctctgcctcatttgcatttcgatgtggaactgctgggagattgtgatgtgattatcaacgaactgtgtcacaggctcggaggtgagtacgcgaagctgtgttgtaaccctgtgaaactttcggagataactgaaaagcctccccgcactcaaaaggaacttgcataccttagcgaactgccaccgactccacttcatgtctcagaggactcatcttcgcctgaaaggacctctcccccagattcctcggtgattgtcactctgcttgaccaggcagctaagtccaacgatgatttggatgtctccgaatccaaggggtgtatggaagagaagccacaagaggtgcaaacctcgcgcaacgtggaaagcattgcagaacaaatggaaaacccggatctcaagaatgtgggaagctcgacgggtgagaagaacgaaagaacctcagtggccggtaccgtgagaaagtgttggccaaacagggtggcaaaagaacaaatttcgcggagacttgatggtaaccaatacctcttcctgcctcctaaccggtacatctttcatggtgccgaagtttattctgattcagaggacgacgtgctgagctcgtcgtcatgtggatccaattcagacagcggaacttgtcaaagcccttccctggaagaacccatggaggacgagagcgaaattgaggagttctacaacgggctcgaagatgaaccagatgtccctgagagagcaggtggagctggattcggtaccgacggggacgaccaggaagcaattaacgaagcaatatccgtgaaacaagaagtgacggacatgaactacccatccaacaagtcg

SEQ ID NO: 53810 - DNA, 1356 bp, Artificial Sequence
  derived and/or modified sequence
atgtttgatatagaatatttccggaaggatccccgtccattctttaaatttgctaaagaaatctaccccggccaatttcagcctagcctttgccacaaattcatagccttgtccgacaaagaaggcaaactgctacgcaactacacccagaatattgacacattggagcaagtcgcaggcatccagcgcatcattcagtgtcacggatctttcgccaccgcgtcctgtctgatctgcaaatataaggtcgactgcgaggcagtccggggggatatattcaatcaggtcgtgcctcgatgcccaaggtgccccgctgacgagcccttggctattatgaagccagaaattgtctttttcggtgaaaatctgccagagcagttccatcgggctatgaaatatgacaaggacgaagttgacctgctgattgtgatcggatcctctctaaaagtccgtcctgtggcgttgataccctcctctattccccacgaggtgccacagatcttaataaatagagagcccttgccacatctccatttcgacgtggaactccttggtgattgtgacgtaattatcaatgaactttgtcaccggctgggtggggagtacgccaaattgtgctgcaatccggtgaaattgtccgagatcactgagaaacctcctagaacacagaaagaactggcgtatttgagcgaactgcctcccaccccgctgcatgtgagtgaggatagctcttcccctgagcgtacctctccccctgactcttctgtgattgtcactctcttggaccaggctgctaagagtaatgacgatctggacgtctcagagtccaaggggtgtatggaggagaagccacaggaagtgcagacttcaaggaatgtggagtctatcgcggagcagatggagaatcctgatttgaagaatgttggcagttccaccggagaaaagaacgagagaactagcgtggcaggtacagtccgtaaatgctggccgaatcgggttgccaaggagcaaataagtcggagactggatggaaatcagtatttgtttctccccccaaacagatatatttttcatggagcggaggtctacagtgattccgaggatgatgtactcagtagttccagctgcggatccaacagtgatagcggcacgtgccaatcccccagtctggaagagcctatggaggatgaatcggagatcgaagaattctacaatggactcgaggacgaacccgatgtgcccgaaagggccggcggagccggtttcggcacagatggggatgaccaggaggctatcaacgaagctatctctgtcaagcaggaggtcactgacatgaactatcctagtaataagagt

SEQ ID NO: 53811 - DNA, 1356 bp, Artificial Sequence
  derived and/or modified sequence
atgtttgatattgaatacttccgaaaagatcccagaccctttttcaaattcgccaaggaaatctatcccgggcagtttcagccaagtctctgtcataaattcattgccctatccgataaagaaggaaagctcctgaggaattacacacagaacatagatactctagaacaggtggcgggaatccagagaatcatccagtgccatggatctttcgccacagcttcttgtctgatttgcaaatataaagttgattgcgaagcagtgaggggggatatttttaatcaggtggtgccaagatgccccaggtgccccgctgacgaacctctggctataatgaaacctgagatcgtcttcttcggggaaaatctcccagaacagttccacagagctatgaagtatgataaagatgaagtagacctcctaatcgttatcgggtccagtctgaaagtacgccccgtggctcttatcccaagttcgatccctcatgaagtacctcagattctcatcaacagggaaccacttccacatctgcatttcgacgtcgaactacttggggattgcgacgtcataattaacgaactgtgccataggcttggaggggaatatgccaaactatgttgtaaccccgtgaaactctcagagatcactgaaaaaccccctagaacacagaaagaactagcttatctgtctgagcttccccccacacccctacacgtgtctgaagactcaagttcccctgaacggacatctccaccagattcctctgtgattgtgactctactagatcaggccgccaagtccaatgatgatctcgatgtgagtgaatccaaaggatgtatggaagaaaaacctcaggaagtgcagacatctcgcaacgtggagagtatagcagaacagatggaaaaccctgatcttaaaaacgtagggtcctccacaggggagaaaaatgaaaggacttccgttgcaggaactgtcaggaaatgctggcccaatcgggtagcaaaagagcagatcagtaggaggctcgatggaaaccaatatctcttcctccctcctaatcggtatatcttccacggagctgaagtctacagtgattcagaagatgacgtgctctcatcttcttcatgcgggagtaacagtgactccgggacatgtcagtccccttctctggaagaacctatggaagatgaatctgaaatagaagaattctataatggactggaagacgagccagatgtccctgaacgcgcagggggagccggattcggaacagatggggatgatcaggaagccataaacgaagcaataagtgtaaaacaggaagtcactgatatgaactatccttcgaataaatca

SEQ ID NO: 53812 - DNA, 1356 bp, Artificial Sequence
  derived and/or modified sequence
atgttcgatatcgagtacttcagaaaggatccaagacccttcttcaagtttgctaaagagatttacccaggccaattccagcctagtctttgccacaaatttatagctttaagcgataaggagggcaagcttttgcggaattacacccagaatattgacacattggagcaggtagccggaatccagcggataatccaatgccatgggtccttcgccacagctagttgtctgatctgtaaatacaaagtggattgcgaagcggtgcggggtgacatctttaatcaggtcgtgcctcgatgtcccaggtgtccggccgacgaacccttggctatcatgaaacccgaaatcgtgttctttggcgagaacttaccagaacagttccacagagccatgaaatatgataaggacgaggtggacctgctgatagtcattggatcttctctaaaggtacgacctgtggctctcattcctagttctatcccccacgaggtgcctcaaattctcataaatagggagcctctgcctcacctgcactttgacgtggagttactaggtgattgtgacgtcatcattaacgaactgtgccataggttgggcggcgagtacgcgaagctgtgctgtaaccccgttaagctgtctgagattacggagaagcctcctagaacgcagaaggagctcgcctacctctctgagctccctcctacacccctacatgtgtctgaggattctagcagccccgagcggacgtctcctcccgattcgtctgtgatcgtaactctgttggaccaggctgctaagtccaatgacgatctggacgtcagcgagtccaagggctgcatggaagagaaaccccaggaggtgcaaacctctagaaacgtggaatcgatcgctgaacagatggaaaatccagatttgaaaaatgtgggcagtagcactggagagaagaacgaaagaacttccgtggccggcacagtacgaaaatgctggccgaatcgcgtcgcaaaagagcagatatctcgccgccttgacggaaaccagtacctcttcctgccaccaaatcggtacatcttccacggcgctgaagtgtactccgattccgaggatgatgttctttcctcatcttcatgcggatcaaactccgattctggtacctgccagagcccgtctctggaggaacctatggaggacgaatccgagatcgaagagttttataacggtcttgaggacgaacctgatgtacctgaacgcgcggggggcgcaggcttcggaaccgacggagatgatcaagaggctattaatgaagccatttcagttaagcaggaggtgaccgatatgaattatcctagtaataaatct

SEQ ID NO: 53813 - DNA, 1356 bp, Artificial Sequence
  derived and/or modified sequence
atgttcgatatagaatactttaggaaagaccccagaccttttttcaaatttgccaaagagatctaccccggacaatttcaaccttccctgtgtcacaaattcattgctctgagcgacaaggaaggaaagctgcttaggaactacacccagaatattgataccctggaacaagtcgcaggaatccagcgaatcatccaatgtcatggatcatttgcaaccgcctcgtgtttgatttgtaaatacaaggtggactgcgaagcagtgcggggtgatatctttaatcaagtggttccgcggtgtcctaggtgccctgccgatgagccactggcgattatgaagccagaaattgtgttttttggcgaaaacctccccgagcagtttcacagggccatgaagtacgataaggatgaagttgatctccttattgtgatcggatcgtcactgaaggtgcgacccgtcgctctgataccttcctccattccacacgaagtgccccagattctcataaacagagaacctctgccacatttgcatttcgacgtggaactgttgggcgattgtgatgtgatcattaacgaactttgtcatcggcttggtggagaatacgccaaattgtgctgcaaccctgtgaagctgtcagaaatcaccgaaaagcctcctagaactcagaaagagctcgcgtacctctcggaacttcctcctactcctcttcatgtctcagaggactcgtcaagcccggaaaggaccagccctcctgattcgtccgtgatcgtgaccctgctggaccaggccgcaaagtccaatgacgatctggacgtgagtgagtccaagggatgcatggaagaaaaaccgcaagaagtgcagacttcgaggaacgtggaatcgattgcagaacaaatggaaaatcctgatctgaaaaatgtcggctcgtctaccggtgagaagaatgaacgcacttccgtggccgggaccgtccgcaagtgttggcctaatagagtggctaaggaacagatttcacgccggcttgatggtaatcagtacttgtttcttcctcctaaccggtacatattccatggagcagaagtgtacagcgatagcgaagatgatgtgctgtcctcaagctcctgtggttcaaattcagattcgggtacctgtcaatccccttcactggaagaaccaatggaagatgagtccgaaatagaggagttttacaacggcctggaggacgaacctgatgtgccagaacgagcaggcggagcaggttttggaactgatggagacgatcaagaagcaattaacgaagcaatcagcgtgaaacaagaggtgactgatatgaattatccttctaacaagtcc

SEQ ID NO: 53814 - DNA, 1356 bp, Artificial Sequence
  derived and/or modified sequence
atgttcgacattgagtacttccggaaagatccaaggccgttcttcaagtttgccaaagaaatctaccccggacagttccaaccgtcgctgtgccacaaattcatcgccctgtcggacaaggaaggcaagctcctgaggaactatactcagaatatcgacaccctcgagcaggtggcaggaatccagcgcattatccaatgccacggaagttttgctactgccagctgcctcatttgcaagtacaaggtggattgcgaagcggtccgcggagatatcttcaatcaagtggtgccgcgctgcccaagatgtccggccgacgaacccctggccatcatgaagccggagattgtgtttttcggggaaaaccttcctgagcaattccatagagccatgaagtacgacaaagacgaggtcgatctcctcatcgtcatcggttcctccctcaaggtgcgccccgtggccctgatccctagcagcatcccacacgaagtcccgcagatcctgatcaatcgggagccactgcctcacctgcacttcgacgtggaacttctcggcgactgcgacgtgataatcaacgagctgtgccaccggttgggaggggaatacgcgaaactttgttgtaacccggtcaaactgtcggaaatcaccgaaaagccgccacgcactcagaaggaattggcctacctcagcgaattgccaccgactcctcttcacgtgtccgaggactcgtcgtcgccggaacgcaccagcccaccagattcatcagtgatcgtgactctgctggaccaggcagccaagtccaatgacgatttggacgtgtcggagagcaaaggttgtatggaggagaagccgcaggaggtgcagacctcccgcaacgtcgagagcatcgcggaacaaatggaaaacccggacttgaagaatgtgggaagctcgactggcgaaaagaatgagcgcacctcggtcgcgggaactgtgcgcaagtgctggccaaaccgcgtggccaaggagcagatctcgaggcgcctggatggcaaccagtacctcttcctgcccccgaaccgctacatcttccatggagcagaagtgtactcagacagcgaggacgatgtgctgtcatcttcatcctgcggttccaattcggacagcggtacctgccagtccccttcgctggaggaacctatggaagatgagtctgagatcgaagagttctacaacgggctggaggacgaaccagatgtgccagagcgggcgggcggcgctggattcggcactgacggcgatgatcaggaggcgatcaatgaggctatctcggtgaaacaagaagtgactgacatgaactacccttcgaacaagagc

SEQ ID NO: 53815 - DNA, 1356 bp, Artificial Sequence
  derived and/or modified sequence
atgttcgacatcgaatactttcgcaaagatccgcggcctttctttaagttcgccaaggaaatctacccaggccaattccagccgagcctgtgccataagttcattgcgctgagtgataaagaaggaaagctgttgaggaattacactcagaacattgacacgctcgagcaggtggcagggatccaaagaatcatccagtgtcatggctcattcgccaccgcgtcatgcctcatctgcaaatacaaagtggactgtgaagccgtccggggagatatcttcaatcaggtggtcccacgctgcccgcggtgcccagcggacgagccactggctatcatgaagccggaaatcgtgttcttcggagagaatctcccagagcagttccacagagccatgaaatacgacaaggatgaggtcgatctgctcattgtcattggatcctccctgaaggtgcgcccggttgcgctcatccccagctcaatcccacacgaggtgccgcagatcctcatcaacagagaaccgttgccacatcttcacttcgatgtcgagctgcttggcgattgtgacgtgatcatcaacgagctgtgccaccggctcggaggagagtacgcaaagctgtgctgtaacccagtgaaactgtcagaaatcaccgagaaaccaccgcgcacccagaaagaactggcgtacctgtctgaactgccgcctactccactccatgtttcggaggactcgtcgagccctgagagaacttcacccccggactcctccgtcatcgtgaccttgctcgatcaagctgccaagtcgaatgacgacctggatgtgagcgagtcgaagggatgcatggaagagaagcctcaggaagtccagacttcgcgcaatgtcgagtcgatcgctgaacaaatggagaacccagatctcaagaacgtggggtccagcactggagaaaagaatgagagaacctcggtggcgggaaccgtgcggaagtgttggccgaatcgggtcgcaaaggaacaaatctcacgtcgcctggatggaaaccaatacctgtttctgccgcctaaccgatacattttccacggagcggaagtgtactcggattccgaggacgatgtgctctcctccagcagctgcggaagcaactccgattcgggaacctgccagtcaccgtccctggaggaaccaatggaagatgaatcggagatcgaagagttttacaatggactggaggatgaaccagatgtcccggagcgagctggaggagctggattcggaactgacggcgacgaccaagaagcaatcaacgaagccatttccgtcaaacaggaagtgaccgacatgaactacccatcaaacaaatcc

SEQ ID NO: 53816 - DNA, 1356 bp, Artificial Sequence
  derived and/or modified sequence
atgtttgacattgaatacttccgtaaggacccccgccctttctttaaatttgccaaagagatataccctgggcaattccaaccatccctctgccataagtttatcgcgctcagcgataaagagggtaagcttctccgaaactacacccagaacatcgacacgcttgagcaggtggccgggattcaacgaattattcagtgccatggttcatttgctacagcctcatgtttaatttgcaagtataaggtcgattgcgaagcagtgcgtggggatatcttcaatcaggtggtaccccgctgcccaagatgtcccgccgacgaaccactcgccatcatgaaacccgaaatcgtgttttttggtgagaacctgcccgaacagttccatcgcgcaatgaagtacgacaaggacgaggtggatctgctgatcgtgattggatcatccctaaaggtgaggccggtagccctcataccatcctctatcccccacgaggtgccgcagattctgataaatcgcgagccgctgccccatctccactttgacgtggaattgttgggagattgtgatgtgattatcaatgagctgtgccacaggctggggggagagtacgctaagctgtgttgcaatcccgtcaaacttagcgagatcacagaaaagcctcctcgtacccagaaagagctggcgtatctcagcgaactgcctcccacacctctgcatgtatctgaggactctagcagtcccgaacgtacctcgcctccagattctagcgttatcgttaccttactcgaccaagccgccaaatccaatgatgatcttgacgtgagcgagtcaaaaggctgcatggaggagaagccacaggaagtgcaaacttcaaggaatgtggagtctatcgctgagcagatggaaaatcccgatctgaaaaacgttggaagtagcacaggagagaaaaatgaacgaactagcgttgccgggacggtgcggaagtgctggcccaatcgggtggcgaaggagcagatctcgcggcggctcgatgggaatcaataccttttcctaccaccaaaccggtacatctttcacggggcggaagtctatagcgattctgaggatgatgtgctgagttcgtcgagttgtgggtcaaattcagactccgggacctgtcagagcccctccttggaagaaccaatggaagacgagtccgaaattgaggagttttataacggcctcgaggatgaacctgacgttcctgagagggcgggtggcgcagggttcggtaccgacggagatgaccaggaggcgattaacgaggcaatcagtgtaaagcaagaggtgactgatatgaactatccttccaacaagagc

SEQ ID NO: 53817 - DNA, 1356 bp, Artificial Sequence
  derived and/or modified sequence
atgtttgacatcgaatactttagaaaggaccctcgcccatttttcaagtttgcaaaagagatctaccccggacagtttcaacccagcctttgccataagtttattgcactgtcggataaggagggcaaactcctccggaattacactcagaacatagacaccctcgaacaagtggccggaatacaaagaattatccaatgccatggttcatttgcaaccgcaagctgcctgatctgtaaatacaaggtggactgtgaagctgtcagaggcgacattttcaatcaggtggtcccgcgctgtcctaggtgccctgccgacgaacctcttgccatcatgaagcccgaaattgttttctttggagagaacctgcctgaacaatttcatagagcaatgaagtacgataaagacgaggtggaccttctgatcgtgattggttcctcattgaaagtccgaccagtggccctgattccttcgtcaattccacatgaggtgccccaaattctcattaacagagagccacttccacatcttcactttgacgtcgagctgttgggagactgcgacgtgattatcaatgagctctgtcacagacttggtggcgagtacgcaaagctgtgttgtaaccccgtgaagctctcggaaatcaccgaaaagccgccacggactcagaaagaacttgcctacctttccgaactcccacctactccccttcatgtgtcagaggattcctcaagccctgagagaacctccccaccagatagctccgtgatagtgactctgctcgatcaggcagcaaagtccaatgatgacctggacgtgagcgaaagcaagggatgcatggaggaaaagcctcaggaagtgcagactagcagaaacgtggaatccattgcagagcagatggaaaatccagatcttaagaacgtgggttcatccactggagaaaagaatgagagaaccagcgtggccggaactgtgcgaaagtgttggcctaatcgcgtggcaaaggaacagatctcgaggagactggatgggaaccaataccttttccttcctcctaaccggtacattttccacggagcagaagtgtactcggattccgaggatgatgtgctgtccagctcttcatgtgggtctaatagcgatagcggtacctgtcaatctccttcgctcgaagagcccatggaagatgaatcggagatcgaagagttctacaacggtctggaggacgaacctgatgtgccagagagagccggaggggcaggatttggcactgatggggatgaccaagaggcgattaatgaagcaattagcgtcaagcaagaggtcaccgatatgaattacccctcgaacaaaagc

SEQ ID NO: 53818 - DNA, 1356 bp, Artificial Sequence
  derived and/or modified sequence
atgttcgatatcgagtactttcgaaaggaccctcgcccctttttcaaattcgcaaaggaaatctacccgggacagtttcagccgagcctctgccacaaattcatcgccctgtccgacaaggagggcaagttgctccgtaactacacccaaaacatcgacacgctggaacaagtcgcgggaattcaacggatcatccagtgccatggctcattcgccacggcctcatgcctcatttgtaagtacaaggtggactgcgaagcagtgaggggcgatatctttaatcaagtagtgcctcgctgcccacgctgtccggctgatgagccgctggccattatgaaaccggaaatcgtgttctttggggaaaacctgccagagcaattccaccgcgcgatgaagtatgacaaggacgaagtcgaccttctgatcgtgatcggcagttcattgaaggtgcgcccagtggcgcttatcccctcatcgatcccgcatgaagtgccacagatccttatcaaccgggagccgctcccccatctccactttgatgtggaactgctcggcgattgcgatgtgatcatcaatgaactctgccaccgcctgggtggtgaatacgcgaagctgtgttgcaacccagtgaagctgtcagagatcactgaaaagccgccacggactcagaaggaactcgcctacctgtcagaactgccgccgacccctttgcatgtgtcggaggattcgtcgagcccagaaagaaccagcccaccggactcaagcgtgattgtgactctgctcgatcaggctgcgaagagcaacgacgacttggacgtgtccgaatcaaaaggatgcatggaggaaaagccgcaggaagttcaaactagccgcaacgtcgaatcgatcgctgaacagatggagaacccagacctcaaaaacgtgggttcgtcgaccggcgagaagaatgaacgcacctcggttgcaggcactgtgcgcaagtgttggccaaaccgggtggcgaaggaacaaatcagccgccggcttgacggtaaccaatacctcttcctgcctcctaaccggtacatcttccacggggccgaagtgtactccgactcagaggatgatgtgctgagctcatcgtcgtgcggctccaacagcgatagcggaacctgtcagtccccctccctggaagagccgatggaggacgagtcagaaatcgaagagttttacaacggtctggaggacgagccggatgtccccgagcgagctggtggagctgggttcggaaccgatggcgacgaccaggaagctatcaatgaggcaatctcagtcaaacaggaggtgaccgacatgaactacccttcgaataagtcc

SEQ ID NO: 53819 - DNA, 1356 bp, Artificial Sequence
  derived and/or modified sequence
atgtttgatatagagtacttcagaaaagatccccggccattctttaagtttgcaaaagagatttatcccggacagtttcagcctagcctctgtcataaattcatcgcattatccgacaaagaagggaaattactgcgtaattacacccagaatattgacacccttgaacaagtggccggtatccaaagaatcatccagtgccatggtagcttcgccactgcaagctgcctgatctgcaagtataaggtggactgcgaggccgtgcggggggatattttcaaccaggtggtccctcggtgcccaagatgtccagctgacgaacccctggcaataatgaaacctgagatcgtgttcttcggagagaatttgcctgagcagttccaccgcgccatgaagtacgacaaggatgaggtggacctgcttattgttattggaagtagtctgaaggtaagacctgttgctctgatcccttcctctattccacacgaagttccacagatcctaataaatcgagaaccacttcctcatctgcacttcgatgtggagttactgggcgactgtgacgtgataattaatgagctgtgtcacagactgggaggagagtatgccaaactgtgttgcaatccagttaagctgtcggagattactgaaaagcctcctcgaacccagaaggagctcgcgtacctctccgagctcccccccactccgctccatgttagcgaggactccagcagcccagagcggacatcaccaccagacagctcggtgatagttacattgttagaccaggcggccaaatctaatgatgatttggatgttagcgagagcaaaggctgcatggaggaaaagccccaggaagtacagactagccgcaatgttgagtctatcgctgaacagatggaaaacccagatctgaagaatgtgggtagtagtaccggagagaagaatgaacgcaccagtgttgccggaactgtccgcaaatgttggcctaatcgcgtggcgaaggagcagattagtcgccggctcgatggcaatcaatatctgttcctacctcccaaccggtatatcttccatggtgccgaagtctatagcgactctgaagacgacgtcctgtcgagtagctcttgcggtagtaatagcgacagcggaacatgtcagtccccctcactggaagaacctatggaggatgagtccgaaattgaagaattctataacgggcttgaggatgaacctgatgttccggagcgggccggtggtgcagggtttggtacagacggagacgaccaggaggcgattaatgaggctatctcagtgaaacaggaggtgactgacatgaattatccttcaaacaaatct

SEQ ID NO: 53820 - DNA, 1356 bp, Artificial Sequence
  derived and/or modified sequence
atgttcgacattgaatactttaggaaggacccgcggcctttcttcaagttcgcgaaagagatttacccgggacagttccaaccatccctctgccacaagttcattgctctctctgataaagagggcaagctgctgaggaattacacccagaatatagatactctcgaacaagtggccggaattcagcgcatcatccaatgccatggatcgtttgcgactgcgtcgtgcctgatctgcaagtacaaggtggattgcgaggcggtcagaggagacatcttcaatcaagtggtgccccgctgcccaaggtgtcccgctgatgaaccactggcaattatgaaaccggaaattgtgttcttcggagagaatcttccagagcagttccatcgcgccatgaagtacgacaaggacgaggtggacctgctgatcgtgatcgggtcgagcctcaaggtgcgccccgtggcccttatcccttcttcaatcccgcacgaagtaccgcaaatcctcatcaatcgggagcctctcccacacctccacttcgacgtggaactcttgggagactgtgatgtgatcatcaacgaactgtgccaccggctcggaggagagtacgcgaagctgtgttgcaacccggtgaaactgtcagaaattaccgaaaaaccgccacgcactcagaaagagcttgcttacttgtcagaactgccgccgaccccgctgcatgtgtccgaggacagttcatcacccgagaggacctcgcctccagactcgtccgtgattgtgactctccttgatcaggccgctaaatcgaatgacgatctcgatgtgtccgaaagcaaggggtgtatggaagaaaagccccaggaagtgcagacttcgcgcaacgtggaatcgatcgcagaacaaatggaaaaccccgacctcaaaaacgtcggttcgagcactggcgagaagaatgagagaaccagtgtcgccggaaccgtgcggaaatgttggccgaacagggtggccaaggaacaaatctcccgcaggttggacggaaaccaatacctgttcctgccgcctaatagatacatcttccatggcgcagaggtgtattccgactcggaagatgatgtcctgtcatcgtcatcctgcggcagcaattcggattcaggaacgtgccagtccccgtccctcgaagagcccatggaggatgagtcagagatcgaagagttctacaacggtttggaggacgaaccagatgttccggagagagcgggaggcgccggattcggaactgacggagatgatcaggaggccatcaacgaggcgatctcagtcaagcaggaggtcaccgacatgaactacccgtcaaataagtcg

SEQ ID NO: 53821 - DNA, 1356 bp, Artificial Sequence
  derived and/or modified sequence
atgtttgacattgaatattttaggaaggatcctcgaccattttttaaattcgcgaaggaaatctacccaggccagttccagccatcgctgtgtcataagttcatcgccctcagcgataaggaaggaaagctgctgcgcaactacacccagaacatagacactcttgaacaggtcgccggcatacaacgtattatccagtgccacggatctttcgccaccgcctcgtgccttatttgcaaatacaaggtggattgtgaggcagtgcggggggatatctttaatcaagtcgttcctaggtgtccacggtgtcccgcagacgagcctctggcgatcatgaagcccgagatcgtttttttcggagagaacctgccggagcagtttcatcgggcaatgaagtatgataaggatgaagtggatctcctcattgttatcggaagctcccttaaggtccgccccgtggcactgatcccctcaagtatcccacatgaggtgccacaaattttgatcaatcgggaacccctgcctcacctgcacttcgacgtcgagctgctcggggattgtgatgtcatcatcaacgaactttgccaccgtctgggaggcgagtacgcgaagctgtgttgtaatccggtcaagctcagcgagataaccgagaaacctccccgtacgcagaaggagctcgcttatctcagtgagttacctcccacacctttacacgtgtcagaggatagctccagtcccgagaggactagtccgccagactctagtgtgatagttactcttctcgaccaggccgctaagagcaacgatgatcttgacgtctctgagagcaaggggtgtatggaggagaaacctcaggaggtgcagactagcagaaacgtcgaaagcattgctgaacagatggagaatcccgatctcaagaatgtcggaagtagtaccggcgagaagaatgaaagaacaagcgttgccgggactgtgcgcaaatgctggccaaaccgggtggccaaggagcagatttctcgccggcttgacggcaaccagtacctttttctgccccccaaccgttacatcttccatggcgccgaggtgtattctgattctgaggacgatgtgttgagctcgagctcctgcgggagcaattctgacagtggtacttgccaatccccttcactggaagaacccatggaggatgaatcagagatagaagagttttacaatggtctcgaagacgagcccgacgtacccgagagggcaggtggggcagggttcgggactgacggtgatgatcaagaggctatcaatgaggccattagtgtgaaacaagaagtaaccgatatgaactatccgtctaacaaaagc

SEQ ID NO: 53822 - DNA, 1356 bp, Artificial Sequence
  derived and/or modified sequence
atgtttgatattgagtactttcgcaaagatccgaggcctttcttcaagttcgccaaagagatttatcctgggcagtttcagccgtcactgtgtcacaagtttatagctctctctgataaggaaggtaaactgctgaggaattatacacagaacatcgacactctggaacaagtggccggtattcagcggattatccagtgccacgggtcttttgccaccgctagctgcctgatttgtaaatacaaggtggattgcgaggccgtcagaggggacatattcaaccaagtggttccccgatgtcccagatgccccgctgacgagccccttgcgatcatgaagcccgaaatcgtgttttttggggagaacctccctgagcagttccatagggccatgaagtacgataaagatgaggtcgacctcttaatcgtcatcggttcttctctcaaggtccggcccgtcgcgttgatcccttcatccattccccacgaagtgccacagattcttattaaccgggaaccactgccccatctccactttgacgtcgagcttcttggagattgtgacgttattataaatgagctgtgtcacagactcggaggtgagtacgccaagctttgttgtaacccggtaaaattgagcgagatcactgagaaacccccacgcacccagaaagaacttgcgtatttgtcagagttgcctccaactccactccacgtgagtgaggactcatcatctccagaaagaacatctcctcctgacagttcagtcattgtcacactgctggatcaggctgccaaaagcaatgacgatctggacgtgagtgagtcgaagggttgtatggaagagaaaccacaagaagtgcagacaagcagaaatgtcgagtccattgccgagcagatggaaaaccctgatctcaagaatgtgggtagctctaccggggaaaaaaacgaacggactagcgttgccggaacagtgcgtaaatgttggcctaatcgggtggccaaggaacagatttctaggcggctggatggcaaccagtacctgtttttacccccaaacaggtatatttttcatggcgccgaggtgtactccgattcggaggatgacgtactaagttccagctcgtgcggcagtaattccgacagtggcacatgccagtcccctagcttggaggagcccatggaggacgagtccgaaatagaggaattttacaatggactcgaggacgagcctgatgttcctgagagggcagggggagcaggcttcggtacagacggcgatgaccaggaggccatcaatgaggcaatcagtgtgaagcaggaagtcacggacatgaactacccgtcaaataaatcc

SEQ ID NO: 53823 - DNA, 1356 bp, Artificial Sequence
  derived and/or modified sequence
atgtttgacatagagtactttcggaaggaccccagacctttctttaaattcgccaaggagatctatcccggccagttccagccatctttatgtcacaaattcatcgctctttcagacaaggaggggaagctgttgcgcaattacactcaaaatatcgataccctggaacaggtggccggcatccagaggatcatccagtgtcatgggtcctttgccaccgcctcttgccttatctgcaaatacaaggtggactgtgaggccgtgagaggggacattttcaaccaagtggttccaaggtgccccaggtgccccgccgatgagcctctggcgatcatgaagcccgaaatcgtttttttcggagagaacttacccgagcagtttcaccgagcgatgaaatatgacaaggatgaggtggacttgctcattgtgatcggatccagcttgaaggtgcggcctgttgccctgattccgagcagcattccccacgaagtcccccagattctgatcaatcgagagcctctgccccacctgcacttcgatgtcgagctgctcggcgactgtgatgtgatcatcaacgaactgtgccaccggttgggcggcgagtacgccaaactctgttgtaaccctgtgaagcttagcgagatcactgaaaaacctccaaggacccaaaaagagctggcctacctgagcgaactgccacctacgcctcttcacgtgtcagaggacagctcaagccctgaaaggacatccccccccgattcttccgtgatagtgacgctgctggaccaagccgctaagagtaatgacgatcttgacgtttctgaatccaaggggtgtatggaagagaaaccccaggaggtacagacaagccgcaacgtggagtccattgccgagcagatggaaaacccagatttgaagaacgtgggaagctccactggggagaaaaacgaacggacaagcgtggcggggaccgtcaggaagtgttggcctaatcgtgttgctaaagagcagatttcaaggagactggatggcaaccaatatttattcctacctccaaaccggtacatttttcacggcgccgaggtctactcagattccgaagatgatgtgctgagctcttcgtcttgtggctctaattctgactcagggacatgtcagagcccatctctggaagagcctatggaggacgaatctgaaatcgaggaattttacaacggtctggaggacgaacctgacgtcccggaaagggcagggggagctgggtttggaaccgacggcgatgatcaggaagccatcaacgaggctattagtgttaagcaggaagtgaccgacatgaattacccctccaacaagtca

SEQ ID NO: 53824 - DNA, 1356 bp, Artificial Sequence
  derived and/or modified sequence
atgttcgacattgaatacttcaggaaggacccgcgcccgtttttcaaattcgcgaaggagatctacccagggcagttccagccgtcgctgtgccacaagttcatcgcactgagcgataaggagggtaagctcttgaggaactacacccaaaatatcgataccttggaacaggtggccgggatccaacgcatcatccagtgtcatggctccttcgctaccgcgtcgtgcctgatctgcaagtacaaggtggattgcgaggctgtacggggagatatttttaatcaagtcgtgcctcggtgccccaggtgccccgcggacgagccgcttgccatcatgaagccggagatcgtctttttcggtgaaaacctccccgaacaatttcaccgcgcaatgaaatatgataaagatgaagtcgatctgctgatcgtgattgggtcctcactgaaggtccggcctgtggccctcataccaagctcgatcccgcacgaagtcccacagatcctgatcaaccgcgaacccctgccgcatctccacttcgacgtggagctgctcggagattgcgacgtgatcatcaacgagctgtgccatagactgggaggagaatacgctaagctctgttgtaacccggtgaagctgtcagaaattaccgagaagcccccacgcactcagaaggagctggcctacctgtccgaacttcctccgaccccgttgcacgtgagcgaggacagctcatccccagaaagaacttcaccgccggattcgagtgtgatcgtgacgctgttggaccaggcagcgaaatccaacgacgacctcgacgtgtcggagtcgaaaggatgcatggaagagaaaccacaggaagtgcagacttcgcggaacgttgagagcatcgctgagcagatggagaacccggacctgaagaacgtgggatcctcgactggtgagaagaacgagcgcacctcggtcgcaggaactgtgcgaaagtgctggcctaatcgggttgccaaagaacagatctcacggagactcgatggaaatcaatacctgttcctccctcctaatcgctacatctttcatggagcagaagtgtactcggacagcgaggacgacgtcctctcctcctccagctgcgggtcaaactccgactctggcacctgtcaatcgccttcccttgaagaaccgatggaggacgagtctgaaattgaagaattctacaacggacttgaggatgaaccagacgtgccagaaagagccggcggcgccggcttcggcactgatggagacgaccaagaagcgatcaatgaagccatcagcgtgaaacaggaagtcacggatatgaattacccgtcaaacaagagc

SEQ ID NO: 53825 - DNA, 1356 bp, Artificial Sequence
  derived and/or modified sequence
atgtttgatattgagtactttagaaaggatcctcggccgtttttcaaatttgctaaagagatctatccagggcaattccaaccgtcgctctgtcataagttcattgcactctcagacaaggaaggtaagctgctgcgcaattacacccagaatattgatactttggaacaggtggcaggaattcagaggattattcaatgtcacggatcgttcgcaaccgcctcgtgcctgatctgtaaatacaaggttgattgtgaagccgtgcggggtgatatctttaaccaagtggtgcctcgctgtccacgctgccctgcagatgaaccccttgctattatgaagccggagatcgtgttcttcggggaaaacctgccagaacaattccatcgcgccatgaagtacgacaaggatgaagttgatctgctcattgtgattggctcaagtcttaaggtgaggcctgtggcacttatcccttcgtcgatcccccacgaggtgcctcagattcttatcaatagagagccccttcctcatctgcattttgatgtggaactgctgggtgactgtgatgtcataatcaacgaactgtgccatcgccttggcggagaatacgccaaactgtgctgcaatccggtgaagctgtctgaaattactgaaaagcctccaagaacccagaaggaacttgcgtacctttccgagcttccccccactcctctgcatgtctcggaggacagctcctcccctgaaaggacctcaccaccagattctagcgtaattgtgacccttctcgatcaggccgcaaagtccaacgacgatctggatgtgtccgaatcgaagggatgtatggaagaaaagcctcaagaagtgcaaacctcgcgtaacgtggaaagcatcgcggaacagatggaaaacccagacctgaaaaacgttggttcctccaccggcgagaagaacgaacggacctcagtcgcgggtactgtgcgtaaatgctggccaaaccgggtggcaaaggaacaaataagccgcaggctcgacggaaaccaatatctgtttctgccgcccaaccggtacatcttccacggtgcagaagtgtactcggattccgaagatgacgtcctgagctcgtccagctgtggatcaaacagtgattcgggaacctgtcagagcccaagcctcgaggagcctatggaggacgagagcgaaattgaagagttttacaatggacttgaggatgagccagatgtccctgaaagagctggaggggccggatttggaacggacggagatgatcaagaggctatcaatgaagcaatttccgtgaaacaggaagtgaccgacatgaattacccaagcaacaaatcc

SEQ ID NO: 53826 - DNA, 1356 bp, Artificial Sequence
  derived and/or modified sequence
atgttcgacattgagtatttccggaaggacccaagaccatttttcaagtttgcaaaagaaatctacccggggcagttccagccgtctctgtgccataagttcatagcactgtccgacaaggagggcaaactgctgagaaattacacccaaaacattgatacgctggaacaggtggcgggcatccagaggatcatccagtgccacggctccttcgcgaccgcatcgtgtcttatttgcaagtacaaggtggactgcgaggctgtgcggggagacatctttaatcaagtggtgccgcggtgcccgcgctgtccggcagacgagccgctggcgatcatgaagcctgagatcgtgttcttcggcgaaaacctcccagagcaattccaccgggccatgaagtacgataaggatgaggtggatctgctgatcgtcatcggatcgtcattgaaggtccgcccagtggcactgatcccatcgtccatcccgcacgaggtgccgcaaatcttgatcaatcgcgaaccactgccgcatctgcatttcgatgttgaactgctgggagattgtgatgtgatcatcaacgagctctgccaccggctcggcggagagtatgccaagctctgctgcaacccggtcaaattgagcgaaatcaccgagaaacccccgcgaacccagaaagaacttgcgtacctctccgaactccctccaaccccgctgcatgtgtcggaagattcatcatcgccagagaggacttcgcctccggactcgtccgttatcgttactctccttgaccaagcggcaaagtcaaacgatgacctggacgtgtcggaaagcaagggatgtatggaagaaaaaccgcaagaggtgcagacttcacggaacgtcgaatcaatcgctgaacaaatggaaaaccctgatctgaaaaatgtgggaagcagcaccggcgagaaaaacgagagaacttccgtggctggtactgtgcggaagtgctggcctaacagggtcgctaaggaacagatctcccgccggctcgacggcaatcagtacctgttcctgccgcctaatagatacatcttccacggagctgaagtgtactcagattccgaggacgacgtcctgagctcgtccagctgtgggtcgaattcggactcgggaacctgccagtccccaagcctcgaagaaccaatggaagatgagtccgaaatcgaagagttctacaacggcttggaagatgaaccggacgtgccggaacgcgcgggcggagcgggattcgggaccgacggagatgatcaagaggccataaatgaggccattagcgtgaagcaggaagtgaccgatatgaattacccttccaacaaatcc

SEQ ID NO: 53827 - DNA, 1356 bp, Artificial Sequence
  derived and/or modified sequence
atgttcgacatcgaatacttccgcaaggatcccaggccctttttcaagtttgctaaggagatctatccaggccagttccagccctctttgtgtcacaagttcatcgctctgtcagataaggaaggtaagcttcttcgtaactatacccaaaacatcgatacccttgagcaagtggccggaattcagaggatcatccagtgtcatggatcctttgccacagcttcatgcctcatttgtaaatataaagtggattgtgaggctgtacgcggagatattttcaaccaggtcgtccctcgttgcccaaggtgtcctgcagatgagcctttggccatcatgaagcctgaaattgttttcttcggtgaaaaccttcccgaacagttccatcgcgcaatgaagtacgataaagatgaggtggacttgctcattgtaattggttcttctcttaaggtgcgtcctgtggctctgatcccttctagtataccacacgaagttccacagatcttgattaatagagaacccctgccccacctgcactttgacgtcgaactgttgggtgactgtgacgtcatcatcaacgagctgtgccacagattgggtggtgaatatgctaagctgtgctgtaatccagtgaagctcagcgagatcactgagaagcctcctaggacacagaaggaacttgcatacctcagcgagctcccaccaacccccctccatgtgtcagaggacagttcttcccctgaaagaacttcaccccccgattcctcagtgatcgtcactctgctggaccaagccgctaagtcaaatgatgacctggatgtatctgagagtaagggatgtatggaggagaagcctcaggaggtacagaccagcaggaacgtggaatctatcgccgagcaaatggagaaccccgacttgaagaacgtgggttcttccacaggcgagaagaatgaaagaacttctgttgccggcaccgtcagaaagtgttggcccaacagggttgccaaggagcagatttccaggcgcctggatggtaaccagtacctgttcttgccacctaacaggtacatttttcacggtgcagaggtctactccgactccgaggacgacgtattgtccagcagtagctgcggcagtaatagcgattctggaacttgccagtccccctccctggaggagcccatggaagacgagagtgaaatcgaggaattttacaacggacttgaagacgaaccagatgtccccgagcgcgctggcggtgctggcttcggcactgacggtgacgatcaggaggcaatcaatgaggcaatcagtgttaaacaggaagtcacagatatgaactatccttccaacaagagt

SEQ ID NO: 53828 - DNA, 1356 bp, Artificial Sequence
  derived and/or modified sequence
atgttcgatatcgagtacttccggaaggaccccagaccgtttttcaaattcgccaaggaaatctacccggggcagttccaacctagcctgtgccacaagttcatcgcactttcggataaggaaggaaaactgttgagaaactacactcagaatattgacacccttgaacaggtcgccgggatccaacggattatccaatgccatgggtcatttgccacggcctcgtgtctcatctgtaagtacaaggtcgactgtgaagccgtccgtggagacattttcaaccaagtggtccccagatgcccacgctgcccggccgacgaaccgctggcgatcatgaaaccagagatcgtgttctttggagagaatctgcccgagcagttccatagggcgatgaagtatgataaggatgaagttgatctgctcatcgtcatcggtagcagcctcaaggtgcggcccgtggccctgatcccgtcctctatcccgcacgaggtaccacaaattcttatcaaccgcgagcccctcccgcacctgcatttcgatgtcgagctgctgggggactgcgatgtgattatcaatgagctgtgccacaggctgggcggtgaatacgcgaagctgtgctgcaatccggttaagttgtcagagatcacggaaaagccgccgcgcacccaaaaagagctggcgtacctctccgaactgccgccgactccccttcacgtgtctgaagattcgtcctccccggagcggacctccccgccggactcgtccgtcattgtcacgctccttgatcaggccgccaaatccaatgacgacttggacgtctcggaaagcaaaggctgtatggaagaaaaaccgcaggaggtgcagacttcccgcaacgtggaatctatcgctgagcagatggaaaacccggacctcaagaatgtcggctcgtcgaccggagagaagaacgaacgcacctccgttgcgggcactgtgaggaagtgctggccaaaccgcgtggccaaggagcagatatcaaggcgcctcgatggaaaccagtacctgttcctgccgcccaatcgctacatttttcatggtgcggaggtgtacagcgattccgaggatgacgtcctctcttcgagctcgtgcggatcaaactcagattccggaacctgtcagtcaccatcactcgaagagccaatggaggatgaatcagaaatcgaagagttctacaacggactcgaagatgaaccggacgtgccagagcgagccggaggggccggctttggcactgacggggacgaccaagaagctatcaacgaggcgatctcagtgaagcaggaggtgacggacatgaactacccatcgaacaagtca

SEQ ID NO: 53829 - DNA, 1356 bp, Artificial Sequence
  derived and/or modified sequence
atgttcgacatagagtacttccgaaaggatccacggcccttttttaagtttgccaaagaaatctaccctgggcagttccaaccctccctttgccataagtttatagccctctcagacaaggaagggaagttgctgcgtaactatacccagaacattgacacgctggaacaggtggccggcatccagagaattatccagtgtcatgggtcattcgcaaccgcatcttgtctgatctgtaaatataaggttgactgcgaagcagttcggggtgacatctttaatcaagtagtccctagatgtccacgttgccccgctgacgaacctctcgcaatcatgaaacccgagatagtgtttttcggggaaaacctgcctgaacagttccatcgggccatgaagtacgataaagacgaagtcgatcttctcattgttatcggatcatcactaaaggtaaggcctgtcgctttgatccccagtagcattcctcacgaggttccacaaatcctgattaaccgtgaacccctcccccatctccattttgacgtcgagctcctgggggactgcgacgtgatcattaacgaactctgccatcgcctggggggggagtatgccaaattatgttgtaaccccgtcaaattgagtgagattaccgagaagccccctcgaacgcagaaggaattggcatacctgtccgagctgccacccacgccacttcatgttagcgaggattcatcttcacccgagcgaactagtccgccggatagtagtgtcatcgtaacgctgttagatcaggccgccaagagcaacgacgatctcgatgtttcagagagcaaaggttgtatggaagagaagccacaagaggtgcaaacgagcaggaatgtggaaagtatcgcagaacaaatggagaacccagacctgaagaatgtcggctcttcaacaggagaaaaaaacgagcgaacctctgttgctggtactgttaggaaatgttggcccaaccgcgtggccaaagagcagatctctcggcggctggacggaaatcagtacctgttcctccctcctaaccgctatatcttccacggggctgaggtatattctgattcagaagatgacgtcctgtcttcttctagctgcggctccaattcagatagcggcacttgtcagagtccttctttggaggaaccaatggaagatgagagtgaaatcgaagagttttataatgggctggaggacgagcctgatgtcccagaacgcgcagggggtgcaggttttggcacggatggggatgaccaggaagccatcaacgaggcaattagtgtaaagcaagaggtgacagacatgaactacccaagcaataaaagc

SEQ ID NO: 53830 - DNA, 1356 bp, Artificial Sequence
  derived and/or modified sequence
atgtttgacatagaatattttagaaaggatcctcgaccattctttaaatttgcaaaagaaatctacccaggtcagtttcagccctcactctgtcacaaattcatcgctctatccgacaaagaaggcaaactgctcagaaactacactcagaacattgacacgctcgaacaggtcgctgggatccaaaggattatacagtgccacgggtcattcgccacagcgtcatgtctgatctgtaaatacaaggtggactgtgaagctgtgagaggtgatatcttcaatcaagtcgtaccccggtgtccgcgctgccccgcagatgagcccttggcaataatgaagcccgagatcgtgttcttcggggaaaatttaccagaacagttccatcgggctatgaagtatgataaagacgaagttgatcttctcatcgtaattgggagttctctcaaggtgcgccccgttgctcttatcccttcttctatccctcacgaagtgccccagatactgataaacagggagccgcttccacatctgcatttcgacgtggaactgttgggcgattgtgacgtgatcataaatgagctttgccaccggcttggcggagagtatgcgaagctctgctgcaatcccgttaagttgtcagagattaccgagaagccgccgcgaacccagaaggagcttgcttatctgtcggagctgcctccaacacctttgcacgtcagtgaggattcctctagccccgaacgaacatcgccaccggattcgagtgtgattgtcactctcctggatcaggcagctaaaagtaatgacgatctcgacgtttcggagtcgaaggggtgcatggaagagaaacctcaggaggtgcagacatctcggaacgtggagtctatcgcagaacaaatggaaaatcctgacttaaaaaatgtaggttcatccaccggggaaaagaacgagcgaacgagtgtcgctgggaccgtgagaaaatgttggcctaacagggtggctaaagagcaaattagccgcaggcttgatgggaaccagtacctgtttctcccaccgaacaggtacatttttcacggcgccgaggtctatagtgatagcgaagacgatgtgttgtcatcgagttcctgtgggtccaatagcgattctggcacatgtcagtctcccagcttggaggaaccaatggaggatgagtcagagattgaggagttctacaatgggttagaggatgaacctgatgtccctgaaagggccggcggtgccggctttggtactgacggtgacgatcaggaggccatcaatgaggctatatcagtgaaacaggaagtgacagacatgaattatccaagcaacaagtct

SEQ ID NO: 53831 - DNA, 1356 bp, Artificial Sequence
  derived and/or modified sequence
atgtttgatattgagtactttaggaaagacccacggcctttctttaagttcgctaaggagatttatcccgggcagttccagccctccctttgccacaagttcatcgcgctctctgacaaggaaggcaagctgctccgcaactatacccagaatattgacactctggagcaggttgctgggatccagcggattatccaatgccatgggtcctttgcaactgcgtcttgcctgatctgtaaatacaaagtagactgcgaggccgtgcggggcgacatctttaatcaggttgtgcctcggtgcccgagatgtcctgccgacgagccgcttgctattatgaaaccggagatcgtgtttttcggcgaaaacctgccagagcagtttcacagggccatgaagtatgacaaggacgaagtggacctcctgattgtcattggatctagcctgaaggtcaggcctgtagccctgattccaagttcaattcctcacgaggtgccccagatcttgatcaatcgagagccccttcctcacctccatttcgacgtcgaacttctgggtgattgcgacgtgatcataaacgagctttgtcatcggctcggaggggagtacgccaagttgtgttgcaatcccgtgaagttgagcgagattacggaaaagcctccgagaacacagaaggaactggcttacctctcagaactgccaccaacccccctccacgtgagcgaggacagttcctcacccgagaggacgagccccccagattcctctgtaatagtgactctgctggatcaggctgctaagagtaacgacgatttggacgtaagcgagtctaaaggctgcatggaagaaaagccacaagaggtgcaaacctctaggaatgtagagtctatcgcagagcagatggaaaatcccgatttgaagaacgtagggtcctccaccggagaaaagaatgagcgaacgtcagtggcgggcactgtccgcaagtgttggcccaacagagtggcaaaagaacagatctctcggagactggacgggaatcagtacctgttcctcccacctaaccgctatatcttccatggcgcagaggtgtactcagattcagaggatgatgtattgagctctagttcctgcgggtctaatagtgatagtggcacctgccagagcccaagtcttgaggagccgatggaggacgaaagcgagatcgaagagttttataatggtttggaggacgagcccgatgtgcctgaaagggcagggggagcggggttcgggaccgatggagatgaccaggaggccatcaacgaagctatatctgtcaaacaggaagtgaccgacatgaactatccttcaaataagagc

SEQ ID NO: 53832 - DNA, 1356 bp, Artificial Sequence
  derived and/or modified sequence
atgttcgacattgaatatttcagaaaagaccccagaccatttttcaaattcgccaaggagatttatccggggcagttccagccttcattatgccacaagtttatcgccctgagcgataaggagggcaaactgttgcggaactacactcagaatattgataccctggagcaagttgccgggatccagcgaattatccagtgtcatggatctttcgccacagcatcctgcctgatatgtaaatacaaagtagattgcgaggcagtccgcggtgacatttttaaccaggtggtgcctcgctgtccacgttgtccagccgatgagcccctcgcgatcatgaaaccagagattgtcttctttggcgaaaacctccctgagcagttccacagagcaatgaaatatgataaggatgaagtggacttgcttattgtgattggtagcagcctcaaggtcagacctgtggccctgattccaagctccattccccacgaggttcctcagattctgattaatcgggagccgctccctcaccttcatttcgatgtggagctcctgggcgactgtgatgtgatcattaatgaactgtgccatagattgggcggggaatacgctaagctgtgctgtaatccggtcaaactgtccgagattaccgagaaacctccccggactcagaaagagttagcctacctgtcagaattgcccccaacccctctacacgtctccgaggacagtagtagccctgagcggacttccccacccgacagctctgtgatcgtgactctcctcgatcaggcggctaagagcaatgatgatctagatgtttccgaatccaagggctgtatggaggagaagccccaggaagtgcagacgtctcggaacgtcgaatcaattgccgagcagatggaaaatccagacttgaaaaatgtgggatcctctaccggcgagaaaaacgagagaactagtgttgcaggcaccgtccggaagtgctggccaaaccgggtggccaaagaacagattagtaggcgattggatgggaatcagtacctttttctgcccccaaataggtacatcttccatggggcagaggtctattctgacagcgaggatgatgtcctaagctcaagcagttgtgggtccaactcggactcagggacatgccaatcaccgtcccttgaggaacccatggaggacgagagcgagattgaagaattctacaatgggctggaggatgagcccgatgttcctgaacgcgccggaggtgccgggttcggaacagacggagatgatcaggaggccatcaacgaggcaatatctgttaagcaggaagtgaccgatatgaattacccctccaacaagtcc

SEQ ID NO: 53833 - DNA, 1356 bp, Artificial Sequence
  derived and/or modified sequence
atgttcgacatcgagtattttaggaaagatccaaggcctttcttcaaattcgctaaggagatataccctggtcaattccaaccatccctgtgtcataagttcattgctttatctgacaaggagggcaagctgctacggaactatacacaaaatattgatacacttgaacaggtggcagggatccaacgaatcatacagtgtcatggatcctttgccactgcctcatgcctgatctgcaaatacaaggtggactgcgaagctgttcggggcgacatcttcaaccaggtagtgcctagatgcccccgctgccctgccgatgaacccttggctattatgaaaccagaaatcgtgttttttggcgagaacctgcccgaacaattccacagagctatgaagtacgataaggacgaggtcgacctgctcattgtcatagggtcaagccttaaggtgcgccctgtggccctcattcccagctctattcctcatgaagtgccacagatcctaatcaacagggaacctcttccacacctccacttcgacgtggagttgctgggggactgcgacgtcattatcaatgagctttgccatcgactgggcggggagtatgcaaaactgtgttgcaacccagtcaagctgtcagaaatcaccgaaaagcccccgagaacacagaaggagctggcctatctgagtgagttgcctcccacacctttgcacgtgagcgaagactcttctagtcccgagcgaacaagtccaccggactccagcgtaatcgtgacattactagaccaagcagctaaaagtaacgatgacttggacgtgtcagaatctaaaggatgcatggaggagaagccacaggaggtgcagacaagcagaaatgtggaaagtatcgcagagcagatggagaaccccgatctgaagaacgtcggctcgtccaccggagagaaaaatgaaaggaccagcgttgctgggacggtccgaaagtgctggccgaaccgcgtggctaaagagcagatctctcggcgccttgacggcaatcagtacctcttcctaccacctaacagatacattttccacggcgctgaagtttattctgatagcgaagatgacgtgttatcttcatcaagctgtggttcaaactctgacagtgggacttgtcaaagccctagcctcgaggagccaatggaggacgaaagcgaaatcgaggaattttacaacggcctggaggacgaacccgatgtgcctgaaagggccgggggtgcaggattcgggacagatggtgatgaccaggaggccatcaacgaggcgatctccgtcaaacaggaggtgacagacatgaactatccaagcaacaaaagt

SEQ ID NO: 53834 - DNA, 1356 bp, Artificial Sequence
  derived and/or modified sequence
atgtttgatattgagtatttcagaaaagaccccaggccattctttaagtttgcaaaggaaatctaccctggacagttccagcccagcctttgccataagttcattgcactgagcgataaggaaggtaagctcctgaggaattacactcagaacattgacactctcgaacaggttgcagggattcaaagaataatccaatgtcacgggtcttttgcgaccgcctcctgccttatttgtaaatacaaagtggattgcgaagcggttcgaggagacattttcaatcaagtggtgccaaggtgtcctagatgccctgctgatgagcccctggcaatcatgaagcctgagatagtcttttttggtgagaacctgcctgagcaatttcatcgggcaatgaaatacgataaggatgaggtcgatctgcttatcgtcattggctccagcctgaaggtgcggcctgtggctcttataccgagctccatcccccatgaagtgcctcagatactcattaaccgagaacctctcccccatcttcattttgatgtggagttgcttggcgattgtgatgtgattatcaacgaactgtgtcaccggctgggtggcgagtacgctaaactttgctgtaatcctgtgaaactttccgagataacggaaaagcccccaaggactcaaaaggagctggcatacctgtcggagctgcctcctacccctctgcacgtgtcagaggactcgtcatcacctgagcgcacttcacctcctgattcgtccgtgatcgtgactctgctcgatcaagcggcaaagtctaacgatgacctggacgtgtcggaaagcaagggctgtatggaagaaaaaccccaagaagtgcaaacctcccgaaatgttgaatccatagcagaacaaatggaaaaccctgaccttaagaacgttggaagcagcaccggagagaagaatgaacggacttccgtggcaggtactgtgagaaaatgttggcccaaccgggtggcaaaggaacaaatctcccgtcgcctggacggaaaccaatacctgttcctcccaccaaacagatacattttccatggtgccgaggtgtatagcgactctgaagatgacgtgctgtcaagcagctcctgcggatccaactcggactcaggaacctgtcaatcgccttcacttgaagaacctatggaagatgaatcagagatcgaggagttttacaacggtttggaagatgaaccagatgtccctgagcgggcaggaggagcaggttttggcaccgatggagatgatcaagaggcaatcaacgaagccatttcagtgaagcaggaagttactgacatgaactatccttcgaacaagtcg

SEQ ID NO: 53835 - DNA, 1356 bp, Artificial Sequence
  derived and/or modified sequence
atgtttgacattgagtacttccggaaggacccaagaccatttttcaaatttgcaaaggaaatttacccgggacagtttcagccaagcctgtgccacaagtttatagcccttagcgacaaagagggcaaacttctgaggaattacactcaaaacatcgacaccctggagcaggtggcaggcatacaacggataatccagtgtcatgggtcatttgctaccgccagttgcctgatctgcaaatataaggtagactgcgaagctgtccgtggtgacattttcaatcaggtggttcctagatgtccgcgctgtccagcagacgaacccctggcaattatgaagcccgaaattgtcttttttggcgagaatctccctgaacagttccaccgtgccatgaagtatgacaaggatgaagtcgatctgctcatcgtcatcggctcttccctgaaggttaggcccgtggcattaattcctagctccatcccacacgaggttcctcaaatcctgatcaaccgcgaaccactgcctcacttgcacttcgatgttgagctgctgggagattgcgatgtcatcattaacgagctgtgtcatcgcctgggtggagagtacgcaaaactctgttgcaatccggtgaagctcagtgagatcacggaaaagcctccgcgaacccagaaggaactggcttacttaagcgagctgccacctacaccgctccacgtgtctgaggattctagttcccccgaacggacttcaccccccgattcttcagtcattgtcacgctgctagatcaggccgctaagtccaacgacgacttagatgtaagcgagtccaagggatgcatggaagaaaagccccaagaggtacagaccagtaggaacgtggagagtattgccgaacagatggaaaatccggatctcaaaaacgttggtagttccactggcgaaaagaacgagcgcaccagtgttgccggtaccgtgaggaaatgctggccaaatcgggtggccaaagaacagatttcacgccgactcgatggaaaccagtatttgtttctgccacctaatcgctacatcttccatggtgccgaagtttacagcgatagcgaagacgacgtcttaagcagctcatcctgcggtagtaattcggattcaggtacatgccagagcccttcattagaagaacctatggaagacgagtctgagatagaggaattctataacggactggaggatgagcctgatgttccagagagggctgggggtgcaggctttgggacggacggggatgatcaagaagcaattaatgaggccatttcggtgaaacaggaagttactgacatgaattacccttccaacaagtca

SEQ ID NO: 53836 - DNA, 1356 bp, Artificial Sequence
  derived and/or modified sequence
atgttcgatatcgagtacttcagaaaggaccctcgccctttctttaagttcgctaaagagatctaccctggtcagtttcagcctagtctctgccataagtttattgctttgagcgataaggaaggaaaattacttcgaaattatacccagaatatagacactctcgagcaggtcgccggcatacagaggataatccagtgccatggatctttcgccacagcaagttgccttatttgtaagtacaaagtggattgcgaggctgtaaggggcgatattttcaaccaagtggtccctcggtgtccgcgctgccctgcagatgaacctctggccattatgaagccagagattgtctttttcggagaaaatttgcccgagcagtttcacagggccatgaagtacgacaaagacgaggtcgacttactgatagtgatcggttcatctttgaaggtaagaccagttgcgctaattccctcttccataccgcacgaagtgccccaaatcctcatcaaccgggaaccgttaccccaccttcattttgatgttgagctgctgggcgattgtgatgttattatcaacgaattgtgccatcgactgggaggggagtatgccaagctctgttgcaatccagtcaaactttccgagataaccgaaaaacctcctagaacacagaaggaactcgcgtacctgtcagagttgcctccaacacctttgcacgtcagcgaggatagctcttctcccgaaaggacctcgcctcccgatagttccgtcattgtgacccttcttgatcaggccgcaaaatcaaacgatgacctcgatgtctctgagtccaaggggtgtatggaggagaagcctcaggaggtgcagaccagcagaaatgtcgaatccattgcggagcagatggagaatccagacttgaagaatgtgggatcctccactggagagaaaaacgagcgaaccagcgtggcgggaaccgtgcgtaagtgttggcctaatcgggtcgccaaggaacagatctcacggcggttggatggtaaccagtacctcttcctccctcccaacaggtatatctttcatggtgccgaggtgtactcggatagcgaagatgatgttcttagctcttcatcttgtggttccaatagcgacagtggcacgtgccagtcacccagcttagaagagccgatggaagacgagtccgagatcgaagagttttataatggactggaggacgaaccagacgtacctgaaagagccggaggtgccgggtttggcacggacggcgacgatcaagaagcaattaacgaagccatctcagtgaaacaggaggtcaccgatatgaattacccatcaaacaagtct

SEQ ID NO: 53837 - DNA, 1356 bp, Artificial Sequence
  derived and/or modified sequence
atgttcgatatcgaatactttagaaaggatcccagacctttttttaagttcgccaaggagatttatccgggacagttccagccatccctgtgccacaagtttatcgcactgtctgacaaggagggcaaactgctccgaaattatacccagaacatcgatactcttgaacaggttgcgggcattcaacgaattattcaatgtcatgggtcattcgcaacagcctcatgtttaatctgcaagtacaaggttgattgtgaagccgtgagaggcgacattttcaatcaggtcgtgcctaggtgtcctaggtgccctgctgacgagcctctagctatcatgaagcccgaaatcgtgttcttcggagaaaatctgcctgaacagtttcaccgagctatgaagtacgataaggatgaagtggatctgctgatcgtcattggatcttcgttgaaagtgagaccggtcgcactcattccctcaagtataccccacgaagttcctcagatcctaatcaacagagaacctctcccccaccttcactttgatgtcgagctgctgggggattgtgacgtgatcattaatgaactctgccatcgactcgggggcgaatatgctaagttgtgttgtaacccagtcaagctaagtgagatcacagagaaaccaccaagaactcaaaaggagctcgcctaccttagcgaactgccacctacacccttgcatgtctcagaagattcctcttcccctgagcgaacttctccaccagactccagtgtgatagtcacattgctggaccaggccgctaagtctaatgatgatctggacgtctctgaatccaaaggttgtatggaagagaaacctcaggaagtgcagacctctcgaaatgtcgaatccatcgcggaacaaatggaaaaccccgacttgaagaacgtcggatcctccactggcgagaaaaatgagaggacaagtgtggcgggtactgtccgaaaatgctggccaaaccgtgtcgctaaggagcaaatctcccgcaggctggatggcaatcagtacttatttcttccgccaaacaggtacatatttcacggggctgaagtctactccgacagcgaggacgacgtgctgagcagctctagttgtggatcaaactcagattctggcacatgccagtcgccatcactcgaggagcctatggaggacgagtccgaaattgaagagttctacaacggtctggaagatgagcctgacgtgccggagcgtgccggcggcgctggattcggcaccgacggggacgatcaggaggctattaatgaagccatttccgtcaagcaggaggtgaccgatatgaactatccttccaataagtct

SEQ ID NO: 53838 - DNA, 1356 bp, Artificial Sequence
  derived and/or modified sequence
atgttcgatatagaatactttcgaaaggaccctcgccccttcttcaaattcgcgaaagagatttacccaggccaatttcaaccttccctctgtcataagtttattgccctgtcggataaagagggtaaattgcttcgcaattacacccagaacatcgacactcttgaacaagttgcaggtattcaacgcatcatacaatgtcatggatcatttgcaaccgcatcctgtctgatctgcaagtacaaggtcgactgtgaagccgtcagaggggatatcttcaaccaagtggtcccacggtgtcctcggtgccctgccgatgagcccctggctataatgaaacctgaaattgtcttttttggcgagaaccttcctgaacagtttcatcgtgcaatgaaatacgacaaggatgaagtggatcttttgatcgtcattggttccagcctgaaggtccgccccgtggcattgatcccctcctcgataccgcatgaggtgccgcagattctcatcaaccgagagccattgcctcacctgcatttcgatgtggaactgctcggcgactgtgatgtgataatcaacgaactttgtcacagactcggcggggaatatgcaaagctgtgctgtaacccagtcaagctcagcgaaattaccgagaaacctcccagaacccagaaggagttggcatacctgtccgaactgcctcccaccccgctgcatgtgagcgaggattcatcttcgcctgaaaggacttccccaccagatagctcagttatcgttactctgctcgatcaagcagctaaaagcaacgacgacctcgacgtgtcggaatccaagggatgcatggaagaaaagccacaagaagtgcaaacctccagaaacgtggaatcgatagcagagcaaatggagaaccctgacctcaagaacgtcggttcctcgaccggagagaagaacgagcgtacttccgtggctggaacggttcgaaagtgctggcctaatagagtcgccaaagaacagatctcccgcagactcgatggcaatcagtacttgtttcttcctcctaatcgttacatttttcacggtgcagaagtttactccgactcagaagatgacgtcctgtccagctcaagctgtggatccaattcagactccggtacttgtcaaagccctagccttgaagaacctatggaggacgagtcagagatcgaagagttctacaatggcctggaagatgaacctgatgttccagagcgagctggaggagcaggttttggaaccgacggggacgaccaggaggcaattaacgaggcaatcagtgtgaagcaggaagtgactgatatgaactatccatcaaataagtcg

SEQ ID NO: 53839 - DNA, 1356 bp, Artificial Sequence
  derived and/or modified sequence
atgttcgatattgagtactttagaaaggatccccgtccattcttcaaattcgcgaaggagatttacccaggacagttccaaccgtcattgtgccataagtttattgcactatcggataaggagggtaaattgctacgtaattatactcaaaacatcgatactctagagcaggtcgccggtatccaaagaataattcagtgtcatggatcttttgcaacagcttcatgcttgatttgtaaatacaaggtggactgtgaagcggtacgtggggacatctttaaccaagtcgtacctaggtgccctcgctgtccagcagatgaaccacttgctattatgaagcctgagatcgtcttctttggtgaaaaccttccagaacaatttcatagagccatgaagtatgataaagacgaagtggatttgctaattgtcatcggttcctcgctaaaggtccgtccagtagctctcattccgtcctctattcctcatgaggtaccacagatcctaatcaacagagagccactgccacatcttcattttgatgtggagttgttaggagattgcgacgtcattattaatgagttgtgtcaccgacttgggggtgagtatgccaagctctgttgcaatccggttaagttgagtgagatcactgaaaagccacccagaactcaaaaggaactcgcatatctctccgaactcccaccaaccccactacacgtttctgaagattcttcaagtcccgagcgaacttcgccacctgatagttctgtaattgttactctacttgatcaagcagcaaagtcgaatgatgatctcgatgtctcggaatctaagggttgtatggaagaaaagccacaggaagttcaaacaagcagaaatgtagaatctattgccgaacaaatggaaaacccggacctcaaaaatgttggatctagtactggtgaaaagaacgaacgtacatcagtggcaggaactgttcgaaagtgttggccaaaccgcgttgctaaggaacaaatctcacgacggttagatggaaatcaataccttttcttgccaccaaacagatatattttccacggagccgaagtttattcagactcagaagacgatgttctatcgagttcttcttgtggttctaattcggactctggtacgtgccaatctccgtctttggaggaaccaatggaagatgaatcagagattgaagagttttacaatggacttgaggacgaaccggatgtgccagagcgtgctgggggagcaggattcggaactgatggtgatgatcaagaggccattaatgaggcgattagtgtgaaacaagaggtgactgatatgaattacccatccaacaagtct

SEQ ID NO: 53840 - DNA, 1356 bp, Artificial Sequence
  derived and/or modified sequence
atgttcgacatcgaatacttcaggaaggaccctagaccatttttcaaatttgcgaaggaaatctaccccggacagttccagccgtccctgtgccataagtttatcgcgctgtccgacaaggagggcaagctgcttcgcaactacactcaaaacatagataccctggaacaggttgctggtatacagaggattattcagtgccacggttcgtttgcaaccgcctcttgtcttatatgcaagtataaggtggattgtgaggcagttcggggtgacattttcaatcaggtggtgccaagatgtcctcgctgtccagcggatgagccacttgcaatcatgaaacctgaaattgtgttctttggggaaaatcttccagagcaattccatcgggcgatgaagtacgataaagatgaagtcgatcttctgatcgtcattggatcctccctgaaggtccggcctgtggccctcatcccctcctcgattcctcacgaagtgccacagatactgattaacagggaacctctcccgcacctccactttgatgtggagcttcttggtgattgcgatgtgattatcaacgaactttgtcataggttggggggcgaatacgccaagttgtgttgcaaccctgtcaagctgtcagagattaccgagaagcctccacgtactcagaaagaactggcatacctttcagaactccctccaacgccactgcatgtgagcgaagattcgtcctcgcccgagcggactagcccccctgacagcagcgtcatcgtgactctgcttgaccaggcagccaagagcaacgatgatctggatgtgtccgagtccaagggatgcatggaggaaaaaccacaggaagtgcagactagtcgcaatgtggaaagcattgcggagcaaatggaaaatcctgatctgaagaacgtcgggagctccactggcgagaagaatgaacgtacctccgtggccggtactgtgcggaagtgttggccaaatagggtggccaaagaacagataagccggcgattggatggaaatcaatacctctttctcccgcctaaccgttacatttttcacggcgctgaggtgtacagcgacagcgaagatgatgtgctttcgtcaagcagctgtggttcgaattccgatagcggaacctgtcagtcgccgtccctggaagagccaatggaagatgaatcggaaattgaagagttctataacggacttgaggatgagcctgacgttccagaacgtgccggaggcgcaggatttggtactgacggtgatgatcaagaagcaattaacgaagcaattagcgtcaaacaagaagtgaccgatatgaattacccatccaacaagagc

SEQ ID NO: 53841 - DNA, 1356 bp, Artificial Sequence
  derived and/or modified sequence
atgtttgacattgagtacttccggaaagacccgcgtcctttcttcaaatttgccaaagagatctacccagggcaatttcaaccgtcgctctgtcacaagttcatcgccttgtcggacaaagaaggaaaacttctccggaattacacgcagaacatcgacactcttgaacaggtcgcgggaattcagcggattatccaatgccatggttccttcgccaccgcctcgtgcctcatctgtaagtacaaagtcgactgcgaggccgtgcggggagacatcttcaatcaggtcgtgccgcgctgcccccgttgtcccgcagacgaaccactggctatcatgaaaccagagattgtgttctttggcgaaaatctgcctgaacagtttcaccgggctatgaagtacgataaagatgaggtggacctgctcatcgtgattggctcctcactcaaggtgcgcccggtcgccctgataccgagttccatcccgcatgaggtgccacaaatcctcatcaatcgagaaccactgccgcacctgcatttcgatgtggaactgcttggcgactgcgatgtcatcatcaacgaactctgtcaccgcctcggaggagaatacgcgaaactctgctgcaatcccgtgaagttgtcagagatcactgagaagccaccgcggactcaaaaggaactcgcctacctgtccgaactgccgccgactccgctgcatgtgtcggaggactcatcaagcccagagcgcacgtcaccacccgattcgtcggtgatcgtgactctgctcgaccaggcggcgaagtccaatgatgatttggacgtatcggagtccaaaggatgcatggaggagaagccgcaggaggtgcaaacgagcagaaacgttgagagcattgcggaacagatggaaaacccagatctcaagaacgtgggaagctccacgggagaaaagaacgaacgcacctcagtggcagggaccgtgagaaagtgctggccaaatcgcgtcgcgaaggagcagatcagccgccggctcgacggaaaccagtacctgtttttgccgccaaatcgctacatatttcacggggcagaagtgtacagcgactcggaggacgatgtgctgtcctccagctcatgcgggtccaactcagattctggtacctgtcagtcgccctcactggaagaaccgatggaggacgaatctgaaattgaggagttctataacggactcgaggacgagcctgacgtccctgagagagcgggaggggccggattcggcacggacggagacgatcaagaggccatcaacgaagccatctcggtgaagcaggaagtcaccgacatgaactatccctcaaacaagagc

SEQ ID NO: 53842 - DNA, 1356 bp, Artificial Sequence
  derived and/or modified sequence
atgtttgacattgaatattttaggaaggatccacgccctttcttcaagttcgcgaaggagatctatccgggtcagttccagcccagtctgtgtcacaaatttatcgcactgagcgataaagagggcaagctactgcgaaattacacgcaaaacatcgacacactggagcaagtcgccggcatccagagaatcatacagtgtcacggatccttcgccaccgcctcctgtctaatttgcaagtataaggtggactgcgaagccgtccgtggcgacatttttaatcaggtagtacccaggtgcccacgatgcccagccgacgaaccattggccattatgaagcctgagatcgttttcttcggtgagaatcttccggagcagtttcatcgagcgatgaagtacgataaggatgaggttgacttgttaattgtgattggctccagcctgaaggtgcggccagttgccttgattccctcgtcaataccccacgaggtgccacagatcttgattaatcgggagcctcttcctcatctgcacttcgatgtcgagctgctcggcgactgcgatgtgataattaacgagctctgccatcgcctgggcggcgagtacgccaagctgtgctgcaatccggtgaagttaagcgaaatcacggagaagccacccagaacgcaaaaggagctggcctacctttcagagttaccccccactccgctgcatgtgagtgaggactcctcctcgcccgagcgaactagcccgccagacagctccgttatcgtgaccttgttggaccaggcagccaaatctaatgatgatctggatgtgagtgaaagcaaggggtgcatggaggagaagccacaggaggtccagacctcgcgtaatgtcgagagcattgcggagcagatggaaaacccggatctcaagaatgtgggctcctccacgggtgagaaaaatgagcgaacctctgtggccggaactgttcgcaagtgctggccaaaccgcgtggcaaaggaacaaatcagtcgaagattggatgggaaccagtatttgttcctcccgcccaatcggtacattttccacggagccgaggtctactcggatagtgaggatgatgtcctgtcctcctctagctgcggcagcaacagcgactcgggaacgtgtcagtcgccgagcctggaagagccgatggaagatgagtcagaaattgaggaattctataatggcctagaggatgagccagacgtgccggagcgcgccggcggcgccggctttgggactgacggggacgatcaggaagccataaatgaggccatatcggtgaaacaggaggtaacggacatgaactatccgtccaacaagagc

SEQ ID NO: 53843 - DNA, 1356 bp, Artificial Sequence
  derived and/or modified sequence
atgtttgacatcgaatactttagaaaagacccaaggccgttttttaagttcgccaaagaaatctacccagggcaattccagccatccctgtgccataagttcattgctctttccgacaaggaaggcaagctgctccgcaactatacgcaaaatattgacacactcgaacaagtcgccggcatacagcgcattattcaatgccacggctcttttgcgaccgcctcctgtctgatttgcaaatataaagttgactgcgaggcagtcagaggggatatattcaaccaggtggtcccgcgatgtccgcgatgcccagctgacgaaccactggctatcatgaagccagaaattgtgttcttcggagagaacttgcccgaacagtttcatagagcaatgaaatatgataaggatgaagtagacctgttaatcgtgataggctcttcacttaaagtgaggccagtggccttgattccaagcagcattcctcacgaagtccctcagattttgattaatagagaacctctgccacacctgcacttcgatgtcgaacttctgggtgactgcgacgtgatcatcaacgaattatgccataggcttggaggcgaatacgccaagctctgctgtaaccctgtcaaactctcagagatcaccgaaaaaccacccaggactcaaaaagagctggcttacctctctgaactcccacctaccccccttcacgtctcagaagactcgtcttctccagagagaacctctccccctgacagcagcgtgatcgtgactctgttggaccaggcagctaagtccaatgacgatctggatgttagcgaatccaaaggctgcatggaggagaagccacaggaagttcaaaccagccgcaacgtagagtccatagcggaacagatggaaaaccctgacctcaaaaacgtgggcagctctaccggtgaaaaaaatgaaaggacatcggtggctggaaccgtgaggaaatgttggccaaatagggttgccaaggagcagataagcagacgactcgatgggaaccaatacttatttctgcctccgaaccgttacatctttcacggcgctgaagtgtactcagactcagaggatgacgtcctgtcgagcagtagctgcggaagtaatagtgacagcgggacctgtcaaagcccaagcctggaggagccaatggaggatgagtctgagattgaagaattctacaacggactggaagacgagccggacgtgcctgaaagggcgggaggagctggattcggcacagacggcgacgatcaagaggccatcaacgaagcgataagcgttaagcaagaggtgaccgatatgaactatccaagcaacaagagc

SEQ ID NO: 53844 - DNA, 1356 bp, Artificial Sequence
  derived and/or modified sequence
atgtttgatatcgaatatttcaggaaagatccaagaccatttttcaagtttgcaaaggagatttatcctgggcagtttcagccatccttgtgccacaagtttatcgccctgtctgataaagaagggaaactgttgcggaattacacgcagaacatagataccttggaacaggtcgctggcatccagcgcatcatccaatgccatggaagctttgcgaccgccagctgcctcatctgcaaatataaggttgactgtgaggcggtccgaggggacatctttaatcaggtagttccgcgctgtccaaggtgtcctgcagacgaacccctggcgatcatgaagccagagatagtgttcttcggtgaaaatctgcccgaacagttccacagggctatgaagtacgacaaggatgaagtggacctgctgatcgtcattgggagctccctgaaagtgcggcctgtagccctgattccatcctccattccccacgaggttcctcagatactcattaaccgcgagccgctcccccatctccacttcgacgtagagctcctgggcgactgtgacgtgatcatcaatgagctgtgccaccggctgggtggcgaatatgcgaagctgtgttgtaatcccgtgaagctgtccgagataaccgagaaaccaccccgaactcagaaagagctggcttacctgagcgagttgcctcccactcccttgcacgttagtgaggattcttcttcccctgaacggacatctcctcctgacagcagcgtcattgtaaccctcctcgaccaggctgccaaaagtaatgacgatcttgacgtgagcgaatcaaagggttgcatggaggagaagccacaggaggtccagacttcccggaacgtagaatctatcgcggaacaaatggagaatcccgacctcaaaaacgtcggaagcagcacaggtgaaaaaaatgaaaggacatccgtggccgggactgttaggaaatgttggcccaatagggtggctaaggaacaaatcagtcgacggctcgacgggaaccaatatctcttcctgcccccaaataggtacatttttcatggagctgaagtctacagtgatagtgaggacgatgtcttgtcctctagttcctgcgggtccaactctgatagtggaacctgtcagagtccaagcctggaagagcccatggaagacgagtcagaaatcgaggagttctataatggactggaggacgagccagatgttccagagagagccggcggggcaggcttcggaaccgacggagatgatcaggaggccattaacgaagcaatatccgtgaaacaagaggttaccgacatgaactatccttccaacaagagc

SEQ ID NO: 53845 - DNA, 1356 bp, Artificial Sequence
  derived and/or modified sequence
atgttcgacatcgaatactttagaaaagatccgcgaccgttcttcaagttcgcaaaagaaatctacccgggtcagtttcaaccttcgctctgccataagttcatcgcactgtcagataaggaaggcaagctcctgcgcaactacacccagaacattgatacgctggaacaggtggcgggcatccagcggatcatccagtgccatggctcgttcgctaccgcgtcatgcttgatctgcaagtacaaagtggattgcgaggccgttcgcggagacatctttaatcaggtcgtgcccagatgtcctaggtgccctgcggacgaaccgctggcaattatgaagcccgagatcgtgttttttggcgagaacctgccggaacagtttcatcgggccatgaaatacgacaaggacgaagtggacctcctgatcgttattgggtcgtcgctgaaggtgcgccctgtcgcgctgatcccaagctcaatcccacacgaggtgccgcagatcctgatcaaccgcgaacctctgccacacctgcacttcgacgtggaattgctcggagactgtgatgtgatcatcaacgaattgtgccatagacttgggggcgagtatgccaaactgtgctgcaacccggtgaagctgtcggagattaccgagaaaccaccgagaacccaaaaagaactggcctacctgtcagagctccccccgacgccgctgcatgtctccgaggactcgagttcgcctgagaggacctccccgccggactcgtccgtgatcgtgaccctgctcgaccaagctgccaagagcaacgacgacctggacgtctcggagtccaagggatgcatggaagagaagccacaggaggttcagacttcgcggaatgtggaatcgatcgcggaacagatggaaaaccccgatctgaaaaatgtgggatcctccactggtgagaaaaacgaacgcactagcgtggcaggaactgtgagaaaatgctggcccaaccgcgtcgcgaaagagcagatctcccgacggttggacgggaaccagtacctgttcctgccgccaaaccggtacatcttccatggcgcagaagtgtactcagattccgaagatgacgtcctgagctcgtcgtcatgtggatccaattctgacagcggaacttgccaatcgccgtctctcgaggagccaatggaagatgaatcggagatcgaggagttttacaacggcttggaggacgaacctgatgtgcctgaacgcgcaggaggcgccggctttggcacggacggcgacgaccaggaagccatcaacgaggcgatctccgtgaagcaagaggtgactgatatgaactatccatcaaataagtcg

SEQ ID NO: 53846 - DNA, 1356 bp, Artificial Sequence
  derived and/or modified sequence
atgtttgacatcgagtacttccgcaaggacccgcggccgttcttcaaattcgcaaaggaaatctaccccggccaattccagcccagcctttgtcataagttcatcgctctgtccgacaaagaaggcaagctcctgcgcaactacactcaaaacatagatactctggagcaggtggccggcattcagagaatcatccagtgccacgggagtttcgctactgcgtcatgcttgatctgcaaatacaaggtcgactgcgaagccgtgcggggagacatcttcaaccaagtggttccacggtgcccgaggtgccctgccgacgaaccgctcgcaattatgaagccggagatcgtcttctttggcgagaacctccctgaacagttccacagagccatgaagtacgataaagacgaagtggacttgctcattgtgatcggatcctctctgaaggtccggccagtggcccttataccgtcctccatcccacatgaggtgccgcagatcctgatcaaccgcgaaccgctgccgcatctgcattttgacgtcgagctgctcggggactgcgacgtcatcatcaacgaactctgccacagacttgggggagagtacgccaagctctgttgtaaccccgtgaaattgagcgagattactgaaaagccaccgcgcactcaaaaggaactcgcttacctgtcggagctcccgcctactccactgcatgtgtctgaagattcgtcctcgccagaacgcacctccccaccagactcaagcgtcatcgttactctgctggatcaggcagcaaagtccaacgacgacctggatgtctccgagtccaagggctgcatggaagagaagcctcaggaagtccagaccagcagaaatgtggagtccatcgctgaacagatggaaaacccggatctgaagaatgtgggctcaagcaccggggaaaagaacgaacgcacttcggtggcgggcaccgttcggaagtgctggcctaaccgggtggcgaaagagcaaatctccagacgcctggacggtaaccagtacctgttcctccccccgaatcgctacatctttcatggggcggaagtctactcggatagtgaagatgacgtgctctcctcgagctcttgcggatcgaactcggatagcggaacttgccaaagcccgagcctcgaagaacccatggaggacgagtccgaaatcgaagaattctataatggactcgaagacgaacctgacgtcccagagagagccggtggagcaggtttcggaaccgacggagacgatcaggaagcaattaacgaagcaatctcagtgaaacaagaggttactgacatgaactacccgtcgaataagtca

SEQ ID NO: 53847 - DNA, 1356 bp, Artificial Sequence
  derived and/or modified sequence
atgtttgatatagaatattttcgtaaagatccgcgaccgttttttaaatttgcgaaagaaatatatccgggtcaatttcaaccgtcgttatgtcataaatttatagcgttatcggataaagaaggtaaattattacgtaattatacgcaaaatatagatacgctagaacaagtagcgggtatacaacgtataatacaatgtcatggttcgtttgcgacggcgtcgtgtctaatatgtaaatataaagtagattgtgaagcggttcgtggtgatatatttaatcaagttgttccgcgttgtccgcgatgtccggcggatgaaccgttagcgataatgaaaccggaaatagtattttttggtgaaaatctaccggaacaatttcatcgagcgatgaaatatgataaagatgaagtagatctattaatagttataggttcgtcgttaaaagttcgtccggttgcgctaataccgtcgtcgataccgcatgaagtaccgcaaatattaataaatcgagaaccgctaccgcatctacattttgatgtagaactattaggtgattgtgatgtaataataaatgaattatgtcatcgactaggtggtgaatatgcgaaactatgttgtaatccggttaaactatcggaaataacggaaaaaccgccgcgtacgcaaaaagaattagcgtatctatcggaactaccgccgacgccgctacatgtatcggaagattcgtcgtcgccggaacgaacgtcgccgccggattcgtcggttatagtaacgttattagatcaagcggcgaaatcgaatgatgatctagatgtttcggaatcgaaaggttgtatggaagaaaaaccgcaagaagttcaaacgtcgcgaaatgtagaatcgatagcggaacaaatggaaaatccggatctaaaaaatgtaggttcgtcgacgggtgaaaaaaatgaacgaacgtcggtagcgggtacggtacgaaaatgttggccgaatcgtgtagcgaaagaacaaatatcgcgtcgactagatggtaatcaatatctatttttaccgccgaatcgttatatatttcatggtgcggaagtttattcggattcggaagatgatgttttatcgtcgtcgtcgtgtggttcgaattcggattcgggtacgtgtcaatcgccgtcgctagaagaaccgatggaagatgaatcggaaatagaagaattttataatggtttagaagatgaaccggatgtaccggaacgtgcgggtggtgcgggttttggtacggatggtgatgatcaagaagcgataaatgaagcgatatcggttaaacaagaagtaacggatatgaattatccgtcgaataaatcg

SEQ ID NO: 53848 - DNA, 1356 bp, Artificial Sequence
  derived and/or modified sequence
atgttcgacatcgagtacttccggaaggacccgcgccccttcttcaaattcgctaaagaaatctacccgggacagttccagccgtcactgtgccacaagttcatcgcactgtccgataaggaaggtaagctgctgcgcaactacactcaaaacatcgatacgttggaacaggtggccggaatccagcggattatccagtgtcatgggagctttgccactgcgagctgcctgatctgtaaatacaaggtcgattgcgaagcggtgcggggcgatatcttcaaccaagtggtgccacggtgcccgaggtgccccgccgacgagcccctcgccatcatgaagccagagatcgtgttcttcggggaaaacctgcctgaacaattccaccgcgccatgaagtacgataaggacgaagtcgacctgctcatcgtgatcggatcgagcttgaaagtccggccagttgcacttatcccgtccagcattccgcacgaagtgcctcagatcctgatcaaccgcgagccattgccacacctgcatttcgatgttgaactgcttggagactgcgacgtcattatcaatgagttgtgccacagactcggaggcgagtacgcaaagctgtgctgtaacccagtcaagctctcggaaatcactgaaaagccaccgcggacccagaaggagctcgcgtacctgtcggaactccctccgactccgctccatgtctccgaggactcgagctcccctgaacgcacttcgccgcctgactcgagcgttatcgtgactcttctggatcaggcggccaagtctaacgacgatctcgatgtgtccgagtcgaagggatgcatggaagagaaaccgcaggaggtccagacctccagaaacgtcgagagcattgccgaacaaatggaaaaccccgatctgaagaatgtcggatcctccactggggaaaagaacgagcggacctcggtggccggcactgtgcgcaaatgttggccgaatcgcgtcgcgaaagaacagatctcaaggcgcctggatggaaatcaatacctgtttctgccgcctaatcgttacatcttccacggcgcagaggtgtactccgattcggaggatgatgtgctctcaagctcttcgtgtggttcgaactcggactcgggtacctgccaaagcccgtctctcgaagagccgatggaggacgagtccgagatcgaggagttttacaacggtctggaagatgaaccagacgtgcccgagcgcgcggggggagcaggattcgggactgacggtgacgaccaggaagcgatcaacgaggcaatctcggtgaagcaggaagtgacggacatgaactacccctcgaataagtcg

SEQ ID NO: 53849 - DNA, 1356 bp, Artificial Sequence
  derived and/or modified sequence
atgttcgacatcgaatatttccggaaggatcctaggccattctttaagtttgccaaagagatctatcctgggcaattccaaccttcactgtgccacaagtttatcgcgctcagcgacaaggaggggaagttactgagaaactacacacagaacatagatacattagagcaagtcgcgggtatacaacggattatccagtgccatgggtcctttgccaccgctagttgcctgatttgcaagtacaaagtggactgtgaagctgtcaggggcgatatttttaaccaggtggtgccccgatgcccaaggtgccccgctgatgagcccctcgcaattatgaaaccagagatcgtgtttttcggagaaaatctgccggaacaattccaccgcgccatgaagtacgataaagacgaggtggatttgctgattgtaatcgggagctccttgaaagtccggcccgtagccctcattccctctagcatacctcatgaagtcccacaaatcctgatcaatcgggagcccttgcctcacctccactttgacgttgagctgctgggggattgtgatgtgatcattaatgaattgtgccaccggctgggtggggagtatgccaaactctgctgtaatccagtgaaattatccgaaataaccgagaagcccccacgaacacaaaaagagctggcctatctgagcgagctcccccctacacctctgcacgtctcagaggactctagttctcctgagcgcacttccccacccgactcatcagtgatagttactctgttagaccaggcagctaaatcaaatgacgatctcgatgtgtcagaatcgaaggggtgtatggaagagaagccacaggaagtacaaacttcccgaaatgtggaaagcattgccgagcaaatggaaaatccagatttgaagaacgtaggctcttccaccggtgagaagaacgagcgcacatctgtcgccggaaccgttagaaagtgttggccgaatcgggtggcgaaggaacaaatatcgcgacgactggacggcaatcagtatcttttcctaccccccaatagatacatctttcatggcgccgaagtgtattcggactctgaggacgatgtattgtcttccagttcatgtggtagcaactcagattccgggacatgtcagtcccccagcctcgaagaacccatggaagacgaaagcgagatcgaggagttctataacggacttgaggacgagccagacgtgccagaaagagctggaggcgccggttttggaaccgacggggatgatcaggaggctataaatgaagcgatcagcgtgaaacaggaagtaacagatatgaattatccctcgaataaatca

SEQ ID NO: 53850 - DNA, 1356 bp, Artificial Sequence
  derived and/or modified sequence
atgttcgacatagaatactttagaaaagaccccaggccctttttcaagtttgccaaggagatctacccaggccagttccagcccagcctgtgccacaaatttattgccctgagtgacaaggaaggaaagctgcttcgtaattatacccaaaacatagatacattagaacaggtagctggcattcagcggattattcagtgtcacggctcgtttgctacagcctcctgcctcatttgtaaatacaaggttgattgcgaggcagtgagaggagacatattcaaccaagtggtgcctagatgtccccgctgccccgccgacgagcctttggccattatgaagcctgaaatcgtcttctttggagaaaacctcccggaacagttccaccgcgccatgaagtatgacaaggatgaagttgaccttctgattgtgatcgggtcatccctaaaagtacgaccagtagcactgattccttcttccatccctcacgaggtgccccagatcctaattaaccgggagccactgccccacctccacttcgatgtggagctccttggggactgtgatgtgataattaatgaactgtgccacaggctggggggggagtatgccaagctgtgctgtaaccccgtgaaattatcagagattaccgagaagccgcctcggacacagaaggaacttgcttatctcagtgagttgccccctacaccgctgcatgtatctgaggatagctcctcccctgaacgaacttcaccccctgattcctccgtgatcgtcactttgctggatcaggccgccaaaagcaatgacgacctcgacgtctcagaaagcaaagggtgcatggaggaaaaaccgcaggaagtacaaacatcccgcaatgtggagtccatagcggagcaaatggaaaacccagaccttaagaacgttgggagcagtaccggggaaaaaaacgaacgcaccagcgtggcgggaaccgtgagaaagtgttggccgaatcgggtggctaaggagcagataagcaggcgattggatgggaatcagtacctgttcctgccacctaataggtacatttttcatggcgccgaagtatatagtgatagcgaagacgatgtgcttagtagcagctcctgtggcagcaattcggactctgggacctgtcagtctccaagcctcgaagagccaatggaggatgagtcagagatagaagaattttataacggcctcgaggacgaaccagacgtacccgagagagctggtggtgccggattcggaacggacggcgatgaccaggaagcaatcaacgaagcaatcagtgtaaagcaggaggttaccgatatgaattatccatctaacaaatct

SEQ ID NO: 53851 - DNA, 1356 bp, Artificial Sequence
  derived and/or modified sequence
atgttcgatatcgagtacttcaggaaagatcccaggccattttttaaatttgcaaaggaaatctaccctgggcagtttcaacctagcctgtgccacaagtttatagcgctgagcgacaaggaaggcaagttgctcaggaattacacacagaacattgacaccctggagcaggtagccggcatccagcgcatcatacaatgccatggcagcttcgccacagctagctgcctcatctgcaagtacaaagtggattgcgaggctgtgcggggggacatctttaatcaggtggtaccgaggtgtcctagatgtccggccgacgagcctttggccatcatgaagcccgaaattgtttttttcggagaaaatctgcccgagcagttccatagggcaatgaaatatgacaaggacgaggtggacctgcttattgtgattggttctagcctcaaagtgagacctgtggcacttatcccatcgtctatcccccatgaagttccacagattctcattaatcgcgagccgttgccccacttgcacttcgacgttgagctcctcggagattgtgatgtgattattaatgaattatgccacagactcggaggggagtatgccaagctttgctgtaatcctgtgaagttgtctgagattactgaaaagcctcctaggacacagaaggagctcgcatatctttccgagctccctcccacaccgctgcacgtcagtgaggattcttccagcccagaacgcactagcccacccgattcctccgtcattgtcaccttgctggatcaggccgcaaaaagtaacgatgatctagatgtgagtgagagcaaagggtgtatggaggaaaagcctcaagaggttcagacctctcgtaatgtggagtccattgcagagcaaatggaaaaccccgatttgaagaatgtaggcagcagtactggagagaagaatgagcggacttcggtggccgggaccgtgcggaaatgctggccaaatcgtgtggcgaaggagcaaatctctcgacgcttagacggaaatcagtacctcttcttgcctcctaatcggtatattttccatggcgctgaggtctatagcgattctgaggacgatgttctttcatccagttcatgtggcagcaactcagacagcggcacgtgtcagtctccatccctcgaagagcctatggaggacgagtcggagattgaggagttctacaatgggctggaggatgagcctgacgtccctgaacgcgctggtggagcggggtttggtactgacggtgatgaccaggaagctattaacgaagccatctcagtaaagcaggaggtcaccgatatgaactaccccagcaacaagagc

SEQ ID NO: 53852 - DNA, 1356 bp, Artificial Sequence
  derived and/or modified sequence
atgttcgatatcgagtatttccggaaagatcccaggccttttttcaaatttgctaaggaaatttacccaggacagttccagccatccctgtgccacaaattcattgccctttctgacaaagaaggtaaacttctgcggaattacacgcagaatatcgatacgctggaacaggtcgctggaatccagcggataattcagtgtcacgggagtttcgcgacggcaagctgtctgatctgcaagtacaaggtggactgtgaggccgtaagaggagatattttcaatcaagttgtaccacgctgcccacgatgccccgcagacgagccgctggccatcatgaaaccggagatcgttttctttggcgagaatcttcctgagcaattccaccgcgccatgaagtatgataaggacgaagtggatctgttgattgtgattggcagctccttgaaggttcgacctgtagcgctgattccttcatcaataccgcacgaggtaccgcagattctaatcaaccgcgagccgctgccacacctccactttgatgtggaacttctgggagattgcgacgtgataattaacgagctttgtcaccgtctcggaggagaatatgccaagctttgctgcaaccctgtcaaattaagcgagatcactgaaaagcctccacggacccagaaagagttagcttacttaagcgagcttccacccaccccccttcatgtgtctgaagattcgtcctcccccgagaggaccagtcccccagactccagcgtcatcgttacactgcttgatcaggcagccaaatccaatgacgacctggatgttagcgaatcaaagggctgtatggaggaaaagccacaggaagttcagaccagccgtaacgtggagtccattgccgaacagatggagaacccagatcttaaaaatgtgggctcttccactggagaaaagaacgagagaacctccgtggctgggaccgtgcggaagtgttggcccaaccgcgttgctaaggagcagattagtagacgcctggacgggaaccagtacctttttctcccacccaacaggtatatctttcacggagctgaagtgtacagcgactcggaagacgacgtgctgtcctcttcaagctgtggcagcaattctgattctgggacatgtcagagcccaagcctggaggagcccatggaggacgagtccgaaattgaagagttctacaacggtttggaggacgagccagacgtccccgagagggctggtggcgcagggtttggtacggacggggacgatcaggaagccatcaatgaagccattagcgttaaacaggaagtgaccgatatgaactacccctctaacaagagt

SEQ ID NO: 53853 - DNA, 1356 bp, Artificial Sequence
  derived and/or modified sequence
atgttcgatatcgagtattttcgcaaggacccccggcctttctttaagttcgccaaagaaatctatccaggccaatttcagccttcgctgtgtcacaagttcattgcgctgtcagataaggagggaaaactcctccgcaattatactcagaatattgacacccttgaacaggttgccggcattcaacgaatcatccagtgtcatgggtcctttgccaccgcttcatgtttgatctgcaagtataaggttgattgtgaagccgttcggggagacattttcaaccaggtcgtacccaggtgtcctaggtgccccgccgacgagccgctggctattatgaagcctgagatagtgttctttggggagaacctgcctgaacagttccaccgggccatgaagtatgacaaagatgaggtggatctattgatcgtcatcggctcttctctcaaggtgaggcctgtcgccctgattccctcaagcatcccccacgaggttccacagattctgataaacagagagcctttacctcacctacatttcgacgtggagctactgggcgactgcgacgtaatcatcaacgaattgtgtcaccgattaggtggagaatatgccaagctgtgctgcaatccagtgaagctgtccgagatcacagaaaagcccccaaggacacagaaggaactggcctatctgtcggaactgccacctacaccattgcacgtgagcgaggatagtagtagtcccgaaagaacctctcccccggacagctcagtcatcgtcacccttctcgaccaggcagctaaatccaatgatgacctggacgtgtccgagtccaaggggtgcatggaggagaagccccaggaggtccaaaccagtagaaatgtcgagtccattgccgaacaaatggagaacccggatctgaaaaatgtggggagtagcacgggtgaaaagaacgaacgaacttcagtggccgggactgtaaggaagtgctggcccaaccgagttgccaaagagcaaatttcccgaagactagatggtaaccagtacttatttctgccaccgaacaggtacattttccatggcgccgaagtttactccgacagcgaagatgacgttctgagctccagttcttgcggctcaaatagtgactctggcacttgtcaaagccctagcctggaagagcctatggaggatgaatccgaaatcgaggagttttacaatggtctggaagatgaacccgatgtgccggaaagagctggaggagccggcttcggaacagacggagatgatcaggaagctataaatgaggcaatatccgtcaagcaagaggtgaccgacatgaactatccatctaacaagagt

SEQ ID NO: 53854 - DNA, 1356 bp, Artificial Sequence
  derived and/or modified sequence
atgtttgatatcgagtacttcaggaaggatccacggccgttcttcaaattcgccaaggagatctatcccggccagtttcagccgagcctgtgtcacaaattcatcgccctctcggacaaggagggcaagctgctgcgcaattacacccagaacatcgacactctggagcaggtggcgggcatccagcgcatcatccaatgtcacggatccttcgcgaccgcctcttgccttatctgcaagtacaaggtggattgcgaagccgtccgtggggatatctttaatcaagtagtgccgcggtgccctcggtgccccgcggatgaaccactggcgattatgaagccagagatcgtgttcttcggcgaaaacctcccggagcagttccacagagcaatgaagtacgataaggacgaggtggacctcctgatcgtgatcggatcctcactgaaagtgcgcccggtggctttgatcccaagctccatcccgcatgaagtgccgcagatcctcatcaaccgcgaacctctgcctcacctgcatttcgacgtggaacttcttggcgactgtgacgtgatcatcaatgagctgtgccaccggcttggaggagaatacgcaaagctgtgctgtaatccagtcaaactgtcggaaatcacggaaaaaccaccgagaacccagaaggagcttgcgtacctgtcagaacttcctccaaccccgctgcacgtgagcgaggactcatccagccctgagcgcacgagcccgccggattcgtcggttatagtcaccctcctggaccaagccgccaagtctaacgatgacctggatgtgagcgaatcaaagggatgcatggaagagaagcctcaggaggtgcagacttcgaggaacgtcgaatcaatcgcagaacaaatggagaacccggatctgaagaacgtgggatcgtccaccggagaaaagaatgagcggacctcggtggccggaactgtgcgcaagtgctggcctaaccgcgtggcaaaagagcaaatctcccgccgcttggacgggaaccagtacctgtttctgccccccaatcggtacattttccatggcgctgaagtctactccgattccgaggacgacgtgctcagttcgtcatcgtgcggctcgaattcggattccggaacctgccagagcccgtcactggaagagccgatggaggacgagtcggagatcgaagaattctataacggactggaggacgagcccgacgtacctgagcgggcgggtggcgctggattcggcaccgatggtgacgatcaagaagccatcaatgaagcgatttcggtgaaacaagaggtgactgacatgaactacccgtctaacaagtct

SEQ ID NO: 53855 - DNA, 1356 bp, Artificial Sequence
  derived and/or modified sequence
atgttcgatattgagtattttagaaaggatcctaggcctttcttcaagttcgccaaggaaatctatccgggacaattccaacctagcctctgccataagttcatcgcattgtctgacaaggagggtaagctgcttcgcaactacacgcagaatattgacaccctggaacaggtggcgggtattcagcggatcattcagtgccacggttctttcgctactgcttcgtgcttgatttgcaagtataaagtcgattgtgaggctgtgcggggggacatttttaaccaggtggtgccgcggtgcccgcggtgccctgctgacgaacctctagctattatgaagccggagatcgtgttctttggagaaaatctccctgagcagttccatagggcaatgaagtacgataaggatgaggtggacctgcttatcgtaatcggaagctccctgaaagtccgccctgtggctctaatacctagcagcattcctcatgaagtcccacaaatcttgatcaaccgggagccgttaccacaccttcacttcgatgttgagcttctaggagattgcgatgtgataatcaacgagctgtgccaccgccttggaggagaatatgccaagttgtgctgtaacccagtgaagttatcagaaattaccgagaaacctccaagaactcagaaggagctagcgtacctgagcgagttgccacccaccccgctgcacgtctcggaagacagctcatctcccgagagaacatcgccgccagattcgtcggtgattgtaacactgctcgaccaggccgccaagagcaatgatgatctggatgtgagcgagagtaagggctgcatggaggagaagccccaagaagtccagacaagtcggaatgtcgagtccatcgctgagcagatggagaatccagatctgaagaatgtgggctcgtccacaggagagaaaaatgaaagaacctccgttgctgggacagtgagaaagtgctggccaaatcgagtagcaaaggagcagatttctagacgtctggacgggaaccagtatctcttcctgccacccaatcgatacatatttcacggtgctgaggtgtattctgacagcgaggatgatgtccttagctctagctcctgcggaagcaactcagactctgggacttgtcagtccccctcactagaagagcccatggaggacgaatcagagatcgaagaattctacaacgggctggaagacgaacccgacgtccctgaacgcgctgggggcgcaggtttcggaacggacggagatgaccaggaagctattaacgaagctatcagcgttaaacaagaggttactgatatgaactacccctcaaataagtcc

SEQ ID NO: 53856 - DNA, 1356 bp, Artificial Sequence
  derived and/or modified sequence
atgttcgatatcgagtactttcgcaaggaccctaggccgttctttaagtttgccaaggaaatctacccaggtcaatttcagccatccttgtgccataagttcatcgccttgagcgataaggagggaaagttgctgagaaactatacacagaatatagatacactggaacaggtagcaggaatccagcggataatccaatgccacggctctttcgcgacggcttcgtgcttgatatgtaagtacaaagttgactgtgaggcagtgaggggcgacatttttaaccaggtggtgccccgatgccccaggtgtcccgcggatgagccacttgcgatcatgaagcctgaaattgtgttcttcggtgaaaatctgcccgaacagttccatagagcaatgaagtacgacaaagatgaggtcgatcttctgatcgttatcgggtcctctctgaaggtgcgcccagtagccctgataccttcgagtattccccacgaggtgccacagattctcattaaccgagagcctcttccgcacctgcattttgacgttgagctgctcggcgactgcgacgtcatcataaatgaactgtgtcataggctcggcggagaatatgccaagctatgctgcaatcccgtcaaactttcagaaatcaccgagaagccacctcgcacccagaaagaattggcttacctttccgagctacctccaacccctctgcatgtaagcgaagactcatcatctcccgagcgaacgagccctcctgactcatcagtgatcgtgacactgcttgatcaggctgctaaaagtaacgacgatttagacgtctctgagtcgaaaggatgtatggaagagaagcctcaagaggtacaaacatcccgcaatgttgagagtattgcagagcaaatggagaatcctgatttgaagaacgtagggtcttctaccggcgagaaaaatgagcgcacatcagtagctgggacagttcggaagtgctggccgaatagggtggccaaggagcagatcagccggaggctggacggcaatcagtacctgttcttgccccctaacagatacatttttcatggagcggaggtgtattcagattccgaagatgacgttctctccagcagcagttgtggcagtaatagcgactccggcacctgccagtcgcccagtctggaggagcccatggaggatgaaagcgaaatagaagagttttataacggtcttgaagatgagcccgatgtcccggagagggccgggggggctggattcggaaccgatggggacgatcaggaggcgattaacgaagccatttcagtaaaacaggaagtgactgacatgaactaccccagcaacaagtct

SEQ ID NO: 53857 - DNA, 1356 bp, Artificial Sequence
  derived and/or modified sequence
atgttcgatatagagtactttcgcaaggatccaaggcctttcttcaaatttgccaaggaaatctaccccggacagttccagccgagtctctgccacaagttcatcgctctgagcgacaaggagggaaagttgctgcgtaactatacccagaacatcgatactctcgagcaggtcgcggggatccagcgcatcattcagtgccatgggtctttcgccaccgctagttgcctgatctgtaagtataaagtggactgcgaagccgtccgtggagacatctttaaccaggtcgtcccccggtgtccccgatgccccgctgatgagcctctcgcgatcatgaagcccgaaatcgtcttcttcggcgagaacttgcccgaacagttccatcgtgcaatgaagtacgacaaggacgaggtcgacttgcttatcgtcattggttcctctctcaaggtacggcccgtggccttgatccctagttcgatcccccatgaggtgccgcaaatactcatcaaccgtgagcctttgccgcatttgcacttcgacgtcgagctgctaggcgactgcgacgtgattattaacgagctctgtcatcgccttggaggtgagtatgctaagctgtgttgtaacccggtgaagctctcggagattacggagaagccccctcgtacccagaaggaactcgcctacctcagcgagctgccacccacaccgctgcacgtcagcgaggactccagctcgcccgagcgaacgtcgcctcctgatagttctgtcatcgttacgctgctcgatcaggccgctaagagtaacgatgaccttgacgtgagtgagtccaagggttgcatggaggagaagccccaggaggtccagaccagccgaaacgttgaatctatcgccgagcagatggagaaccccgatctcaagaacgtcggtagctctaccggcgagaagaatgaacgtactagtgtggcaggcaccgtccgcaagtgctggcccaaccgtgtggcgaaggagcaaatctcgcgacgtctggatggtaatcaatacctcttcctcccgcccaacaggtacatcttccatggtgcggaggtgtacagtgattcggaagacgatgtcttgtctagcagtagttgtggctcgaactccgatagcggcacgtgccaatctccgagtctggaggagcccatggaggatgagtccgagatcgaggaattctacaacggtttggaggatgaacccgacgtaccagaacgcgccggcggcgctggattcgggactgatggtgatgaccaagaggcgatcaacgaagccatctccgtgaagcaagaagtcacagacatgaattatccttctaacaagtcg

SEQ ID NO: 53858 - DNA, 1356 bp, Artificial Sequence
  derived and/or modified sequence
atgttcgatattgaatactttagaaaggatccccgtccgttcttcaaattcgcaaaggaaatctatcccggccaattccaaccgtcgctttgtcacaaattcattgcccttagcgataaggaaggcaaacttctgagaaactacacccaaaacatagataccttggaacaagtcgcaggtattcagaggattattcaatgtcatggttccttcgccacggcatcatgcctgatctgcaaatacaaagtggattgtgaagcggtccgcggcgatatcttcaaccaagtggtcccacggtgtcctaggtgccctgcagatgaaccgctggcaattatgaagcctgaaattgtgttttttggtgaaaaccttccggaacagttccaccgggccatgaaatacgataaagacgaagtcgatctgcttatcgtaatcggtagttcgctgaaagtgaggcctgtggcactcattccatcctcgatcccccatgaggtccctcagattttgataaacagagaacctctgcctcatctgcattttgacgtggaacttctcggagactgtgatgtgatcattaacgagctctgtcacagacttggtggagagtacgccaaactttgttgtaatcctgtgaagctgtcggagatcactgaaaagcccccgcgcactcaaaaagaactcgcgtacctttccgaacttccccctactcctctgcatgtgtctgaagattcctcctcgccagaacggacttccccgccagattcctctgtcattgtcactcttttggatcaagccgcaaagtccaacgacgacctggacgtctcggagtccaaaggttgtatggaggagaaaccacaggaagtgcaaaccagccggaacgtggagtccatcgccgaacagatggagaaccctgatctgaaaaatgtgggttcgtcgacgggtgaaaagaacgagaggacttcagtggcaggcaccgtgcgaaagtgttggcctaatagagtcgctaaggagcagatatccagacgccttgacggaaatcaatacttgttcctgccacctaacagatacatctttcatggcgcagaagtgtactcagatagcgaggatgacgtgttgtcatcaagcagctgcggatcgaactcggatagcggcacttgccagtccccttctcttgaagaacctatggaggacgaatcagaaattgaagagttttacaacggactggaggacgagcccgatgtgccggaacgggccggaggggcaggattcgggactgatggagacgatcaggaagccattaatgaagcaatttcagtcaagcaggaggtgacggatatgaattacccttccaataagagc

SEQ ID NO: 53859 - DNA, 1356 bp, Artificial Sequence
  derived and/or modified sequence
atgttcgacattgaatactttcgcaaggacccacggccttttttcaaatttgccaaggagatttatcctggacaatttcagccatccctgtgtcacaagtttattgccctgtcggataaggagggaaagttgcttaggaactatacacaaaacattgatactctggagcaggtcgcaggcatccagaggattatacaatgtcatggctccttcgctacagcaagttgcctgatttgcaagtataaggtggattgcgaagcggtgcggggagacatattcaaccaggtagtgccccgatgcccgaggtgcccggccgatgaaccgctggcaattatgaagccagaaatcgttttcttcggtgagaacttgcccgagcagtttcaccgagccatgaaatatgacaaagacgaggtggacttgctaatcgtcattggatccagcctgaaagtgcggccagtggcattgatcccatccagcatcccacatgaggtgcctcagattttaatcaatcgggagcccttgcctcacctccacttcgatgttgagcttctaggggactgtgatgtcatcatcaacgagctatgtcatcggctcgggggagagtacgccaagctgtgctgcaaccccgtaaaactgtcggagattactgagaaaccccctcgaacccagaaggaattagcctacctttcagaactgcccccaactccactccacgtctctgaggattccagcagccccgagaggacatccccaccagacagctcagtaattgtgaccctgctcgaccaagctgccaagagcaacgatgacttggatgtaagcgaaagtaaaggctgtatggaggaaaagccccaggaggtccaaacgtcacgaaatgtggaatcaatcgccgaacaaatggagaaccctgatctgaagaatgttggaagtagcaccggcgagaagaacgaacggacttcagtcgcaggaaccgttaggaaatgttggcctaatcgggtggcgaaagagcagatttcacggcgcctggatggaaaccaatatctgttcctgccgccaaacagatacattttccatggagccgaggtgtatagtgacagcgaggacgacgttctcagttccagcagctgcggatctaacagcgactctggcacttgccagtcaccaagcctggaagaacccatggaggacgagtcggaaatcgaggaattctataacgggctggaggacgaaccggatgtcccggaaagagcagggggcgccggctttggtaccgacggcgacgaccaggaagccattaacgaggcgatctccgtgaaacaggaggtcacagacatgaactatcccagcaataaatca

SEQ ID NO: 53860 - DNA, 1356 bp, Artificial Sequence
  derived and/or modified sequence
atgtttgacattgaatactttagaaaagaccccagaccattcttcaagttcgcgaaggagatctatcccggccagtttcagccctccctctgccacaaattcattgctctcagcgacaaggaaggaaagttgctgaggaactatactcagaatatcgacactctggagcaagtggcaggaattcaacgcataattcagtgtcatggctccttcgccactgcgagctgccttatttgtaagtataaggtcgactgcgaggctgttcggggtgacatctttaatcaggtcgtcccacgctgccctagatgtccggcagacgagcctctggctataatgaagcccgagattgtcttcttcggtgagaatttaccggaacaatttcaccgcgccatgaaatatgacaaggatgaggtggacctgctgattgttattgggtcctctctcaaagttcgacctgtggccttgatcccttcaagcattccccatgaagtcccacagattctaattaatagagagcctctcccccatctgcacttcgacgtcgaactgctcggggactgcgacgtgatcattaacgagctgtgccatagattgggtggagagtacgccaagctgtgctgtaatcccgtgaagctgtcagagattactgaaaagccaccaagaacccagaaagagctggcctatctgtccgagttgcctcctactcctctgcacgtctcagaagattcttcatccccagagcgcaccagcccacctgactctagtgtgatcgtaacgttactcgaccaggccgccaaaagtaacgatgatctggacgtgtctgaaagcaagggatgtatggaagaaaaacctcaggaagtgcagacttctagaaacgtggagtctatcgccgaacagatggagaacccggatctgaagaatgtcggtagttccaccggggaaaagaacgagcgcacaagtgtggctggaaccgtcaggaagtgctggccaaatcgagtggcgaaggagcagatttcgcgccgcctggatggaaaccagtatctgtttctcccgcctaatagatacatatttcatggagcggaagtgtattctgattcagaggacgacgtcttgagttcttccagctgcgggagtaattccgacagcgggacctgccaatcaccttccctggaggagcctatggaggatgaatctgaaatcgaggaattttacaacggcctggaggatgaacctgacgttccagagagagccgggggcgctggcttcggaactgacggggacgaccaggaagccattaacgaggccatatccgttaaacaggaggtcaccgacatgaactacccatctaacaaatcc

SEQ ID NO: 53861 - DNA, 1356 bp, Artificial Sequence
  derived and/or modified sequence
atgttcgacatcgagtacttcagaaaggacccgcgtccattctttaagttcgcgaaggagatttaccctggccagttccagccttctctctgccataagttcatcgctctgtcagacaaggagggaaagctgctgcggaattacacccaaaacatcgacaccctggaacaagtcgccggaattcaacgcattatccagtgtcatggctcgttcgcaactgcatcttgcctcatctgcaaatacaaggtagattgtgaagcggtgagaggagacatctttaaccaagtggtccctaggtgcccccggtgtcctgcagacgaaccacttgccatcatgaaaccagaaattgtattcttcggagagaatctcccggagcagttccacagagctatgaaatacgataaggatgaagtggacctcctgatcgtgatcggatcctccctgaaggtgcgccccgttgccctgatcccatcatccatcccgcacgaagtgccgcaaatcctcatcaaccgtgagccgcttccacacctgcattttgacgttgaattgctgggagactgcgatgtcattatcaacgaactctgccaccggttggggggagaatacgcgaagctgtgctgcaacccggtcaaactgtccgaaattacggagaagccgccacgcacccagaaggaattggcgtacctgtctgaactcccaccgactccgcttcacgtgtcggaggactcatcgtcccctgagaggactagcccgccggactcctcagtaatcgtgaccttgctggatcaagccgctaagtcgaacgatgacctcgatgtcagtgagtccaagggttgcatggaggaaaagccacaggaggtgcagacctcgcggaacgtggagagcatcgcggagcagatggagaacccagacctgaaaaacgtgggttcctcaactggagagaagaacgaacgcacttcagtggccgggacggtgagaaaatgttggcctaatcgggtggctaaagaacaaatctcgcgacgcttggacggcaaccagtacctcttcctcccgccgaatcgctacatctttcatggcgccgaagtgtactccgattctgaagatgatgtgctgtcgtcatcctcatgcggatcaaacagtgactcaggaacctgccagtcgccctcgctcgaggaacctatggaggacgaaagcgaaatcgaggaattctacaatgggctcgaggatgaaccggatgtcccagaacgggccggcggtgcaggctttggaactgatggggacgaccaggaagccataaatgaggccatctcggtcaagcaggaggtgaccgacatgaattatccctccaacaaatcg

SEQ ID NO: 53862 - DNA, 1359 bp, Artificial Sequence
  derived and/or modified sequence
atgttcgacatcgagtacttcagaaaggaccccagacccttcttcaagttcgccaaggagatctaccccggccagttccagcccagcctgtgccacaagttcatcgccctgagcgacaaggagggcaagctgctgagaaactacacccagaacatcgacaccctggagcaggtggccggcatccagagaatcatccagtgccacggcagcttcgccaccgccagctgcctgatctgcaagtacaaggtggactgcgaggccgtgagaggcgacatcttcaaccaggtggtgcccagatgccccagatgccccgccgacgagcccctggccatcatgaagcccgagatcgtgttcttcggcgagaacctgcccgagcagttccacagagccatgaagtacgacaaggacgaggtggacctgctgatcgtgatcggcagcagcctgaaggtgagacccgtggccctgatccccagcagcatcccccacgaggtgccccagatcctgatcaacagagagcccctgccccacctgcacttcgacgtggagctgctgggcgactgcgacgtgatcatcaacgagctgtgccacagactgggcggcgagtacgccaagctgtgctgcaaccccgtgaagctgagcgagatcaccgagaagccccccagaacccagaaggagctggcctacctgagcgagctgccccccacccccctgcacgtgagcgaggacagcagcagccccgagagaaccagcccccccgacagcagcgtgatcgtgaccctgctggaccaggccgccaagagcaacgacgacctggacgtgagcgagagcaagggctgcatggaggagaagccccaggaggtgcagaccagcagaaacgtggagagcatcgccgagcagatggagaaccccgacctgaagaacgtgggcagcagcaccggcgagaagaacgagagaaccagcgtggccggcaccgtgagaaagtgctggcccaacagagtggccaaggagcagatcagcagaagactggacggcaaccagtacctgttcctgccccccaacagatacatcttccacggcgccgaggtgtacagcgacagcgaggacgacgtgctgagcagcagcagctgcggcagcaacagcgacagcggcacctgccagagccccagcctggaggagcccatggaggacgagagcgagatcgaggagttctacaacggcctggaggacgagcccgacgtgcccgagagagccggcggcgccggcttcggcaccgacggcgacgaccaggaggccatcaacgaggccatcagcgtgaagcaggaggtgaccgacatgaactaccccagcaacaagagctag

SEQ ID NO: 53863 - DNA, 1359 bp, Artificial Sequence
  derived and/or modified sequence
atgtttgatatagagtatttcagaaaagatccaagacctttcttcaagttcgcaaaagagatctaccctgggcagtttcagccctctctctgccacaaattcatcgcactctctgacaaggaaggcaaactcctgagaaactacactcagaatattgacacactggaacaagtggcaggtatccagagaattatccaatgtcacggtagtttcgcaacagctagttgtctaatctgcaagtacaaggtggactgtgaagccgtaaggggagacatctttaatcaggtcgtccctaggtgcccgaggtgccccgcagatgagccgctggccataatgaaaccggaaattgtgttttttggcgagaaccttcctgaacagtttcaccgtgccatgaagtacgacaaggacgaggtggatttgctgattgttatcggctccagccttaaagtacgtccagtggctctgatcccatcctctatccctcatgaagtgccccagatactcattaacagggagcccctccctcatctccattttgacgtggaactcctcggtgactgtgatgtcattataaacgaactgtgtcacagactgggaggtgagtacgcgaagctgtgctgtaacccagtcaaattgtccgaaatcaccgagaagccaccgagaactcagaaggaattagcatatctgtccgagctccccccgacacccttgcacgtttccgaggactcatcaagccccgaacgaactagtccgcctgactcgagtgtgatagtcactctactggatcaggccgctaaatcgaatgacgacctcgatgtgagcgagtcgaaaggttgtatggaggagaagccacaggaagtacagacatcacggaatgttgagagcattgcagagcagatggagaatccggaccttaaaaatgtgggatcctcaacaggcgagaaaaacgagcggacctccgtggctggaactgttcggaagtgttggcctaatcgcgttgctaaggagcagatatcccgtaggctggatgggaaccagtatctgtttctgccaccgaaccgatacatcttccatggggccgaagtttactctgactctgaagacgatgtcctcagtagttcctcctgtggaagcaattcagattcggggacatgccagagtccctcgctggaggagcccatggaggacgagagcgagattgaggaattctacaatggtctggaggatgagccagacgtccccgagcgggccgggggcgcaggtttcgggaccgatggcgacgatcaggaggccatcaacgaggctatctccgtgaagcaggaagtgaccgacatgaactatccaagcaataagagttag

SEQ ID NO: 53864 - DNA, 1359 bp, Artificial Sequence
  derived and/or modified sequence
atgtttgacatcgagtacttcaggaaggacccccggcccttcttcaagtttgccaaggagatctacccaggccagttccagcccagcctgtgccacaagttcatcgccctgagtgacaaggagggcaagctgctgaggaactacacccagaacatcgacaccctggagcaggtggccggcatccagaggatcatccagtgccacggcagctttgccacagccagctgcctgatctgcaagtacaaggtggactgtgaggccgtgcggggggacatcttcaaccaggtggtgccccgctgcccccgctgcccagcagatgagcccctggccatcatgaagccagagatcgtgttctttggagagaacctgcctgagcagttccaccgggccatgaagtatgacaaggatgaggtggacctgctgattgtcatcggcagcagcctgaaggtgcggcctgtggccctgatccccagcagcatcccccatgaggtgccccagatcctgatcaaccgggagcccctgccccacctgcactttgatgtggagctgctgggggactgtgatgtgatcatcaatgagctgtgccaccggctgggcggggagtatgccaagctgtgctgcaaccctgtgaagctgtctgagatcacagagaagccacccaggacccagaaggagctggcctacctgtctgagctgccccccacccccctgcacgtgtctgaggacagcagcagccctgagaggaccagccccccagacagctctgtgattgtgaccctgctggaccaggccgccaagagcaatgatgacctggatgtgtctgagagcaagggctgcatggaggagaagccccaggaggtgcagaccagcagaaatgtggagagcattgctgagcagatggagaacccagacctgaagaatgtgggcagcagcactggagagaagaatgaaagaacatctgtggccggcaccgtgaggaagtgctggcccaacagagtggccaaggagcagatcagccggcggctggatggcaaccagtacctgttcctgccccccaaccgctacatcttccacggggctgaggtgtacagcgacagtgaagatgatgtgctgagcagcagcagctgtggcagcaacagcgacagcggcacctgccagagccccagcctggaggagcccatggaggatgagagcgagattgaggagttctacaacggcctggaggatgagccagatgtgcctgagagagctggaggagctggcttcggcacagatggagatgaccaggaggccatcaatgaggccatctctgtgaagcaggaggtgacagacatgaactaccccagcaacaagagctag

SEQ ID NO: 53865 - DNA, 1359 bp, Artificial Sequence
  derived and/or modified sequence
atgttcgacatcgagtacttccggaaggacccccggcccttcttcaaatttgccaaggaaatctatccaggacagtttcagccatctctgtgtcataagtttattgccctgagcgataaggaggggaagcttcttagaaactacactcagaacatcgacacgctagagcaggtggcagggatccagcgcatcatccagtgccacggaagttttgctacggctagctgtttgatctgtaagtacaaagttgattgtgaagcggtgcgcggagatatctttaaccaggtcgttcctcgatgtccacgatgccccgctgatgaaccactggcaattatgaagcctgagattgtgttctttggagagaatttgccggaacaatttcaccgcgcgatgaagtacgacaaggacgaggtggatctcctaattgtgattggctcctcgcttaaggtccgtccagtagcactcataccgtcttccatcccgcatgaagttccgcaaatcttaatcaaccgtgaaccacttccccatttacacttcgatgtggagctgctgggggattgcgacgtaataattaatgaactctgccaccggctcggtggagagtatgcaaaattgtgctgtaatcccgtgaagttgtccgaaataacggaaaaacctcctcggacccagaaagagctggcatatctctctgaattgcctccaacacccctgcacgtatctgaggatagctccagcccagaaagaacatcacccccggactctagtgtaatagtgaccctcctcgatcaggccgccaaaagcaatgatgatttggacgtttcagagtccaaaggctgcatggaggagaagcctcaggaagtgcagacctcccgaaacgtggagtcaatagccgagcaaatggagaatccggatctcaaaaatgttggtagctctaccggcgaaaaaaacgagcggacaagcgtcgcagggacggtgcgaaagtgttggccgaatcgcgtggctaaagagcagatctctcgccgtctggacggcaatcagtatttgtttctgccacctaacaggtacatcttccacggggcggaggtatacagcgattccgaggacgatgttctgagctcttcttcctgcggaagcaattcagactctggtacgtgtcagtcaccatcactggaggagccaatggaggatgaatcagaaattgaggagttctataacggtctggaagacgagcccgacgtgcctgagcgcgcgggcggggcaggattcggaactgatggcgatgaccaggaggccattaatgaagccatctccgtgaaacaagaggtgacagacatgaactaccccagtaataaaagctag

SEQ ID NO: 53866 - DNA, 1359 bp, Artificial Sequence
  derived and/or modified sequence
atgttcgacatagaatattttcggaaggatcctaggcctttcttcaagtttgccaaagaaatctaccctggtcagtttcagccttctctgtgtcacaaatttattgccctctctgacaaagagggtaaactgctccgcaattatactcagaatattgacaccctggagcaggtcgctggcatccagcgcattatccagtgtcatggcagcttcgctacagcttcttgcctgatctgtaagtacaaggttgattgcgaggccgtcagaggcgatatcttcaatcaagtcgtacctcgatgtcctaggtgccctgctgacgagcctctggcaatcatgaagcctgaaatcgtttttttcggagaaaatctcccagaacagtttcacagagccatgaaatacgacaaagatgaggtggacttactgatcgtgattggctcaagccttaaagtacggccagtggctctgatacctagcagtatccctcacgaggtgcctcaaatcttgatcaaccgagaaccgctcccccaccttcacttcgacgtagaactcctgggggactgtgatgtcatcattaacgagctgtgtcaccggcttggtggtgagtatgccaaattgtgttgtaaccctgttaagctgtcagagataacagagaagccccctaggactcagaaggagctggcctatctgtcggagctgcctccaacccccctacacgtctctgaggatagttctagtcccgagcggacgtctcccccagatagctcagtgatcgtgacgctcctagaccaggcagctaagtctaatgatgatctggatgtgagtgaatctaagggctgcatggaggaaaagccccaggaggtgcagaccagtcggaatgtggaaagtattgccgagcagatggaaaatcccgatctcaagaacgtcggcagctcgacaggagagaagaacgagagaactagcgtggcaggaacagtacgcaagtgctggcccaatagagttgccaaggaacagatttcccggcgattggacggcaatcagtacttgtttctgcccccaaatagatatattttccacggagcggaagtgtattctgacagcgaggatgacgtactctccagtagtagctgcgggtcaaactcggatagtgggacatgccagtctccaagtctggaagaacccatggaagatgaaagtgaaattgaagaattctacaacggcctcgaagatgagccagatgttccagagcgggctggaggagcaggttttggaacagacggcgacgatcaggaggccataaacgaggccattagcgtcaagcaagaggtaactgatatgaattacccaagcaataagagctag

SEQ ID NO: 53867 - DNA, 1359 bp, Artificial Sequence
  derived and/or modified sequence
atgtttgatatcgaatacttcagaaaagatcccaggcccttcttcaagtttgcaaaagagatctatcctggccagtttcagccatctttgtgccataaattcattgcactgagcgacaaggaagggaagctgttgcggaattacacacagaacatcgatactctggaacaggtggctgggatccagcggattatccagtgtcatggctcattcgctactgcctcatgtctcatctgtaagtacaaagtcgattgtgaagccgtgcgcggtgacatcttcaaccaggttgtacctcgttgtccacggtgccccgcagacgaaccactcgccatcatgaaaccggaaattgtttttttcggggaaaatctgcctgagcaatttcacagagccatgaagtatgataaagatgaggttgacctgctcattgtaatcgggagttcgctcaaggttaggcctgtggcgctgattcccagctctatcccacatgaggtgcctcagatcctgataaatcgtgagccccttccccacctgcactttgatgtcgagcttttaggagattgcgatgtgataatcaatgagttgtgtcatcgactaggaggtgagtatgccaaattatgttgtaaccccgtgaaactgagcgaaattactgagaaacctcctcgtacccaaaaggaattagcatatctttcggagctgcccccaaccccgctgcacgtgtctgaggacagctcaagcccggagaggacatcaccaccggatagctccgtcattgtgacactgttggaccaggcagccaaatccaacgacgatctagacgtatccgagagcaagggttgtatggaagaaaagcctcaggaagttcagacatcccgcaacgtggaaagcatagctgagcaaatggagaatccagatttgaagaacgttgggtcctcaactggagaaaaaaacgaacgtacctcagtagcaggcacggtccgaaagtgttggcctaaccgggttgccaaagaacagataagcagaaggctcgacgggaaccagtatctatttctcccccctaataggtatattttccacggcgctgaggtttactccgacagcgaagatgatgtcttgagctcatcttcctgcggctcaaattccgatagcggaacatgtcagtctccctccctagaagaacccatggaggatgagtctgagattgaagaattttataacgggctggaggatgaacccgacgtacccgaacgggccgggggagctggtttcgggaccgatggagatgatcaggaagcgattaatgaggccattagcgtcaagcaagaagtcactgacatgaactacccctccaacaagagttag

SEQ ID NO: 53868 - DNA, 1359 bp, Artificial Sequence
  derived and/or modified sequence
atgtttgatatcgagtatttcagaaaggatcctagacccttcttcaaatttgccaaagagatctacccgggacagtttcagccttcattatgccataaattcatcgcactaagcgacaaggaagggaagctcttaagaaattatacacaaaatatagacactctcgagcaggttgccggcattcagcgtattatacaatgccacggttcctttgccaccgcttcttgtcttatctgtaagtacaaagttgactgtgaagccgtgaggggggacattttcaatcaggtagttccccggtgtccccggtgccctgcagacgaaccacttgcaatcatgaaacccgaaatagtgttctttggcgaaaatctgccagaacagtttcaccgcgccatgaagtatgataaggacgaggttgacctgctgattgttattgggagttccttgaaagttcgacctgtggccctcatcccctcttctatccctcacgaagttccgcagatactgatcaatcgcgagcctctgccacacctgcactttgatgtcgaattgttgggtgattgtgatgtgatcattaatgaactctgccatcgtctcggtggagaatacgccaagctctgctgtaatccagttaagctctctgagattactgaaaaacccccccgaactcagaaggagctagcctatctgtcagaactcccccctacaccacttcatgtctccgaggactcttcatctcctgaacgaacgtctccacccgattcttcagttatcgtgactcttctggaccaagccgctaaatccaacgacgatctggatgtttctgaatccaaaggctgtatggaagaaaaaccacaagaagtgcagaccagccgtaatgttgagtccatagctgagcaaatggagaaccctgacctgaaaaacgtgggaagtagtaccggagagaaaaacgagagaactagcgtggcaggaacagtccggaaatgttggccgaatcgagtagccaaagaacagattagtaggaggctggacggcaaccagtaccttttcctccctcccaataggtatatctttcacggcgccgaggtctattcagactccgaggacgatgtgctcagctcaagctcttgtggaagcaacagcgacagcgggacatgtcagagcccctcactggaagagccaatggaggacgagagtgaaatcgaggagttctacaacggcctggaagatgagcccgacgttccagaaagggcaggcggcgcaggtttcggaacagacggagatgatcaagaggctatcaacgaagcaatttcggtcaagcaagaggttacggacatgaattacccatcaaataagagttag

SEQ ID NO: 53869 - RNA, 1502 nt, Artificial Sequence
  derived and/or modified sequence
gggaaauaagagagaaaagaagaguaagaagaaauauaagagccaccauguuugacauugaguauuuucggaaagacccuaggccguucuuuaaguuugccaaagaaaucuacccugggcaguuccagcccagccuuugccacaaguuuaucgccuugucggauaaagagggaaaauugcuuaggaacuacacccagaacaucgauacguuggaacaggucgcagggauccagaggaucauccagugccacgggucauuugcuacugcauccugucucauuuguaaguacaaaguggauugugaggcggugcggggagauaucuuuaaucaagucguaccccgaugcccucgcugcccagcggacgaaccauuggcgaucaugaagcccgaaaucgucuuuuucggcgaaaaucucccagagcaguuccaucgcgccaugaaguaugacaaggaugaaguggacuugcugaucgucaucggcucgucacugaaaguaagacccguagcguugauucccucgucaauuccccaugaggugccucaaauucugauuaacagggagccccuuccccaucuccacuucgaugucgagcuuuugggggacugugacgucaucauuaacgaacugugucaccgacuuggaggggaauaugcgaaauugugcugcaacccggugaaauugucggagauuacagaaaaaccgcccagaacgcagaaagagcuggcguaccucuccgagcugcccccgaccccucugcaugugucggaggacagcuccucgcccgaacggaccuccccaccggacucaucggucauugugacgcuccuugaccaggcagcgaagucgaaugaugaucuggauguaagcgagucaaagggcuguauggaagagaagccccaagaagugcaaacgucgcgcaauguggagucaaucgccgaacaaauggagaacccugaccucaaaaacguaggaucgucaacaggggaaaagaacgaacggacgucgguggccggaacagucagaaagugcuggccuaauagaguagccaaggagcagaucucgcggcgacuggaugggaaucaauaccuuuuccuucccccaaacagguauaucuuccacggagcggagguauauucagauucggaggacgauguauugucaucaucgagcuguggaucaaacucggauucggguacaugccagagccccucgcucgaggagccuauggaggacgaaagcgagaucgaggaguucuacaauggacucgaggacgagccugacgucccagaaagggcggguggagcgggguucgguacugauggagaugaccaagaagcaauuaacgaagccaucuccgugaagcaggaagugacggauaugaacuauccguccaauaaguccugauaagcugccuucugcggggcuugccuucuggccaugcccuucuucucucccuugcaccuguaccucuuggucuuugaauaaagccugaguaggaag

SEQ ID NO: 53870 - RNA, 1359 nt, Artificial Sequence
  derived and/or modified sequence
auguuugauaucgaauacuucagaaaagaucccaggcccuucuucaaguuugcaaaagagaucuauccuggccaguuucagccaucuuugugccauaaauucauugcacugagcgacaaggaagggaagcuguugcggaauuacacacagaacaucgauacucuggaacagguggcugggauccagcggauuauccagugucauggcucauucgcuacugccucaugucucaucuguaaguacaaagucgauugugaagccgugcgcggugacaucuucaaccagguuguaccucguuguccacggugccccgcagacgaaccacucgccaucaugaaaccggaaauuguuuuuuucggggaaaaucugccugagcaauuucacagagccaugaaguaugauaaagaugagguugaccugcucauuguaaucgggaguucgcucaagguuaggccuguggcgcugauucccagcucuaucccacaugaggugccucagauccugauaaaucgugagccccuuccccaccugcacuuugaugucgagcuuuuaggagauugcgaugugauaaucaaugaguugugucaucgacuaggaggugaguaugccaaauuauguuguaaccccgugaaacugagcgaaauuacugagaaaccuccucguacccaaaaggaauuagcauaucuuucggagcugcccccaaccccgcugcacgugucugaggacagcucaagcccggagaggacaucaccaccggauagcuccgucauugugacacuguuggaccaggcagccaaauccaacgacgaucuagacguauccgagagcaaggguuguauggaagaaaagccucaggaaguucagacaucccgcaacguggaaagcauagcugagcaaauggagaauccagauuugaagaacguuggguccucaacuggagaaaaaaacgaacguaccucaguagcaggcacgguccgaaaguguuggccuaaccggguugccaaagaacagauaagcagaaggcucgacgggaaccaguaucuauuucuccccccuaauagguauauuuuccacggcgcugagguuuacuccgacagcgaagaugaugucuugagcucaucuuccugcggcucaaauuccgauagcggaacaugucagucucccucccuagaagaacccauggaggaugagucugagauugaagaauuuuauaacgggcuggaggaugaacccgacguacccgaacgggccgggggagcugguuucgggaccgauggagaugaucaggaagcgauuaaugaggccauuagcgucaagcaagaagucacugacaugaacuaccccuccaacaagaguuag

SEQ ID NO: 53871 - RNA, 1359 nt, Artificial Sequence
  derived and/or modified sequence
auguuugauaucgaguauuucagaaaggauccuagacccuucuucaaauuugccaaagagaucuacccgggacaguuucagccuucauuaugccauaaauucaucgcacuaagcgacaaggaagggaagcucuuaagaaauuauacacaaaauauagacacucucgagcagguugccggcauucagcguauuauacaaugccacgguuccuuugccaccgcuucuugucuuaucuguaaguacaaaguugacugugaagccgugaggggggacauuuucaaucagguaguuccccgguguccccggugcccugcagacgaaccacuugcaaucaugaaacccgaaauaguguucuuuggcgaaaaucugccagaacaguuucaccgcgccaugaaguaugauaaggacgagguugaccugcugauuguuauugggaguuccuugaaaguucgaccuguggcccucauccccucuucuaucccucacgaaguuccgcagauacugaucaaucgcgagccucugccacaccugcacuuugaugucgaauuguugggugauugugaugugaucauuaaugaacucugccaucgucucgguggagaauacgccaagcucugcuguaauccaguuaagcucucugagauuacugaaaaacccccccgaacucagaaggagcuagccuaucugucagaacuccccccuacaccacuucaugucuccgaggacucuucaucuccugaacgaacgucuccacccgauucuucaguuaucgugacucuucuggaccaagccgcuaaauccaacgacgaucuggauguuucugaauccaaaggcuguauggaagaaaaaccacaagaagugcagaccagccguaauguugaguccauagcugagcaaauggagaacccugaccugaaaaacgugggaaguaguaccggagagaaaaacgagagaacuagcguggcaggaacaguccggaaauguuggccgaaucgaguagccaaagaacagauuaguaggaggcuggacggcaaccaguaccuuuuccucccucccaauagguauaucuuucacggcgccgaggucuauucagacuccgaggacgaugugcucagcucaagcucuuguggaagcaacagcgacagcgggacaugucagagccccucacuggaagagccaauggaggacgagagugaaaucgaggaguucuacaacggccuggaagaugagcccgacguuccagaaagggcaggcggcgcagguuucggaacagacggagaugaucaagaggcuaucaacgaagcaauuucggucaagcaagagguuacggacaugaauuacccaucaaauaagaguuag

SEQ ID NO: 53872 - protein, 490 aa, Artificial Sequence
  derived and/or modified sequence
MHPGGGPSRAERLELGLGRERPAKAIFLHRRPGEGGGRERCLRCGHVCVRRGPGPREAVPSGRPRPDTLTPPWVRQRAVTGTFCASWTPLRNRRAQRMATDMQRKRSSECLDGTLTPSDGQSMERAESPTPGMAQGMEPDGYKVVFVRRSPLVLVAVARTRQSAQELAQELLYIYYQILSLLTGAQLSHIFQQKQNYDLRRLLSGSERITDNLLQLMARDPSFLMGAARCLPLAAAVRDTVSASLQQARARSLVFSILLARNQLVALVRRKDQFLHPIDLHLLFNLISSSSSFREGEAWTPVCLPKFNAAGFFHAHISYLEPDTDLCLLLVSTDREDFFAVSDCRRRFQERLRKRGAHLALREALRTPYYSVAQVGIPDLRHFLYKSKSSGLFTSPEIEAPYTSEEEQERLLGLYQYLHSRAHNASRPLKTIYYTGPNENLLAWVTGAFELYMCYSPLGTKASAVSAIHKLMRWIRKEEDRLFILTPLTY

SEQ ID NO: 53873 - DNA, 1473 bp, Artificial Sequence
  derived and/or modified sequence
atgcaccccggcggcggccccagcagagccgagagactggagctgggcctgggcagagagagacccgccaaggccatcttcctgcacagaagacccggcgagggcggcggcagagagagatgcctgagatgcggccacgtgtgcgtgagaagaggccccggccccagagaggccgtgcccagcggcagacccagacccgacaccctgacccccccctgggtgagacagagagccgtgaccggcaccttctgcgccagctggacccccctgagaaacagaagagcccagagaatggccaccgacatgcagagaaagagaagcagcgagtgcctggacggcaccctgacccccagcgacggccagagcatggagagagccgagagccccacccccggcatggcccagggcatggagcccgacggctacaaggtggtgttcgtgagaagaagccccctggtgctggtggccgtggccagaaccagacagagcgcccaggagctggcccaggagctgctgtacatctactaccagatcctgagcctgctgaccggcgcccagctgagccacatcttccagcagaagcagaactacgacctgagaagactgctgagcggcagcgagagaatcaccgacaacctgctgcagctgatggccagagaccccagcttcctgatgggcgccgccagatgcctgcccctggccgccgccgtgagagacaccgtgagcgccagcctgcagcaggccagagccagaagcctggtgttcagcatcctgctggccagaaaccagctggtggccctggtgagaagaaaggaccagttcctgcaccccatcgacctgcacctgctgttcaacctgatcagcagcagcagcagcttcagagagggcgaggcctggacccccgtgtgcctgcccaagttcaacgccgccggcttcttccacgcccacatcagctacctggagcccgacaccgacctgtgcctgctgctggtgagcaccgacagagaggacttcttcgccgtgagcgactgcagaagaagattccaggagagactgagaaagagaggcgcccacctggccctgagagaggccctgagaaccccctactacagcgtggcccaggtgggcatccccgacctgagacacttcctgtacaagagcaagagcagcggcctgttcaccagccccgagatcgaggccccctacaccagcgaggaggagcaggagagactgctgggcctgtaccagtacctgcacagcagagcccacaacgccagcagacccctgaagaccatctactacaccggccccaacgagaacctgctggcctgggtgaccggcgccttcgagctgtacatgtgctacagccccctgggcaccaaggccagcgccgtgagcgccatccacaagctgatgagatggatcagaaaggaggaggacagactgttcatcctgacccccctgacctactag

SEQ ID NO: 53874 - DNA, 1473 bp, Artificial Sequence
  derived and/or modified sequence
atgcaccccggcggcggtcctagtagagccgagcgacttgagttgggcctgggccgagagaggcctgccaaggcaattttccttcacaggaggccaggcgagggaggcggccgcgagcgctgccttcggtgtgggcatgtgtgcgtaagaaggggacccgggccacgcgaggccgtcccctccggtaggcctcggcctgacacccttactccaccctgggtcagacagcgggcagtcacaggaacgttctgcgcaagttggacgcctctgcggaaccgcagggcacagcgcatggccaccgatatgcagagaaagcggagctccgagtgcctggacggcactttgaccccatccgacggccagagtatggagcgagcagagtcccctacacccgggatggctcaaggaatggaaccagacggatataaagtggtgtttgttaggaggtcgccactcgtgctggtggccgtggcccgaaccagacaatccgcccaggaacttgcacaagaactgctctatatctattaccagatcttgagcctcctgacaggggcgcaattgtctcatattttccaacagaagcagaattacgacctgagacgtctgctctcgggatcagaaaggatcaccgacaaccttctgcagctaatggcacgcgatcccagctttctcatgggagctgcacgctgtcttcctcttgcagccgctgtgagggacacagtatctgcttcactgcagcaggcaagagccaggagcctggtcttcagtattctgcttgcccgaaatcaactcgtggctttagtgcgccgtaaagaccaattccttcatcctatcgatctgcatcttcttttcaacctgataagctctagctcatccttcagagaaggggaggcatggactccagtctgcttgccaaagtttaatgcagccgggttcttccacgcacatatctcttatctggagcccgacacagatctctgtctgttgcttgtgagtaccgacagagaggacttctttgcagtgtctgattgtagaaggcgcttccaagaaaggctccggaaacgtggtgcccatcttgccctcagagaagctctgcggactccctattacagcgtcgcacaggtcggcataccagacttgcgccattttctatataagtctaagtccagtggcctctttacctctcccgagatcgaggccccttatacttccgaagaagagcaggagaggctccttggcttgtaccagtaccttcacagccgggctcacaatgcctcgcggcccctcaagaccatctactatacaggacccaatgaaaatctgctggcatgggttaccggtgcctttgagctgtacatgtgctatagccccctaggaaccaaggccagtgccgtgagcgcaatacacaagctcatgaggtggattagaaaggaagaggatagactgttcatcctgacacctcttacctactag

SEQ ID NO: 53875 - DNA, 1473 bp, Artificial Sequence
  derived and/or modified sequence
atgcaccctgggggcggccccagcagagctgagcggctggagctgggcctgggccgggagaggcctgccaaggccatcttcctgcaccggcggcctggagagggcggcggccgggagcgctgcctgcgctgtggccacgtgtgtgtgcggcggggccctggcccccgggaggccgtgcccagcggccggcccaggccagacaccctgaccccaccctgggtgcggcagagagctgtgacaggcaccttctgtgcctcctggacccccctgaggaacagaagagcccagaggatggccacagacatgcagaggaagaggagcagtgaatgtctggatggcaccctgacccccagtgatggccagagcatggagcgggcagagagccccaccccaggcatggcccagggcatggagccagatggctacaaggtggtgtttgtgcggcgcagccccctggtgctggtggccgtggcccggacccggcagagcgcccaggagctggcccaggagctgctgtacatctactaccagatcctgagcctgctgactggagcccagctgagccacatcttccagcagaagcagaactatgacctgcggcggctgctgagcggcagcgagcgcatcacagacaacctgctgcagctgatggcccgggaccccagcttcctgatgggcgccgcccgctgcctgcccctggccgctgctgtgcgggacacagtgtctgccagcctgcagcaggcccgggcccggagcctggtgttcagcatcctgctggccaggaaccagctggtggccctggtgcggaggaaggaccagttcctgcaccccatcgacctgcacctgctcttcaacctgatcagcagcagcagcagcttccgggagggggaggcctggacccctgtgtgcctgcccaagttcaatgctgctggcttcttccacgcccacatctcctacctggagccagacacagacctgtgcctgctgctggtgtccacagaccgggaggacttctttgctgtgtctgactgcagaagacgcttccaggagcggctgaggaagagaggagcccacctggccctgcgggaggccctgcggaccccctactacagcgtggcccaggtgggcatcccagacctgcggcacttcctgtacaagagcaagagcagcggcctcttcaccagccctgagattgaggccccctacaccagcgaggaggagcaggagcggctgctgggcctgtaccagtacctgcacagccgggcccacaatgccagccggcccctgaagaccatctactacacaggccccaatgaaaacctgctggcctgggtgactggagcctttgagctgtacatgtgctacagccccctgggcaccaaggccagcgctgtgtctgccatccacaagctgatgcgctggatcaggaaggaggaggacaggctcttcatcctgacccccctgacctactag

SEQ ID NO: 53876 - DNA, 1473 bp, Artificial Sequence
  derived and/or modified sequence
atgcaccccggcggcggccccagccgggccgagcggctggagctgggcctcggcagggagcgcccagctaaagccatattcctgcataggcgccccggcgagggcggcggtcgagagagatgcttgcgctgcggccatgtgtgcgtgaggcgtggtccgggaccacgagaagccgtcccttccggaaggccacggcccgacacattgactccgccctgggtgagacagagagccgtgaccggcaccttctgcgcctcctggactcccctccgcaataggcgcgcacagcgaatggcaacggacatgcaaagaaagagaagctcagagtgtctggatgggacattaacgccaagtgacggtcagagtatggaaagagctgaaagccccaccccggggatggcccagggcatggagccagacgggtataaggtggtattcgtgcgcaggagccccctggtgcttgtggctgtggcccgtactcggcaaagcgctcaggaacttgcgcaggaactgctctatatctactaccagattctgtccctcctcacgggcgcgcaattgtctcacatttttcagcagaagcaaaactatgatttgcgtaggctgctctcagggagcgagcgcatcacagataacctgctgcagcttatggctcgggacccttcctttctcatgggagccgcaaggtgtctcccactcgctgcagcggttagagatacggtaagcgcctccctgcagcaggctagagcccgttcacttgtgttctcgatccttctggccagaaatcagttggtcgcactcgttcgtcgaaaagaccaattcctgcatccaatagacttgcacttgctgtttaacttgatatcatcttcaagctcctttagggagggagaagcatggaccccagtgtgtctaccgaagtttaacgcggccggattttttcatgcacacatcagctacctggagcctgatacggatctctgcttgttgctagtgtcgaccgaccgtgaggatttttttgctgtctccgactgtcgacggcgattccaggaaagattgcgaaaaagaggcgcacacctggctctaagggaagcactgcgcacaccttactattcagtggcccaggtgggcatcccagatcttagacacttcctgtataagagcaagagctccggcctgttcacctccccggaaatcgaggccccttacacctcagaagaggaacaggaacggctgctgggactataccagtatctgcacagccgggcgcataacgcgtctagaccactcaagactatctattatacgggacctaacgagaacctcttggcctgggtgaccggcgcctttgaactctatatgtgttacagccccctgggaactaaagccagcgcagtctccgccatccataagctcatgcgctggatccgtaaagaggaagatcgcctgtttatcctaacccccttgacatactag

SEQ ID NO: 53877 - DNA, 1617 bp, Artificial Sequence
  derived and/or modified sequence
acaatgcaccccgggggcgggccgagtcgggctgagcggctggagctgggccttggccgcgagaggccggcgaaagctatcttcctgcaccggcggccgggtgagggcggtgggagggagcggtgcctgcgctgtggccatgtctgtgtacgcagggggccggggccccgcgaagctgtgccctcaggccggccccggccggacacccttacccctccatgggtccggcagagggcagtgaccggcaccttctgtgcgtcctggactcctctgagaaacaggagagctcaaaggatggctactgacatgcagaggaagagaagcagcgaatgccttgatggcacattgactccttctgatggacagagtatggagagagctgagagccccacaccaggaatggcccagggaatggagccagatggctacaaggtagtattcgtgcgccggagcccgctggtgctagtggcggtggctcgtacgcggcagtcggcacaagagctggcgcaggagctgctctacatctactaccagatcctaagccttcttaccggtgcgcagctgagccacatcttccagcagaagcagaactatgatttgcggcgcctactctcgggctcagagcgcatcaccgacaacctgctgcagctcatggcacgagaccccagcttcctgatgggggcggcacggtgcctgcccctggcggcggccgtgcgcgacactgtgagcgccagcctgcagcaggcgcgtgcgcgcagcctggtcttctccatcctgctggcccgcaaccagctcgtggcactcgtgcgccgaaaggaccaatttctgcaccccatcgacctgcacctgctcttcaacctcattagttcctcctcgtcctttcgcgagggcgaggcctggacgcccgtgtgcctgcccaaattcaacgcagccggcttcttccacgcacacatctcttacctagagcctgacactgacctctgcctgctgcttgtctccactgaccgtgaggacttctttgcagtctctgactgccgccgccgcttccaggagcgccttcgcaagcgcggagcccacctggccctgcgagaggcactgcgcacaccctactacagcgttgcccaagtgggcatccctgacctgcgtcacttcctctataagtcaaagagctcgggactcttcaccagccctgagattgaggccccatacaccagtgaagaggagcaggagcggctgctgggcctctaccagtacttgcacagtcgtgcccacaatgcctctcgcccactcaagaccatttactacacgggccccaacgagaacctcctggcctgggtgacaggcgcctttgagctctacatgtgttacagccccctggggaccaaggcgtcagccgtcagtgccatccataagctgatgcgctggatccgcaaagaggaagaccgcctcttcattctcacgcccctcacctattgatgggaatgtgtgcgggctcagccttcctggacacactaggtgtgggaagccataggagcctccagatgggggctggcctctcttgcccagccagcgggcagggactgtgggttggtgaatgcattaaagtgctttggggaa

SEQ ID NO: 53878 - DNA, 1473 bp, Artificial Sequence
  derived and/or modified sequence
atgcacccgggtgggggtccatcacgcgctgaacggctggagctcggactcgggagagagaggcccgcaaaggccatatttctgcataggcggccaggagaaggcggaggtcgagaaaggtgcctccggtgcggtcatgtgtgcgtcaggagaggccctggacctagggaggccgtacctagcggtcgtccccgtcctgatacccttacccccccatgggtgcgtcagcgagcagtcaccgggacgttctgcgccagctggacccccctgaggaacaggcgggcacagaggatggcaactgatatgcagagaaagaggtcatctgagtgtctagatgggactctgaccccctctgacggccaatccatggaacgggctgaatctcctactcccggtatggctcaggggatggagcccgacggctataaggtggtctttgttagaagatcccccctggtccttgtcgctgtcgccagaacacgacaatccgcacaagagcttgctcaagagctcctgtatatatattatcaaattctctccctgttaacaggagcccagctgagccacatttttcagcaaaaacagaattacgacttgaggaggctgttatcagggagcgaaagaatcacagataacctgctacagctgatggctcgggatccctcattcttaatgggtgccgcacgctgtctgcccttggctgccgctgtccgcgacacagtttcagcctctctgcaacaggccagagctagaagcttagtttttagcattctgctggcacgtaatcaattagtggcactagtgcgcaggaaagatcagtttctgcaccctatcgatctccacctcctgttcaatctcatcagctccagcagctcgtttcgagagggagaggcctggacacccgtttgtttgccaaaatttaatgcagccggattctttcacgcccatatcagctacctcgaacctgataccgacctgtgtctgctcttagtttctaccgacagagaagacttctttgccgtttccgattgtcggcgacgtttccaggagagacttcggaagcggggtgctcacttagctctcagagaggctctgcggactccctactactctgtggcccaggtcgggatcccggacttacgtcactttttatacaagtctaagagcagcggactgttcacaagtccagagatcgaggcaccctacacaagcgaggaggagcaagagcgactgctcggcctctatcaatacctgcacagtcgcgctcacaacgcttctcgcccactgaagacaatttactacacaggtccgaacgagaacttgctggcgtgggtaactggggcttttgagctttacatgtgttacagccccctggggactaaggcgtctgccgtgtccgccatccataagctgatgcggtggattaggaaagaagaagaccgtctgttcatactgacgccactcacatactag

SEQ ID NO: 53879 - protein, 402 aa, Artificial Sequence
  derived and/or modified sequence
MPWKLWRGSVGCPGDLSSDGLLFRLGPPKPPTELEPEPEIEGLLTPVLEAGDVDEGPVARPLSPTRLQPALPPEAQSVPELEEVARVLAEIPRPLKRRGSMEQAPAVALPPTHKKQYQQIISRLFHRHGGPGPGGPEPELSPITEGSEARAGPPAPAPPAPIPPPAPSQSSPPEQPQSMEMRSVLRKAGSPRKARRARLNPLVLLLDAALTGELEVVQQAVKEMNDPSQPNEEGITALHNAICGANYSIVDFLITAGANVNSPDSHGWTPLHCAASCNDTVICMALVQHGAAIFATTLSDGATAFEKCDPYREGYADCATYLADVEQSMGLMNSGAVYALWDYSAEFGDELSFREGESVTVLRRDGPEETDWWWAALHGQEGYVPRNYFGLFPRVKPQRSKV

SEQ ID NO: 53880 - protein, 828 aa, Artificial Sequence
  derived and/or modified sequence
MDSEAFQSARDFLDMNFQSLAMKHMDLKQMELDTAAAKVDELTKQLESLWSDSPAPPGPQAGPPSRPPRYSSSSIPEPFGSRGSPRKAATDGADTPFGRSESAPTLHPYSPLSPKGRPSSPRTPLYLQPDAYGSLDRATSPRPRAFDGAGSSLGRAPSPRPGPGPLRQQGPPTPFDFLGRAGSPRGSPLAEGPQAFFPERGPSPRPPATAYDAPASAFGSSLLGSGGSAFAPPLRAQDDLTLRRRPPKAWNESDLDVAYEKKPSQTASYERLDVFARPASPSLQLLPWRESSLDGLGGTGKDNLTSATLPRNYKVSPLASDRRSDAGSYRRSLGSAGPSGTLPRSWQPVSRIPMPPSSPQPRGAPRQRPIPLSMIFKLQNAFWEHGASRAMLPGSPLFTRAPPPKLQPQPQPQPQPQSQPQPQLPPQPQTQPQTPTPAPQHPQQTWPPVNEGPPKPPTELEPEPEIEGLLTPVLEAGDVDEGPVARPLSPTRLQPALPPEAQSVPELEEVARVLAEIPRPLKRRGSMEQAPAVALPPTHKKQYQQIISRLFHRHGGPGPGGPEPELSPITEGSEARAGPPAPAPPAPIPPPAPSQSSPPEQPQSMEMRSVLRKAGSPRKARRARLNPLVLLLDAALTGELEVVQQAVKEMNDPSQPNEEGITALHNAICGANYSIVDFLITAGANVNSPDSHGWTPLHCAASCNDTVICMALVQHGAAIFATTLSDGATAFEKCDPYREGYADCATYLADVEQSMGLMNSGAVYALWDYSAEFGDELSFREGESVTVLRRDGPEETDWWWAALHGQEGYVPRNYFGLFPRVKPQRSKV

SEQ ID NO: 53881 - DNA, 3120 bp, Artificial Sequence
  derived and/or modified sequence
ccaagccggagcccgagctggaggaagcccccaggtgccaggatctgcccggatccgcgcccgctccggccggcaccatggacagcgaggcattccagagcgcgcgggactttctggacatgaacttccagtcgctggccatgaaacacatggatctgaagcagatggagctggacacggcggcggccaaggtggatgaactgaccaagcagctggagtcgctgtggtcagactctcccgcgcctcctggcccgcaggccggacccccttctaggccgccccggtacagctccagctcgatccctgagcccttcggcagccgagggtccccccggaaggcggccaccgacggcgcagacaccccgttcggacgatcagagagtgccccaaccctacacccctacagcccgctgtcccccaagggacggccgtcgtcgccgcgcaccccgctctacctgcagccggacgcctacggcagcctggaccgcgcgacctcgccccggccccgcgccttcgatggcgcaggcagctccctcggccgtgcgccctccccgcggcccgggccaggcccgctccgccagcagggtccccccacgcctttcgacttcctgggccgcgcaggctccccccgcggcagccccctggcggaggggccccaggccttcttccccgagcgtgggccgtcaccgcgcccccctgccacagcctacgacgcgccagcgtccgccttcgggagctccctgctaggctccggcggcagcgcattcgccccgcctctgcgcgcgcaagacgacctgacgctgcgccggcggcctccgaaagcctggaacgagtctgacctggacgtggcgtacgagaagaagccttcgcagacagcgagctatgaacgcctggacgtcttcgcaaggcctgcctcgccgagcctgcagctgttgccttggagggagagcagcctggatggactggggggcaccggcaaggacaacctcactagcgccaccctgccgcgcaattacaaggtctctcctctggccagcgaccggcgttcagacgcgggcagctaccggcgctcgctgggctccgcggggccgtcgggcactttgcctcgcagctggcagcccgtcagccgcatccccatgcccccctccagcccccagccccgcggggccccgcgccagcgtcccatccccctcagcatgatcttcaagctgcagaacgccttctgggagcacggggccagccgcgccatgctccctgggtcccccctcttcacccgagcacccccgcctaagctgcagccccaaccacaaccacagccccagccacaatcacaaccacagccccagctgcccccacagccccagacccaaccccaaacccctaccccagccccccagcatccccaacagacatggccccctgtgaacgaaggaccccccaaaccccccaccgagctggagcctgagccggagatagaggggctgctgacaccagtgctggaggctggcgatgtggatgaaggccctgtagcaaggcctctcagccccacgaggctgcagccagcactgccaccggaggcacagtcggtgcccgagctggaggaggtggcacgggtgttggcggaaattccccggcccctcaaacgcaggggctccatggagcaggcccctgctgtggccctgccccctacccacaagaaacagtaccagcagatcatcagccgcctcttccatcgtcatggggggccagggcccggggggccggagccagagctgtcccccatcactgagggatctgaggccagggcagggccccctgctcctgccccaccagctcccattccacccccggccccgtcccagagcagcccaccagagcagccgcagagcatggagatgcgctctgtgctgcggaaggcgggctccccgcgcaaggcccgccgcgcgcgcctcaaccctctggtgctcctcctggacgcggcgctgaccggggagctggaggtggtgcagcaggcggtgaaggagatgaacgacccgagccagcccaacgaggagggcatcactgccttgcacaacgccatctgcggcgccaactactctatcgtggatttcctcatcaccgcgggtgccaatgtcaactcccccgacagccacggctggacacccttgcactgcgcggcgtcgtgcaacgacacagtcatctgcatggcgctggtgcagcacggcgctgcaatcttcgccaccacgctcagcgacggcgccaccgccttcgagaagtgcgacccttaccgcgagggttatgctgactgcgccacctacctggcagacgtcgagcagagtatggggctgatgaacagcggggcagtgtacgctctctgggactacagcgccgagttcggggacgagctgtccttccgcgagggcgagtcggtcaccgtgctgcggagggacgggccggaggagaccgactggtggtgggccgcgctgcacggccaggagggctacgtgccgcggaactacttcgggctgttccccagggtgaagcctcaaaggagtaaagtctagcaggatagaaggaggtttctgaggctgacagaaacaagcattcctgccttccctccagacctctccctctgttttttgctgcctttatctgcacccctcaccctgctggtggtggtccttgccaccggttctctgttctcctggaagtccagggaagaaggagggccccagccttaaatttagtaatctgccttagccttgggaggtctgggaagggctggaaatcactggggacaggaaaccacttccttttgccaaatcagatcccgtccaaagtgcctcccatgcctaccaccatcatcacatcccccagcaagccagccacctgcccagccgggcctgggatgggccaccacaccactggatattcctgggagtcactgctgacaccatctctcccagcagtcttggggtctgggtgggaaacattggtctctaccaggatccctgccccacctctccccaattaagtgccttcacacagcactggtttaatgtttataaacaaaatagagaaactttccttataaataaaagtagtttgcacagaaattga

SEQ ID NO: 53882 - DNA, 2487 bp, Artificial Sequence
  derived and/or modified sequence
atggacagcgaggccttccagagcgccagagacttcctggacatgaacttccagagcctggccatgaagcacatggacctgaagcagatggagctggacaccgccgccgccaaggtggacgagctgaccaagcagctggagagcctgtggagcgacagccccgccccccccggcccccaggccggcccccccagcagaccccccagatacagcagcagcagcatccccgagcccttcggcagcagaggcagccccagaaaggccgccaccgacggcgccgacacccccttcggcagaagcgagagcgcccccaccctgcacccctacagccccctgagccccaagggcagacccagcagccccagaacccccctgtacctgcagcccgacgcctacggcagcctggacagagccaccagccccagacccagagccttcgacggcgccggcagcagcctgggcagagcccccagccccagacccggccccggccccctgagacagcagggcccccccacccccttcgacttcctgggcagagccggcagccccagaggcagccccctggccgagggcccccaggccttcttccccgagagaggccccagccccagaccccccgccaccgcctacgacgcccccgccagcgccttcggcagcagcctgctgggcagcggcggcagcgccttcgccccccccctgagagcccaggacgacctgaccctgagaagaagaccccccaaggcctggaacgagagcgacctggacgtggcctacgagaagaagcccagccagaccgccagctacgagagactggacgtgttcgccagacccgccagccccagcctgcagctgctgccctggagagagagcagcctggacggcctgggcggcaccggcaaggacaacctgaccagcgccaccctgcccagaaactacaaggtgagccccctggccagcgacagaagaagcgacgccggcagctacagaagaagcctgggcagcgccggccccagcggcaccctgcccagaagctggcagcccgtgagcagaatccccatgccccccagcagcccccagcccagaggcgcccccagacagagacccatccccctgagcatgatcttcaagctgcagaacgccttctgggagcacggcgccagcagagccatgctgcccggcagccccctgttcaccagagcccccccccccaagctgcagccccagccccagccccagccccagccccagagccagccccagccccagctgcccccccagccccagacccagccccagacccccacccccgccccccagcacccccagcagacctggccccccgtgaacgagggcccccccaagccccccaccgagctggagcccgagcccgagatcgagggcctgctgacccccgtgctggaggccggcgacgtggacgagggccccgtggccagacccctgagccccaccagactgcagcccgccctgccccccgaggcccagagcgtgcccgagctggaggaggtggccagagtgctggccgagatccccagacccctgaagagaagaggcagcatggagcaggcccccgccgtggccctgccccccacccacaagaagcagtaccagcagatcatcagcagactgttccacagacacggcggccccggccccggcggccccgagcccgagctgagccccatcaccgagggcagcgaggccagagccggcccccccgcccccgccccccccgcccccatccccccccccgcccccagccagagcagcccccccgagcagccccagagcatggagatgagaagcgtgctgagaaaggccggcagccccagaaaggccagaagagccagactgaaccccctggtgctgctgctggacgccgccctgaccggcgagctggaggtggtgcagcaggccgtgaaggagatgaacgaccccagccagcccaacgaggagggcatcaccgccctgcacaacgccatctgcggcgccaactacagcatcgtggacttcctgatcaccgccggcgccaacgtgaacagccccgacagccacggctggacccccctgcactgcgccgccagctgcaacgacaccgtgatctgcatggccctggtgcagcacggcgccgccatcttcgccaccaccctgagcgacggcgccaccgccttcgagaagtgcgacccctacagagagggctacgccgactgcgccacctacctggccgacgtggagcagagcatgggcctgatgaacagcggcgccgtgtacgccctgtgggactacagcgccgagttcggcgacgagctgagcttcagagagggcgagagcgtgaccgtgctgagaagagacggccccgaggagaccgactggtggtgggccgccctgcacggccaggagggctacgtgcccagaaactacttcggcctgttccccagagtgaagccccagagaagcaaggtgtag

SEQ ID NO: 53883 - DNA, 2487 bp, Artificial Sequence
  derived and/or modified sequence
atggattcagaagcattccaatccgctagagatttcttggatatgaattttcaaagcttggctatgaaacacatggacctgaagcaaatggagcttgacaccgccgccgcaaaagtggacgaactcacaaaacaacttgagtccttatggagcgattcgccggccccccccggcccccaggcaggaccaccatccagaccccccaggtattcctcctcaagcattcccgaaccttttgggagccggggcagcccgagaaaagccgctactgacggcgccgacacaccattcgggaggagcgaaagtgcaccaacactccatccatacagccccctgtccccaaagggacgtccctcatctccgaggacccccctgtatcttcaacctgacgcatacgggagcttggacagggcaacaagcccgaggccccgggctttcgacggagcaggatcaagccttggaagggccccctcccctaggcccggtcccggccccctgcggcagcaaggcccccccactcctttcgacttcctcggacgcgcaggcagccctcgtggttctcccctggctgaagggccacaggcattcttccccgagagagggcctagcccaagaccaccggctaccgcttacgacgcgcccgctagtgcatttggctcttctctccttggaagcggcggatctgcttttgcgccccccctgagagcccaggacgacttgactttacgccggcggccgccaaaagcttggaacgagtcagacctagatgttgcgtacgaaaagaagccctctcagaccgcgtcttatgaacgtttagacgtttttgctcggcctgcttccccctcccttcagctgctgccttggagagaatcctcactggacggattaggtggcacgggtaaagacaacctgacgtcagcaactctgcccagaaattacaaggtttcccctctggccagcgatcgcagaagtgatgcggggtcctaccgccgctccctgggttcagcaggtccgagcggaactttgcccaggtcatggcagcctgtgtcccggattccaatgcctccctccagtcctcagccacgtggagcccctaggcagaggccgattccactctccatgatcttcaaacttcagaacgccttctgggagcacggcgcaagtcgggccatgctacccggttctcccttattcacccgggccccaccaccaaagctgcaaccccaaccgcaaccacagccacagcctcagtcccagccccagcctcagctgcccccccagccacagactcagccacagactccaacacctgcaccgcaacacccgcagcaaacatggccaccggtcaatgagggcccacccaagccaccaacggagttagagcccgagcccgagatcgaaggtctgctaacgcctgtcttggaagctggggacgtggacgagggacccgtggcaaggcctctttctccaacccgtctgcaacctgccctacctccagaggcgcagagtgttcctgaactcgaagaggtggctcgcgtgctggctgagatccctcgccccctgaagcgaagaggctcaatggagcaggcaccagccgtagccttgccacccacccacaaaaagcagtaccagcagatcataagtaggttgttccaccgccacggcgggcctgggcctggaggcccagagccggagttgagccctataactgagggctccgaagcaagggctggcccaccggctcctgctccaccggcaccaataccccctcctgcaccttcgcagtcctcccctcctgagcagcctcaaagtatggaaatgaggtccgtcctcagaaaggcaggctcaccgcgcaaggcaaggagggcacggctaaatccccttgtgcttctgctagatgccgctttgacaggcgaacttgaagtggtacagcaagccgtaaaggaaatgaacgacccctctcagccgaatgaggagggaattaccgccctgcacaacgctatctgcggagcgaactattctatcgtggatttcctcattactgccggggctaacgtcaactcccccgatagccacggatggaccccactccattgtgcggcctcctgtaatgatacagtaatatgcatggcgctagtccagcacggagccgctatattcgcaacaactttgtctgacggcgccaccgcatttgagaaatgtgacccttatcgtgagggatacgctgattgtgccacctacctggccgacgtagagcagagtatgggattgatgaattccggcgctgtctacgccttgtgggactattcagccgagttcggagatgagctgtccttcagagaaggagagtcggtgaccgtactccgcagagacggcccggaagaaacagattggtggtgggctgcccttcacggtcaggaagggtacgtcccgcgcaattactttggtctttttcccagagtaaagccgcaaagatccaaggtatag

SEQ ID NO: 53884 - DNA, 2487 bp, Artificial Sequence
  derived and/or modified sequence
atggacagtgaggctttccagtctgcccgggattttctggacatgaatttccaaagcctggctatgaaacacatggacctcaagcaaatggaactggacacagcggcggcaaaggtcgacgagctgacaaaacagctggagagtctttggagtgatagcccagcgcctcccgggccccaagctggaccccccagtcgcccacctcgctattcctcaagcagtatacctgagccctttgggtcaagggggtctcccaggaaagcagccacagatggtgccgatactccgtttgggagatccgagagtgccccaaccctgcacccttatagcccattgagtcctaaaggtaggccgtcatccccgaggacgcctctgtacctgcaacccgatgcctatggctctctcgacagggccacgtccccgcgccccagggccttcgatggtgccggatcaagtctgggccgcgccccatccccccgacccggacccgggccactgcgccagcagggcccaccaacgccatttgatttcctgggaagagccggttcgccacgaggatctccactggctgagggtcctcaggcctttttccctgaacggggcccttccccaaggccgcccgccacagcttatgacgctccagcttccgctttcggctcaagcttgctcggctccggggggtctgcctttgcgccaccactccgggctcaggatgacttgacccttcgacgcagacctcccaaggcttggaatgaatcagatcttgatgtggcctatgaaaaaaagccaagtcaaacagcttcgtatgagagactggacgtcttcgcccgtcccgcatctccctctttgcagctgctgccttggagagaatctagcctggatgggctcggtgggacaggcaaggacaatctgactagcgccactctgcccagaaactataaagtcagccctcttgcatctgaccgccgcagcgacgcgggttcctatcgccgcagtctagggtcagcaggcccctcagggactctgcccagatcctggcagcctgtctctcggatccccatgcctccctcttccccccagccacgaggggcccccagacagcgtcccatacccttgtctatgatattcaaactgcaaaatgccttctgggaacacggagcctctcgcgccatgctgcctggatcaccactcttcacccgtgcgcctccccccaagctgcagccacagcctcagcctcagcctcagcctcaatcccaacctcagcctcaactaccccctcagccccagacacaaccgcagactcctacccctgcacctcagcacccacaacaaacctggccgccagtgaacgagggtcctcccaaacccccaaccgagcttgaaccagagcctgagatcgaggggctgctgaccccagtgttggaggctggggacgtagatgagggcccagtggctagaccattgagccccacacggcttcagccggcactgcctcctgaggcccaatcagtccccgagctggaggaggttgctagagtgctggccgagatcccccgtccgctaaaaagacgcggctctatggagcaagcccccgccgttgccctaccccccacccataaaaaacaataccagcagattatttctcgtttattccatagacacggcggaccaggccctgggggccctgagccagaattgtctcccatcacagagggatcagaggcccgagccggaccaccggcgccagctcctcctgcacccattccaccccccgccccctctcagagtagcccacctgagcaaccccagtccatggagatgcggagcgtcctgcgcaaggccggatcccctaggaaggctcgaagggctcgactgaatccactggtactgttgctggatgccgccttaacgggcgagctggaggtagtccaacaggcggtgaaagaaatgaatgatcctagccagcctaacgaggaaggtattacggcccttcacaacgcgatctgcggggcaaactattcgatagtggatttcctgatcactgctggggccaacgtgaactctcccgatagtcatggctggactcctctgcactgtgctgccagctgcaatgacacggttatctgtatggccctggtgcagcacggggcagcaatatttgctactaccttgagtgatggtgctacggccttcgaaaagtgcgatccttacagggaaggctatgcagattgtgcgacgtatctcgccgatgtcgagcaatcaatggggctgatgaattctggtgcggtgtatgcgctgtgggattactccgcggagtttggagacgaacttagtttcagagaaggcgaatccgtgacagtcctacggcgggatggtcccgaggagactgattggtggtgggccgctctgcatggacaggaagggtacgttccccgcaattatttcgggctttttccccgcgtcaaaccgcagcgcagcaaggtgtag

SEQ ID NO: 53885 - DNA, 2487 bp, Artificial Sequence
  derived and/or modified sequence
atggattctgaggccttccagagcgcccgggacttcctggacatgaacttccagagcctggccatgaagcacatggacctgaagcagatggagctggacacagctgctgccaaggtggatgagctgaccaagcagctggagagcctgtggagcgacagccctgcccctcctggcccccaggccggcccccccagcaggcctccccgctacagcagcagcagcatccctgagcccttcggcagccggggcagccccaggaaggccgccacagatggagctgacaccccatttggccgctctgagagcgcccccaccctgcacccctacagccccctgagccccaagggccggcccagcagccccaggacccccctgtacctgcagccagatgcctacggcagcctggaccgggccaccagcccccggccccgggcctttgatggagctggcagcagcctgggccgggcccccagccccaggcctggccctggccccctgcggcagcagggcccccccaccccatttgacttcctgggccgggccggcagcccccggggcagccccctggccgagggcccccaggccttcttccctgagcggggccccagcccccggcccccagccacagcctatgatgccccagccagcgccttcggcagcagcctgctgggcagcggcggcagcgcctttgccccacccctgcgggcccaggatgacctgaccctgcggcggcggccccccaaggcctggaatgaaagtgacctggatgtggcctatgagaagaagcccagccagacagccagctatgagcggctggatgtgtttgcccggcctgccagccccagcctgcagctgctgccctggagggagagcagcctggatggcctgggcggcaccgggaaggacaacctgaccagcgccaccctgcccaggaactacaaggtgagccccctggccagtgaccggcggagtgatgctggcagctaccgccgcagcctgggcagcgctggccccagcggcaccctgcccaggtcctggcagcctgtgagccgcatccccatgccacccagcagcccccagcccaggggggccccccggcagaggcccatccccctgtccatgatcttcaagctgcagaatgccttctgggagcacggggccagccgggccatgctgcccggcagccccctcttcacccgggcccccccacccaagctgcagccccagccccagccccagccccagccccagagccagccccagccccagctgcccccccagccccagacccagccccagacccccaccccagccccccagcacccccagcagacctggccccctgtgaatgaaggaccacccaagccacccacagagctggagcctgagcctgagattgagggcctgctgacccctgtgctggaggccggagatgtggatgagggccctgtggcccggcccctgagccccacccggctgcagcctgccctgcccccagaggcccagagcgtgcctgagctggaggaggtggcccgggtgctggccgagatcccccggcccctgaagagaagaggctccatggagcaggccccagctgtggccctgccccccacccacaagaagcagtaccagcagatcatcagccgcctcttccaccgccacggcggccctggccctgggggccctgagcctgagctgagccccatcacagagggcagcgaggcccgggccggccccccagccccagcccccccagcccccatccccccaccagcccccagccagagcagccccccagagcagccccagagcatggagatgaggtctgtgctgaggaaggccggcagccccaggaaggcccggcgggcccggctgaaccccctggtgctgctgctggatgctgccctgactggagagctggaggtggtgcagcaggccgtgaaggagatgaatgaccccagccagcccaatgaggagggcatcacagccctgcacaatgccatctgtggggccaactacagcatcgtggacttcctgatcacagctggggccaacgtgaacagcccagacagccacggctggacccccctgcactgtgccgccagctgcaatgacaccgtcatctgcatggccctggtgcagcacggggccgccatctttgccaccaccctgagtgatggagccacagcctttgagaagtgtgacccctaccgggagggctacgccgactgtgccacctacctggctgatgtggagcagagcatgggcctgatgaacagcggggctgtgtatgccctgtgggactacagcgctgagtttggagatgagctgtccttccgggagggggagagcgtgacagtgctgcggagagatggccctgaggagacagactggtggtgggccgccctgcacggccaggagggctacgtgcccaggaactacttcggcctcttcccccgggtgaagccccagaggagcaaggtgtag

SEQ ID NO: 53886 - DNA, 1765 bp, Artificial Sequence
  derived and/or modified sequence
atgccctggaagttgtggagagggagtgttgggtgtcctggggacctgtcctctgatgggctcttgttccggctaggaccccccaaaccccccaccgagctggagcctgagccggagatagaggggctgctgacaccagtgctggaggctggcgatgtggatgaaggccctgtagcaaggcctctcagccccacgaggctgcagccagcactgccaccggaggcacagtcggtgcccgagctggaggaggtggcacgggtgttggcggaaattccccggcccctcaaacgcaggggctccatggagcaggcccctgctgtggccctgccccctacccacaagaaacagtaccagcagatcatcagccgcctcttccatcgtcatggggggccagggcccggggggccggagccagagctgtcccccatcactgagggatctgaggccagggcagggccccctgctcctgccccaccagctcccattccacccccggccccgtcccagagcagcccaccagagcagccgcagagcatggagatgcgctctgtgctgcggaaggcgggctccccgcgcaaggcccgccgcgcgcgcctcaaccctctggtgctcctcctggacgcggcgctgaccggggagctggaggtggtgcagcaggcggtgaaggagatgaacgacccgagccagcccaacgaggagggcatcactgccttgcacaacgccatctgcggcgccaactactctatcgtggatttcctcatcaccgcgggtgccaatgtcaactcccccgacagccacggctggacacccttgcactgcgcggcgtcgtgcaacgacacagtcatctgcatggcgctggtgcagcacggcgctgcaatcttcgccaccacgctcagcgacggcgccaccgccttcgagaagtgcgacccttaccgcgagggttatgctgactgcgccacctacctggcagacgtcgagcagagtatggggctgatgaacagcggggcagtgtacgctctctgggactacagcgccgagttcggggacgagctgtccttccgcgagggcgagtcggtcaccgtgctgcggagggacgggccggaggagaccgactggtggtgggccgcgctgcacggccaggagggctacgtgccgcggaactacttcgggctgttccccagggtgaagcctcaaaggagtaaagtctagcaggatagaaggaggtttctgaggctgacagaaacaagcattcctgccttccctccagacctctccctctgttttttgctgcctttatctgcacccctcaccctgctggtggtggtccttgccaccggttctctgttctcctggaagtccagggaagaaggagggccccagccttaaatttagtaatctgccttagccttgggaggtctgggaagggctggaaatcactggggacaggaaaccacttccttttgccaaatcagatcccgtccaaagtgcctcccatgcctaccaccatcatcacatcccccagcaagccagccacctgcccagccgggcctgggatgggccaccacaccactggatattcctgggagtcactgctgacaccatctctcccagcagtcttggggtctgggtgggaaacattggtctctaccaggatccctgccccacctctccccaattaagtgccttcacacagcactggtttaatgtttataaacaaaatagagaaactttccttataaataaaagtagtttgcacagaaattga

SEQ ID NO: 53887 - DNA, 2487 bp, Artificial Sequence
  derived and/or modified sequence
atggacagcgaggccttccagagcgcccgggacttcctggacatgaacttccaatcattggcgatgaagcacatggacctcaagcaaatggagcttgacactgcagctgccaaagtagacgaacttaccaaacagctggagtcgctgtggtccgactctcccgctcccccggggcctcaagccggccccccctcaagacctcccaggtactcaagctcatcaatacccgagccttttgggtctcgaggtagcccccgtaaagccgcaaccgacggcgctgatacaccctttggcaggtccgaatcagcccccaccctgcacccatatagcccactgtcacctaaaggcagaccaagtagcccgaggacccccctctacctgcagcctgatgcgtacggatccctcgatagggccacgtctcctaggccgcgggcctttgacggagccgggtcttcactgggccgggccccctctcctaggccagggcctggccctctgcggcagcagggaccacctactccgtttgacttccttggccgcgccggttctccgcggggttcccctttagcggagggacctcaggccttctttcccgaacgggggccttcacctcggcccccggccactgcctatgacgctcccgcgagtgccttcggttcctcccttctgggctctgggggatctgcattcgccccccctcttagagctcaggatgacctgacgttgagacgccgcccaccaaaggcatggaacgagtcagacctggacgtggcctatgaaaagaagcctagccaaacagcatcatatgagcggttagatgtctttgcaaggccggccagcccctcccttcaattgctgccttggagggaaagcagccttgatggcctgggtggtaccgggaaggacaaccttactagcgccacgctgccccgaaattacaaggtgtctccacttgcctccgaccgacgctctgacgctggctcttataggcgatctctggggtccgccggtccatctggaactttaccccggagctggcaacccgtaagccgaataccaatgcccccctctagcccacagcctaggggtgccccccgtcagaggcccatccctctaagtatgatttttaaactccagaacgctttctgggaacatggagctagcagagcgatgctgccaggtagccccctgttcacgcgggccccaccaccaaaacttcaacctcagcctcaaccacagccccagccacagtctcagccccagccccaattgccgccccagcctcagacacagcctcagacccctactcccgccccccaacatccacaacagacttggccaccagtgaatgaaggcccccctaaacctcctaccgaactggaaccggagcccgaaattgaagggctgttgacacctgtgctggaagcaggagacgtggatgaaggtccagtggctcgcccattaagtccgacccgtctgcagccagcgttaccacccgaggctcagtcagtgcctgagcttgaggaagtcgcaagggttttggctgaaatccccaggccactgaaaaggaggggttcgatggagcaagcgccagccgtcgcgttgccaccaacccacaaaaaacagtaccagcagatcatttctagattattccacagacatggaggaccaggcccaggcggacccgagcccgaactgtcgcctatcactgaaggcagcgaggcgagggcgggcccaccagcgccagcccccccagccccaattccaccccccgcgccctctcagtcctcaccgccggaacaaccccagagtatggaaatgaggtcggttctgaggaaggctggatcccctagaaaggctaggagagctagactcaatcccctggtcctgctgctcgacgcagccctgaccggcgagctcgaagtggtgcagcaagccgtgaaagagatgaacgatccatcccaaccaaatgaagaaggcataacagcccttcataacgcaatctgtggcgctaattacagtattgtggacttcctcatcacagctggggccaacgtgaacagtccagacagccatgggtggacccctttgcattgtgctgcctcctgcaatgacactgtcatttgcatggctttagtccagcatggagctgccatttttgctaccactctcagtgacggtgccacagcttttgagaagtgtgatccttatagagagggttatgccgactgcgcgacttatctggccgatgtggagcagagtatgggactgatgaacagcggcgcagtttacgccctctgggattactctgcggagtttggcgacgaactttcctttagagagggcgagtccgtgacagttctgcgtagagatggcccagaagaaactgattggtggtgggccgcactgcatggtcaggaggggtacgtgccacgtaactatttcggtttattccctagagtgaagccgcagcggagtaaggtgtag

SEQ ID NO: 53888 - DNA, 2487 bp, Artificial Sequence
  derived and/or modified sequence
atggacagcgaggccttccagagcgcccgggacttcctggacatgaatttccaaagtctggccatgaagcacatggacctcaaacagatggagttagataccgccgccgccaaggtagatgagctcactaagcagttagaatccctctggagcgattcccccgctccgcctggaccccaggcagggcccccatccaggcccccaaggtattcatcttcctcaatccctgagcccttcggttccaggggctctccccgtaaggccgccaccgacggagccgacacgccatttggcaggtccgagtccgcccccacactgcatccatacagccctctgagccccaagggacggcccagctcgcccagaactcctctatatctccagcccgacgcctacggcagccttgatcgcgctacatccccccggccacgagctttcgatggagctggatcatcactcggacgtgccccctcgcctagaccaggcccaggcccgctgcggcagcaggggcctcctacccccttcgactttctgggaagagctggaagcccaagaggaagcccactggcagagggcccgcaggcttttttcccagagcgcggaccttcacctagacctccagccacggcatacgacgctccagccagcgcttttggctcatccttgcttggaagcgggggctctgcatttgcgccccccttaagggcacaggacgacctcacccttcggaggaggccccccaaagcctggaatgaatcagatttggatgtggcgtacgagaaaaagccatcccagaccgcatcttacgaaagattagacgttttcgccagacccgctagcccatccttacagttactaccctggagggaatcatccctggatggcctgggaggcacagggaaggacaatctcacaagcgcgactctcccccgtaactacaaggtgtcaccgctcgccagcgacaggcgttctgacgcagggagctaccgtcgttctctgggctccgcaggacccagtgggacactgccacggagctggcagcccgtgagccgcattcccatgccaccgtccagcccacagccgaggggcgcacctagacagaggcccatccctctgagtatgatctttaagcttcagaatgcattctgggaacatggggctagcagagccatgctcccaggatcccccctgttcacacgcgcaccaccccctaaattgcagcctcagccccagccccaaccccagcctcagtcacagccgcagccacaattaccacctcagccccaaacgcaaccccagacccctacgccagctccacagcatccccagcagacttggcccccagttaatgagggccccccaaaaccccccaccgagctggaacctgagccggagattgagggtttactgacccccgtgcttgaagccggggatgtcgatgaggggcctgtcgccagacctctgtcaccaacccgcctccagcctgcccttcctcccgaggcacagagcgtgcccgaattggaggaggttgcaagggtcctggccgagataccccgtcctctgaaaaggagaggtagcatggagcaagcgccagccgtagctctgccgcctacccacaaaaagcaatatcagcagattattagccggctctttcaccggcatggcggaccaggcccagggggcccagaacccgaactttcaccaatcactgaagggagtgaagctcgggcaggcccccccgctcccgcaccgccagcaccaattccgcccccagcaccttcccagtctagcccacctgagcaaccccagtccatggagatgagaagcgtgttgcgcaaagccgggtccccaagaaaagcgaggcgtgcacggctcaaccccttggttctgcttctggacgctgccctgacaggagaactggaagtcgtgcaacaggcagtcaaagagatgaatgatccatcgcagcccaacgaggaaggaattaccgcccttcacaacgccatttgcggggccaactatagtatagtggacttcctgataaccgcgggcgctaacgtgaattcgcccgatagtcacggctggaccccattgcactgcgcagcctcgtgtaacgacaccgtgatatgtatggccctcgtgcaacatggtgccgccatctttgctacaaccctcagcgatggagccaccgcgtttgagaagtgtgacccctaccgcgaaggctatgccgactgtgcgacctacctagccgatgtagagcagtcaatgggcctgatgaattctggcgccgtctatgcattgtgggattattctgccgagtttggggacgaactgtcgttcagagaaggcgagtccgtgaccgttttacgtcgtgacggcccagaagagactgattggtggtgggcagccctccacggtcaggaaggatacgtgcctaggaattacttcgggctgttcccaagagtgaagccccagcgttcaaaggtatag

SEQ ID NO: 53889 - DNA, 3122 bp, Artificial Sequence
  derived and/or modified sequence
cttcctaagccttaaagagacaggacggtcgattggtctgaaattcttgaagagacaggcgcccgctccggccggcaccatggacagcgaggcattccagagcgcgcgggactttctggacatgaacttccagtcgctggccatgaaacacatggatctgaagcagatggagctggacacggcggcggccaaggtggatgaactgaccaagcagctggagtcgctgtggtcagactctcccgcgcctcctggcccgcaggccggacccccttctaggccgccccggtacagctccagctcgatccctgagcccttcggcagccgagggtccccccggaaggcggccaccgacggcgcagacaccccgttcggacgatcagagagtgccccaaccctacacccctacagcccgctgtcccccaagggacggccgtcgtcgccgcgcaccccgctctacctgcagccggacgcctacggcagcctggaccgcgcgacctcgccccggccccgcgccttcgatggcgcaggcagctccctcggccgtgcgccctccccgcggcccgggccaggcccgctccgccagcagggtccccccacgcctttcgacttcctgggccgcgcaggctccccccgcggcagccccctggcggaggggccccaggccttcttccccgagcgtgggccgtcaccgcgcccccctgccacagcctacgacgcgccagcgtccgccttcgggagctccctgctaggctccggcggcagcgcattcgccccgcctctgcgcgcgcaagacgacctgacgctgcgccggcggcctccgaaagcctggaacgagtctgacctggacgtggcgtacgagaagaagccttcgcagacagcgagctatgaacgcctggacgtcttcgcaaggcctgcctcgccgagcctgcagctgttgccttggagggagagcagcctggatggactggggggcaccggcaaggacaacctcactagcgccaccctgccgcgcaattacaaggtctctcctctggccagcgaccggcgttcagacgcgggcagctaccggcgctcgctgggctccgcggggccgtcgggcactttgcctcgcagctggcagcccgtcagccgcatccccatgcccccctccagcccccagccccgcggggccccgcgccagcgtcccatccccctcagcatgatcttcaagctgcagaacgccttctgggagcacggggccagccgcgccatgctccctgggtcccccctcttcacccgagcacccccgcctaagctgcagccccaaccacaaccacagccccagccacaatcacaaccacagccccagctgcccccacagccccagacccaaccccaaacccctaccccagccccccagcatccccaacagacatggccccctgtgaacgaaggaccccccaaaccccccaccgagctggagcctgagccggagatagaggggctgctgacaccagtgctggaggctggcgatgtggatgaaggccctgtagcaaggcctctcagccccacgaggctgcagccagcactgccaccggaggcacagtcggtgcccgagctggaggaggtggcacgggtgttggcggaaattccccggcccctcaaacgcaggggctccatggagcaggcccctgctgtggccctgccccctacccacaagaaacagtaccagcagatcatcagccgcctcttccatcgtcatggggggccagggcccggggggccggagccagagctgtcccccatcactgagggatctgaggccagggcagggccccctgctcctgccccaccagctcccattccacccccggccccgtcccagagcagcccaccagagcagccgcagagcatggagatgcgctctgtgctgcggaaggcgggctccccgcgcaaggcccgccgcgcgcgcctcaaccctctggtgctcctcctggacgcggcgctgaccggggagctggaggtggtgcagcaggcggtgaaggagatgaacgacccgagccagcccaacgaggagggcatcactgccttgcacaacgccatctgcggcgccaactactctatcgtggatttcctcatcaccgcgggtgccaatgtcaactcccccgacagccacggctggacacccttgcactgcgcggcgtcgtgcaacgacacagtcatctgcatggcgctggtgcagcacggcgctgcaatcttcgccaccacgctcagcgacggcgccaccgccttcgagaagtgcgacccttaccgcgagggttatgctgactgcgccacctacctggcagacgtcgagcagagtatggggctgatgaacagcggggcagtgtacgctctctgggactacagcgccgagttcggggacgagctgtccttccgcgagggcgagtcggtcaccgtgctgcggagggacgggccggaggagaccgactggtggtgggccgcgctgcacggccaggagggctacgtgccgcggaactacttcgggctgttccccagggtgaagcctcaaaggagtaaagtctagcaggatagaaggaggtttctgaggctgacagaaacaagcattcctgccttccctccagacctctccctctgttttttgctgcctttatctgcacccctcaccctgctggtggtggtccttgccaccggttctctgttctcctggaagtccagggaagaaggagggccccagccttaaatttagtaatctgccttagccttgggaggtctgggaagggctggaaatcactggggacaggaaaccacttccttttgccaaatcagatcccgtccaaagtgcctcccatgcctaccaccatcatcacatcccccagcaagccagccacctgcccagccgggcctgggatgggccaccacaccactggatattcctgggagtcactgctgacaccatctctcccagcagtcttggggtctgggtgggaaacattggtctctaccaggatccctgccccacctctccccaattaagtgccttcacacagcactggtttaatgtttataaacaaaatagagaaactttccttataaataaaagtagtttgcacagaaattga

SEQ ID NO: 53890 - DNA, 2487 bp, Artificial Sequence
  derived and/or modified sequence
atggatagtgaagcatttcaaagcgctcgcgactttctggatatgaacttccagtccttggcaatgaagcatatggatttgaaacagatggagctcgataccgctgccgctaaggtggacgaactgaccaaacagctggaatctctctggagcgattcacccgcacctccaggccctcaggccggacccccaagcagaccccctcgctattccagctcttccatcccagagccctttggttctcggggaagtcccagaaaagcagctactgacggggctgatactccattcggtagatccgaaagcgcacctacattgcatccttatagcccacttagtcctaaagggcgtccatccagcccccgaacacccctgtatctgcaacctgatgcctacggcagcctggaccgagctacatcaccacgtcccagggccttcgatggagcgggtagcagtctcgggagggcgccaagcccacgcccaggccctgggccattaaggcagcagggcccaccgactcccttcgactttttaggccgtgcaggctcaccacgtggcagtcctcttgccgaggggcctcaagctttctttcctgaacgtggccctagtccgaggcctccagcaaccgcctacgatgccccagccagtgcatttggcagctcattgctgggctcagggggaagtgcgttcgcccctcctcttcgtgcccaagacgatcttaccctgcggcgaaggcctcctaaggcctggaatgagtccgatctcgatgtggcatacgagaagaagccctctcagacagcctcctacgagagactggacgtctttgcccgacccgcaagtccttctctccagctgttgccctggagggagagtagtctggatgggcttgggggaacaggtaaggacaacctgacctctgccactcttcctagaaattacaaagtgagcccactggcatctgacaggcggtctgacgcaggcagttataggaggtccctgggcagtgccggtccgagcggaaccctcccacgcagttggcaacctgtatctcgaattcccatgcccccatcatccccccagccacggggtgcaccgagacagcgacccatacctctgtcgatgatcttcaagctacagaatgcattttgggaacatggggcaagccgcgctatgcttccaggcagccctctgtttactcgcgcacctccgccaaagctgcaaccgcaaccacagccacagccacagccacagtctcagcctcagccacagctaccccctcaacctcagacccagccccagacaccgaccccagctccccagcaccctcagcagacttggcccccagtgaacgaaggccctcccaaacccccaaccgagctcgagcccgagcccgaaatcgaaggcctactgacccccgttttggaggcgggagacgtggacgagggcccagtagcgaggccgttgtcacccacccggcttcagcctgcgctgccacccgaggctcagtcagttccagagctcgaggaagtggctagagttctcgcggaaatacccagacccttaaaaagacgaggtagtatggaacaggctcctgctgtagcgcttcctcctacacataagaagcagtaccagcaaattatcagtcggctgtttcatcgccacggcggtccagggcctggagggccagagcctgaactttcccctataaccgagggcagcgaggctcgcgctggacctccagccccagcccctcccgctccgatacctcccccagctcccagccaatcaagtccacccgaacagccgcagtcgatggagatgagaagcgtgctgcgcaaagccggatcccccaggaaggctcgccgagctcgtctgaaccctcttgtcctccttctcgatgccgctctcacgggcgaactggaagtagtgcagcaagctgtcaaggaaatgaatgacccctctcagcctaacgaagaggggatcaccgctctccacaatgcgatatgtggagctaattacagcatcgtggacttcctaattactgcaggtgctaatgttaactctcctgatagtcacggatggacaccccttcattgcgctgcatcttgcaatgacacagttatctgcatggccctagttcagcacggagcggctatattcgcgacgacgctgagcgacggagcaacggcattcgaaaaatgtgatccctatagggaaggatatgcggattgcgcgacctacctggcagatgtggaacaaagtatgggcctgatgaacagtggcgctgtttatgccctctgggactattccgcggagtttggggacgaattgtcttttcgcgagggcgaaagcgtcacagttttgcggcgagacggcccagaggagactgattggtggtgggccgcactccacggccaggaggggtatgttcccaggaattatttcggtctattcccaagagtcaaacctcaacgatctaaggtatag

SEQ ID NO: 53891 - DNA, 2487 bp, Artificial Sequence
  derived and/or modified sequence
atggacagcgaagcctttcagagtgcaagggacttcttggatatgaactttcaaagcctggctatgaagcacatggatctcaagcagatggagctcgacaccgctgccgcaaaagtagacgagcttaccaagcaactggaaagcctgtggagcgattcacccgcacctccgggtccacaggcgggaccaccaagcagaccccctcgatactcctcttcatccatccccgaaccatttgggagcaggggctcccccaggaaagcggctactgacggtgctgatactcccttcggccgatccgagtcagcccctacactgcacccatattcaccactctctcctaagggaagaccttcgtcacctaggactcctttgtacctgcagccagatgcctacgggagtctggatagggccacttctcctcggcctagagcgttcgatggcgctggatcatccctgggtcgagctccgagcccacgcccaggaccgggtcccctgcggcagcagggaccgccaacccctttcgactttctggggcgtgctggatccccgagagggtccccactggccgagggtcctcaggccttttttcccgagcgtggaccttctcctaggcccccagccaccgcgtacgacgctccggcatctgcttttggctcttctctattaggaagtggtggctcagccttcgctcctccactgagggcccaggacgacctcaccctccggaggcgacccccaaaagcctggaacgaaagcgatctggacgtggcctatgaaaagaagccatctcaaacagccagttacgagcgcctggacgtttttgcccgtccagccagcccctcactccaactcctgccgtggcgggaatccagcctagacgggctgggcggaacaggaaaggataacctgacctccgctacactacccaggaactataaggtgtccccattggcatccgatagaagatccgacgcaggtagttataggcggagcctcggctccgccggaccgagtggcacactgccgagatcatggcagcccgtaagtcggattccaatgccaccctcatcccctcagcccaggggggctccccgacagaggcccattcctctgagtatgatctttaaactgcagaacgcattttgggagcatggcgcatcaagagccatgctgccgggaagtcctctgtttactagggcaccgcctcctaaactccagccgcaaccccagccccagccgcaaccccagtcgcagccccagcctcaattacccccacagccacagactcagccgcaaaccccaactcccgcaccacagcaccctcagcaaacgtggcccccagttaacgagggcccaccaaagccgcctactgaattggagcctgagcctgagattgaaggattactcacgcccgttttggaggccggagatgtcgatgagggccctgtggccaggccactgtcccccacccggcttcagccagctctgccccctgaggcccagtctgtcccagagctggaggaagttgcccgagtgctggccgaaatccctaggccccttaagcgacggggaagcatggaacaggcgccagccgtggccctccctccgactcacaaaaaacaataccagcaaatcattagccgactatttcatcgccatggcggacctgggccaggcggtcccgaacctgagctttcccctattactgaaggtagcgaggctcgagctgggcctccagctccagcccctcctgctcctattcctccacccgctccgtcacaatcatctccacccgagcagccacagtcaatggagatgcgctctgttcttcggaaagccggtagtcccagaaaagcaaggagagcccgtctgaatcccttggtgctgctgttggatgccgctctgactggggagctggaggtcgttcagcaggccgtgaaagagatgaacgaccctagtcaaccaaatgaagagggcattaccgcgctccacaatgccatttgtggcgctaactatagtatcgtggattttctcatcaccgccggtgctaacgtcaattccccagattcacatggttggacccccctgcactgtgccgcaagttgcaatgacaccgtcatctgcatggccctagtgcagcatggtgccgcaattttcgccacgacattgagtgacggcgctaccgcgtttgaaaagtgcgatccttatagagaaggttacgccgactgtgccacctatttagccgacgtggagcagtccatgggcctgatgaatagtggcgcagtatacgctctgtgggactactctgctgaattcggggatgagctgtcattcagagagggggaaagtgtcaccgtgctccgtcgagatgggccagaggagaccgattggtggtgggccgcattacacggacaggaaggctacgtgcccaggaattattttggtttatttccgagggtgaaaccacagaggagcaaggtctag

SEQ ID NO: 53892 - DNA, 495 bp, Artificial Sequence
  derived and/or modified sequence
atgagaccccagcccagaggcggcagcggcagaaaggagaacaccggcgaggagagagagggcagagccgagagataccacgccatcagcgccgacggcgagagaagactgcagcccggcaccgccgtgctgaccagacacgtgagcttcctgttcggcggcagagaggccgaggagcacgtgatggagaccgacagagtggagggcgccagagacggcgacaagagaaaggaggtgtgcttcgtgcccatccagggcagcttctgcttcatgagactgacctgcgccagactggtggccgccctggacatccacggcctgagcttcagcctgagattctgcggcagcagagacaccaagcacgaggacatcaccggcagagagggccaggtgacccccctgcccagaggcaccccccagctgtgcaccgccagagtgggcctgagcagccccagaaccagaggccagggcgtgcccatcagctgcaagacctag

SEQ ID NO: 53893 - DNA, 1209 bp, Artificial Sequence
  derived and/or modified sequence
atgccatggaagctgtggcgcggcagtgtgggctgccctggggacctctcctctgacggtcttctattcaggttgggacctcctaaaccaccaacagaattagagccggaaccggaaatagagggtctgctcacacctgtgctagaagccggggacgtggatgaaggaccagtggcccgcccactctcaccaacacgcctgcagcccgccctgccgccggaggcgcagtccgttcctgagcttgaggaggtggcccgtgtcctcgctgagattccacgacccctgaaacggcgggggagcatggaacaagcacctgccgtggccttgccacccacacacaaaaagcagtaccagcagatcatatctcgactgtttcatagacatggaggccctggtcctggcgggcctgagccagaactcagtcctattaccgaagggtccgaggcaagggctggccctcctgcacctgcaccccccgcaccaattcctccacccgctccttctcagtcttccccacccgagcagccccagagcatggaaatgcgatcagttctgagaaaagctggctctcctagaaaggctaggcgagccagactcaatccgcttgtgttgctgctcgacgccgccctaactggcgagttggaggtcgttcagcaggctgtcaaagaaatgaacgacccctctcaacccaatgaagagggaataacagctctgcataatgccatctgcggtgctaattatagcattgttgacttcctgattaccgccggagctaatgtgaactcaccagactctcacggttggactcctttgcactgtgcagcctcatgtaacgataccgtgatctgcatggcacttgttcagcatggtgccgccatctttgcaaccaccttaagtgacggggccacagcttttgaaaagtgcgacccttatagagaaggttacgcagattgcgcaacttaccttgcggacgttgagcaatccatgggcctgatgaatagtggagctgtgtacgccctgtgggactactctgctgagttcggcgacgagctgtccttcagagagggcgaatccgtgaccgtgttacgacgggatggacccgaagagacagactggtggtgggcggctctgcacggccaagagggctatgtccctagaaattactttggcttgttcccacgcgtcaagcctcaacgatctaaagtctag

SEQ ID NO: 53894 - DNA, 1209 bp, Artificial Sequence
  derived and/or modified sequence
atgccctggaagctgtggaggggctctgtgggctgccctggggacctgagcagtgatggcctgctcttccggctgggcccccccaagccacccacagagctggagcctgagcctgagattgagggcctgctgacccctgtgctggaggccggagatgtggatgagggccctgtggcccggcccctgagccccacccggctgcagcctgccctgcccccagaggcccagagcgtgcctgagctggaggaggtggcccgggtgctggccgagatcccccggcccctgaagagaagaggctccatggagcaggccccagctgtggccctgccccccacccacaagaagcagtaccagcagatcatcagccgcctcttccaccgccacggcggccctggccctgggggccctgagcctgagctgagccccatcacagagggcagcgaggcccgggccggccccccagccccagcccccccagcccccatccccccaccagcccccagccagagcagccccccagagcagccccagagcatggagatgaggtctgtgctgaggaaggccggcagccccaggaaggcccggcgggcccggctgaaccccctggtgctgctgctggatgctgccctgactggagagctggaggtggtgcagcaggccgtgaaggagatgaatgaccccagccagcccaatgaggagggcatcacagccctgcacaatgccatctgtggggccaactacagcatcgtggacttcctgatcacagctggggccaacgtgaacagcccagacagccacggctggacccccctgcactgtgccgccagctgcaatgacaccgtcatctgcatggccctggtgcagcacggggccgccatctttgccaccaccctgagtgatggagccacagcctttgagaagtgtgacccctaccgggagggctacgccgactgtgccacctacctggctgatgtggagcagagcatgggcctgatgaacagcggggctgtgtatgccctgtgggactacagcgctgagtttggagatgagctgtccttccgggagggggagagcgtgacagtgctgcggagagatggccctgaggagacagactggtggtgggccgccctgcacggccaggagggctacgtgcccaggaactacttcggcctcttcccccgggtgaagccccagaggagcaaggtgtag

SEQ ID NO: 53895 - DNA, 1209 bp, Artificial Sequence
  derived and/or modified sequence
atgccctggaagctgtggcggggcagcgtgggctgccccggcgacctgtcatccgacggacttctcttcaggctcggccctccaaagccacccacggagctggagcctgagcccgaaatagagggattgttgacaccagtcctagaggcgggcgatgtggacgaaggacctgtggcccgccctctaagccctactaggctccagcccgcccttccccctgaagcacaaagcgttcccgaattagaggaggtggcccgtgtgctggcagagatccctagacccctaaagaggcgaggctccatggagcaggctcccgcagtggccttgcccccaacccacaaaaaacaatatcagcagattataagcaggcttttccaccggcacgggggccctgggccaggaggcccagagccggaactgagtcccataaccgaaggctccgaagcccgagccggcccccccgccccagccccgcccgcacctatccccccacccgcacctagccagtcatcccccccagagcagccgcaaagtatggagatgagatcagtgttaagaaaagccggctcacctaggaaggctaggagggcgcgactgaaccctttggtgctactcctggacgccgccctgaccggagagctggaggttgtgcaacaagcagttaaggagatgaatgatcctagccaacccaacgaagaagggatcaccgcactgcataacgcaatctgtggcgcaaactactcgatcgtagatttcctgatcacagccggtgccaacgtcaatagtccggacagccatggatggacccccctgcattgtgccgcctcatgcaatgacactgtaatatgcatggcgctggtccagcatggagcggctatttttgctacaaccctttccgatggcgccaccgctttcgaaaagtgcgatccatatcgtgaagggtatgccgactgtgccacttatttggctgatgtggaacagtcaatgggccttatgaatagtggcgccgtctatgccctgtgggactacagcgccgagttcggggacgagctgagctttagagaaggggagtctgtcacggtgttacgcagggacggtcccgaagagacagattggtggtgggctgccctgcatggccaagagggctatgtccctcgcaactacttcggactctttccaagagtcaaaccccaaagaagtaaagtctag

SEQ ID NO: 53896 - DNA, 1209 bp, Artificial Sequence
  derived and/or modified sequence
atgccttggaagttatggcgaggaagtgttggctgcccaggagacctgagctctgacggcttactcttcagactcgggccacccaaaccacccaccgaactggaacccgagcccgagattgagggactgttaacacccgtcctggaggctggggacgtggatgaaggccctgtggcccgaccgctatcgcctacaagattgcagcccgcactaccgccagaggctcagtctgtccccgaactcgaagaggtggccagagttttagctgagatcccgaggcccttaaaaaggaggggctccatggagcaagccccagcggtggcgttacctcctacccacaagaagcaatatcaacagattatcagccggctgttccacagacacgggggtcccggtccgggtggtcccgagccagagctgtccccaatcactgaaggctctgaggccagggccggacctcccgctccagctcctccagcccctatccctccacctgccccttcacagtcctcaccccctgaacagcctcagtccatggaaatgcgctccgtcctccgtaaagccggttccccgaggaaagcaaggcgggcacgcctgaatccacttgtcctcttgctggatgccgcactcactggagaacttgaggttgtccagcaggcagtgaaggagatgaatgacccatcccagccaaacgaagaagggataaccgccctgcataatgccatctgtggcgctaactacagcatcgtcgactttctgataaccgctggtgccaatgtcaactcacccgactcacacggatggacccccctgcattgcgcagcatcctgcaacgacacggtcatttgcatggcgctggttcagcatggcgctgctatatttgctacaaccctttcggacggagccacggcctttgagaagtgcgatccttatcgagaaggctacgccgactgtgcaacgtacctggccgatgtcgagcaaagcatgggacttatgaattcaggtgctgtgtacgccctgtgggattactccgccgagtttggggacgaactgagttttagggaaggcgagtcagttactgtactgaggcgggatggccctgaggagacagactggtggtgggccgctctacacgggcaggagggttacgtaccccgaaactactttggccttttcccgagggtcaaacctcaaagatccaaggtctag

SEQ ID NO: 53897 - DNA, 1209 bp, Artificial Sequence
  derived and/or modified sequence
atgccctggaagctgtggagaggcagcgtgggctgccccggcgacctgagcagcgacggcctgctgttcagactgggcccccccaagccccccaccgagctggagcccgagcccgagatcgagggcctgctgacccccgtgctggaggccggcgacgtggacgagggccccgtggccagacccctgagccccaccagactgcagcccgccctgccccccgaggcccagagcgtgcccgagctggaggaggtggccagagtgctggccgagatccccagacccctgaagagaagaggcagcatggagcaggcccccgccgtggccctgccccccacccacaagaagcagtaccagcagatcatcagcagactgttccacagacacggcggccccggccccggcggccccgagcccgagctgagccccatcaccgagggcagcgaggccagagccggcccccccgcccccgccccccccgcccccatccccccccccgcccccagccagagcagcccccccgagcagccccagagcatggagatgagaagcgtgctgagaaaggccggcagccccagaaaggccagaagagccagactgaaccccctggtgctgctgctggacgccgccctgaccggcgagctggaggtggtgcagcaggccgtgaaggagatgaacgaccccagccagcccaacgaggagggcatcaccgccctgcacaacgccatctgcggcgccaactacagcatcgtggacttcctgatcaccgccggcgccaacgtgaacagccccgacagccacggctggacccccctgcactgcgccgccagctgcaacgacaccgtgatctgcatggccctggtgcagcacggcgccgccatcttcgccaccaccctgagcgacggcgccaccgccttcgagaagtgcgacccctacagagagggctacgccgactgcgccacctacctggccgacgtggagcagagcatgggcctgatgaacagcggcgccgtgtacgccctgtgggactacagcgccgagttcggcgacgagctgagcttcagagagggcgagagcgtgaccgtgctgagaagagacggccccgaggagaccgactggtggtgggccgccctgcacggccaggagggctacgtgcccagaaactacttcggcctgttccccagagtgaagccccagagaagcaaggtgtag

SEQ ID NO: 53898 - protein, 1103 aa, Artificial Sequence
  derived and/or modified sequence
MPLLDVFWSCFRKVKCFPLLQVKKNAEAEAKRACEWLQATGFPQYVQLFEEGSFPLDIGSVKKNHGFLDEDSLGALCRRLMTLNNCASMKLEVHFQSKQNEDSEEEEQCTISSHWAFQQESKCWSPMGSSDLLAPPSPGLPATSSCESVLTELSATSLPVITVSLPPEPADLPLPGRAPSSSDRPLLSPTQGQEGPQDKAKKRHRNRSFLKHLESLRRKEKSGSQQAEPKHSPATSEKVSKASSFRSCRGFLSAGFYRAKNWAATSAGGSGANTRKAWEAWPVASFRHPQWTHRGDCLVHVPGDHKPGTFPRSLSIESLCPEDGHRLADWQPGRRWGCEGRRGSCGSTGSHASTYDNLPELYPAEPVMVGAEAEDEDDEESGGSYAHLDDILQHVWGLQQRVELWSRAMYPDLGPGDEEEEEATSSVEIATVEVKCQAEALSQMEVPAHGESPAWAQAEVQPAVLAPAQAPAEAEPVAQEEAEAPAPAPAPAPAQDSEQEAHSGGEPTFASSLSVEEGHSISDTVASSSELDSSGNSMNEAEAAGPLAGLQASMPRERRDSGVGASLTRPCRKLRWHSFQNSHRPSLNSESLEINRQFAGQINLLHKGSLLRLTAFMEKYTVPHKQGWVWSMPKFMRRNKTPDYRGQHVFGVPPLIHVQRTGQPLPQSIQQAMRYLRSQCLDQVGIFRKSGVKSRIQNLRQMNETSPDNVCYEGQSAYDVADLLKQYFRDLPEPIFTSKLTTTFLQIYQLLPKDQWLAAAQAATLLLPDENREVLQTLLYFLSDIASAEENQMTAGNLAVCLAPSIFHLNVSKKDSPSPRIKSKRSLIGRPGPRDLSDNMAATQGLSHMISDCKKLFQVPQDMVLQLCSSYSAAELSPPGPALAELRQAQAAGVSLSLYMEENIQDLLRDAAERFKGWMSVPGPQHTELACRKAPDGHPLRLWKASTEVAAPPAVVLHRVLRERALWDEDLLRAQVLEALMPGVELYHYVTDSMAPHPCRDFVVLRMWRSDLPRGGCLLVSQSLDPEQPVPESGVRALMLTSQYLMEPCGLGRSRLTHICRADLRGRSPDWYNKVFGHLCAMEVAKIRDSFPTLQAAGPETKL

SEQ ID NO: 53899 - DNA, 3072 bp, Artificial Sequence
  derived and/or modified sequence
atgaccctgaacaactgcgccagcatgaagctggaggtgcacttccagagcaagcagaacgaggacagcgaggaggaggagcagtgcaccatcagcagccactgggccttccagcaggagagcaagtgctggagccccatgggcagcagcgacctgctggccccccccagccccggcctgcccgccaccagcagctgcgagagcgtgctgaccgagctgagcgccaccagcctgcccgtgatcaccgtgagcctgccccccgagcccgccgacctgcccctgcccggcagagcccccagcagcagcgacagacccctgctgagccccacccagggccaggagggcccccaggacaaggccaagaagagacacagaaacagaagcttcctgaagcacctggagagcctgagaagaaaggagaagagcggcagccagcaggccgagcccaagcacagccccgccaccagcgagaaggtgagcaaggccagcagcttcagaagctgcagaggcttcctgagcgccggcttctacagagccaagaactgggccgccaccagcgccggcggcagcggcgccaacaccagaaaggcctgggaggcctggcccgtggccagcttcagacacccccagtggacccacagaggcgactgcctggtgcacgtgcccggcgaccacaagcccggcaccttccccagaagcctgagcatcgagagcctgtgccccgaggacggccacagactggccgactggcagcccggcagaagatggggctgcgagggcagaagaggcagctgcggcagcaccggcagccacgccagcacctacgacaacctgcccgagctgtaccccgccgagcccgtgatggtgggcgccgaggccgaggacgaggacgacgaggagagcggcggcagctacgcccacctggacgacatcctgcagcacgtgtggggcctgcagcagagagtggagctgtggagcagagccatgtaccccgacctgggccccggcgacgaggaggaggaggaggccaccagcagcgtggagatcgccaccgtggaggtgaagtgccaggccgaggccctgagccagatggaggtgcccgcccacggcgagagccccgcctgggcccaggccgaggtgcagcccgccgtgctggcccccgcccaggcccccgccgaggccgagcccgtggcccaggaggaggccgaggcccccgcccccgcccccgcccccgcccccgcccaggacagcgagcaggaggcccacagcggcggcgagcccaccttcgccagcagcctgagcgtggaggagggccacagcatcagcgacaccgtggccagcagcagcgagctggacagcagcggcaacagcatgaacgaggccgaggccgccggccccctggccggcctgcaggccagcatgcccagagagagaagagacagcggcgtgggcgccagcctgaccagaccctgcagaaagctgagatggcacagcttccagaacagccacagacccagcctgaacagcgagagcctggagatcaacagacagttcgccggccagatcaacctgctgcacaagggcagcctgctgagactgaccgccttcatggagaagtacaccgtgccccacaagcagggctgggtgtggagcatgcccaagttcatgagaagaaacaagacccccgactacagaggccagcacgtgttcggcgtgccccccctgatccacgtgcagagaaccggccagcccctgccccagagcatccagcaggccatgagatacctgagaagccagtgcctggaccaggtgggcatcttcagaaagagcggcgtgaagagcagaatccagaacctgagacagatgaacgagaccagccccgacaacgtgtgctacgagggccagagcgcctacgacgtggccgacctgctgaagcagtacttcagagacctgcccgagcccatcttcaccagcaagctgaccaccaccttcctgcagatctaccagctgctgcccaaggaccagtggctggccgccgcccaggccgccaccctgctgctgcccgacgagaacagagaggtgctgcagaccctgctgtacttcctgagcgacatcgccagcgccgaggagaaccagatgaccgccggcaacctggccgtgtgcctggcccccagcatcttccacctgaacgtgagcaagaaggacagccccagccccagaatcaagagcaagagaagcctgatcggcagacccggccccagagacctgagcgacaacatggccgccacccagggcctgagccacatgatcagcgactgcaagaagctgttccaggtgccccaggacatggtgctgcagctgtgcagcagctacagcgccgccgagctgagcccccccggccccgccctggccgagctgagacaggcccaggccgccggcgtgagcctgagcctgtacatggaggagaacatccaggacctgctgagagacgccgccgagagattcaagggctggatgagcgtgcccggcccccagcacaccgagctggcctgcagaaaggcccccgacggccaccccctgagactgtggaaggccagcaccgaggtggccgccccccccgccgtggtgctgcacagagtgctgagagagagagccctgtgggacgaggacctgctgagagcccaggtgctggaggccctgatgcccggcgtggagctgtaccactacgtgaccgacagcatggccccccacccctgcagagacttcgtggtgctgagaatgtggagaagcgacctgcccagaggcggctgcctgctggtgagccagagcctggaccccgagcagcccgtgcccgagagcggcgtgagagccctgatgctgaccagccagtacctgatggagccctgcggcctgggcagaagcagactgacccacatctgcagagccgacctgagaggcagaagccccgactggtacaacaaggtgttcggccacctgtgcgccatggaggtggccaagatcagagacagcttccccaccctgcaggccgccggccccgagaccaagctgtag

SEQ ID NO: 53900 - DNA, 3312 bp, Artificial Sequence
  derived and/or modified sequence
atgcccctgctggacgtgttctggagctgcttcagaaaggtgaagtgcttccccctgctgcaggtgaagaagaacgccgaggccgaggccaagagagcctgcgagtggctgcaggccaccggcttcccccagtacgtgcagctgttcgaggagggcagcttccccctggacatcggcagcgtgaagaagaaccacggcttcctggacgaggacagcctgggcgccctgtgcagaagactgatgaccctgaacaactgcgccagcatgaagctggaggtgcacttccagagcaagcagaacgaggacagcgaggaggaggagcagtgcaccatcagcagccactgggccttccagcaggagagcaagtgctggagccccatgggcagcagcgacctgctggccccccccagccccggcctgcccgccaccagcagctgcgagagcgtgctgaccgagctgagcgccaccagcctgcccgtgatcaccgtgagcctgccccccgagcccgccgacctgcccctgcccggcagagcccccagcagcagcgacagacccctgctgagccccacccagggccaggagggcccccaggacaaggccaagaagagacacagaaacagaagcttcctgaagcacctggagagcctgagaagaaaggagaagagcggcagccagcaggccgagcccaagcacagccccgccaccagcgagaaggtgagcaaggccagcagcttcagaagctgcagaggcttcctgagcgccggcttctacagagccaagaactgggccgccaccagcgccggcggcagcggcgccaacaccagaaaggcctgggaggcctggcccgtggccagcttcagacacccccagtggacccacagaggcgactgcctggtgcacgtgcccggcgaccacaagcccggcaccttccccagaagcctgagcatcgagagcctgtgccccgaggacggccacagactggccgactggcagcccggcagaagatggggctgcgagggcagaagaggcagctgcggcagcaccggcagccacgccagcacctacgacaacctgcccgagctgtaccccgccgagcccgtgatggtgggcgccgaggccgaggacgaggacgacgaggagagcggcggcagctacgcccacctggacgacatcctgcagcacgtgtggggcctgcagcagagagtggagctgtggagcagagccatgtaccccgacctgggccccggcgacgaggaggaggaggaggccaccagcagcgtggagatcgccaccgtggaggtgaagtgccaggccgaggccctgagccagatggaggtgcccgcccacggcgagagccccgcctgggcccaggccgaggtgcagcccgccgtgctggcccccgcccaggcccccgccgaggccgagcccgtggcccaggaggaggccgaggcccccgcccccgcccccgcccccgcccccgcccaggacagcgagcaggaggcccacagcggcggcgagcccaccttcgccagcagcctgagcgtggaggagggccacagcatcagcgacaccgtggccagcagcagcgagctggacagcagcggcaacagcatgaacgaggccgaggccgccggccccctggccggcctgcaggccagcatgcccagagagagaagagacagcggcgtgggcgccagcctgaccagaccctgcagaaagctgagatggcacagcttccagaacagccacagacccagcctgaacagcgagagcctggagatcaacagacagttcgccggccagatcaacctgctgcacaagggcagcctgctgagactgaccgccttcatggagaagtacaccgtgccccacaagcagggctgggtgtggagcatgcccaagttcatgagaagaaacaagacccccgactacagaggccagcacgtgttcggcgtgccccccctgatccacgtgcagagaaccggccagcccctgccccagagcatccagcaggccatgagatacctgagaagccagtgcctggaccaggtgggcatcttcagaaagagcggcgtgaagagcagaatccagaacctgagacagatgaacgagaccagccccgacaacgtgtgctacgagggccagagcgcctacgacgtggccgacctgctgaagcagtacttcagagacctgcccgagcccatcttcaccagcaagctgaccaccaccttcctgcagatctaccagctgctgcccaaggaccagtggctggccgccgcccaggccgccaccctgctgctgcccgacgagaacagagaggtgctgcagaccctgctgtacttcctgagcgacatcgccagcgccgaggagaaccagatgaccgccggcaacctggccgtgtgcctggcccccagcatcttccacctgaacgtgagcaagaaggacagccccagccccagaatcaagagcaagagaagcctgatcggcagacccggccccagagacctgagcgacaacatggccgccacccagggcctgagccacatgatcagcgactgcaagaagctgttccaggtgccccaggacatggtgctgcagctgtgcagcagctacagcgccgccgagctgagcccccccggccccgccctggccgagctgagacaggcccaggccgccggcgtgagcctgagcctgtacatggaggagaacatccaggacctgctgagagacgccgccgagagattcaagggctggatgagcgtgcccggcccccagcacaccgagctggcctgcagaaaggcccccgacggccaccccctgagactgtggaaggccagcaccgaggtggccgccccccccgccgtggtgctgcacagagtgctgagagagagagccctgtgggacgaggacctgctgagagcccaggtgctggaggccctgatgcccggcgtggagctgtaccactacgtgaccgacagcatggccccccacccctgcagagacttcgtggtgctgagaatgtggagaagcgacctgcccagaggcggctgcctgctggtgagccagagcctggaccccgagcagcccgtgcccgagagcggcgtgagagccctgatgctgaccagccagtacctgatggagccctgcggcctgggcagaagcagactgacccacatctgcagagccgacctgagaggcagaagccccgactggtacaacaaggtgttcggccacctgtgcgccatggaggtggccaagatcagagacagcttccccaccctgcaggccgccggccccgagaccaagctgtag

SEQ ID NO: 53901 - DNA, 3072 bp, Artificial Sequence
  derived and/or modified sequence
atgaccctgaacaattgtgcctccatgaaactagaggttcattttcagtctaaacaaaacgaggactctgaggaagaggaacaatgtaccataagttcccactgggccttccagcaggaatccaaatgctggagcccaatgggaagcagcgatctgctggcacctccatctcctgggctccctgccacctctagctgtgaatcagtccttaccgagctgagcgccacatcactgcccgtcataaccgtcagcttgcccccagaacccgccgatctgcctctcccgggacgggctccgtccagttctgatcgtccactgcttagcccaactcaaggccaagagggaccgcaggacaaggccaagaaacgccacagaaaccggtcgttcttgaagcacctggaatcgctacgaaggaaggaaaaatccggttcccagcaggccgagcctaagcattctccagccacatcggaaaaggtgtccaaagcctccagctttaggtcttgtcggggttttttgtccgcagggttctaccgggcgaagaactgggccgctacatccgccggagggagcggggcgaacaccaggaaggcatgggaggcatggcccgtcgcttcatttcgccacccacaatggacccaccgtggcgactgcctggtgcacgttccaggcgatcataagcctggtaccttcccccgctctctgagcatcgagtccctttgtcccgaggacggacacaggctcgctgattggcagcccggcaggcggtggggttgtgagggccggaggggctcgtgcggcagcaccggaagccatgccagcacttacgataacttaccagagctgtatcctgccgagccggtgatggtgggagctgaggcagaagacgaagacgacgaagaatcaggcggctcctacgcccatctggatgatatcctccaacacgtgtggggtttacagcagcgggtcgagctttggtctcgtgccatgtaccctgatctgggccctggagatgaagaagaagaagaagccaccagctctgtagagattgctacagtggaggtgaagtgccaggctgaggcactctcacagatggaagtgccagcccacggcgaaagccccgcttgggcgcaggcagaagtacagccagctgtgcttgctccagctcaagcccccgcggaagccgaaccagtcgcacaggaggaggcagaagcccccgctcccgctcccgcccctgccccagctcaagactcagagcaggaagctcactcaggtggtgagcccaccttcgcatcgagcctgagcgtggaagaggggcatagtatctccgataccgtcgcctcttccagcgagcttgatagttccgggaacagcatgaacgaggcagaagccgctggacctctggccggtctccaagcctcaatgccccgggagagacgggactcaggcgtcggagcttccttgacacgcccatgtaggaagctcagatggcattcctttcagaattctcatcgtcccagcctgaactctgagtcgttagagataaataggcagttcgccggtcagatcaacctactgcacaaggggtcacttctcaggctcaccgccttcatggagaaatacacagtgccccataagcagggatgggtgtggagcatgccaaagtttatgaggagaaacaagacaccagattaccgcgggcagcacgtgtttggcgtacccccgttgattcatgtgcagagaactggtcagcccctgccacagtcaatccaacaggctatgcgctacctacggagccagtgcctcgatcaggtgggaattttccgaaagagtggagtcaaatccagaatccaaaacctcagacagatgaatgagaccagtcccgacaatgtgtgctatgagggacaatctgcttacgacgtggcagatctgttgaagcaatatttcagggacctccccgagcccattttcacctccaagctgacaactacatttttacagatataccagctactgcccaaggatcaatggctggcagctgcccaggcagccacgcttctgttgccggacgagaatcgagaagtgctgcagacactgctgtacttccttagcgatattgcctctgccgaggaaaatcagatgactgccgggaatctggctgtgtgtctggctccctccatttttcatctaaatgtcagtaagaaggacagtccaagtccccgtattaagtccaagcgctctctcattggccggcctggcccgagagatctaagcgacaatatggccgccacgcaaggtttgtcgcatatgatttctgattgcaaaaaattattccaggtgcctcaggatatggtgcttcagctttgctctagctacagcgccgccgaactgagcccccccggaccagctttagcagaactgagacaggctcaggccgctggcgtgtcgctctctctgtatatggaagagaacatccaggacctgcttagagatgcagcagagaggttcaaaggatggatgagtgttcctggaccccagcataccgagctggcctgccgtaaggccccggacggccatccattgcgattgtggaaagcgagtactgaggtcgccgctccacctgccgttgttcttcaccgcgttttaagggagcgggctctttgggacgaagatctgctgcgtgcgcaggtgttagaagcactgatgcccggggtcgaattatatcactatgtaactgatagcatggccccgcacccctgcagagattttgtggtgctgcggatgtggaggtcggacctgccccggggaggctgcctgttagtgagccaaagcctggatcccgagcaaccagtgccggaatctggggtgcgagccttgatgctgaccagccaatacctcatggagccatgcggtttggggagatcacgcctgacacatatatgcagagctgacctccgcggtcgatcccccgattggtataacaaggtgttcggacacctttgtgcaatggaggtggccaagatccgggactcattccctacacttcaggcggcaggacctgaaactaaattgtag

SEQ ID NO: 53902 - DNA, 3072 bp, Artificial Sequence
  derived and/or modified sequence
atgactctgaataactgtgcctctatgaagctggaagtccacttccagtccaagcagaacgaagatagtgaggaagaagagcagtgcacgatcagctcccactgggcatttcagcaagaaagcaaatgctggagcccaatgggtagttctgatctcttggcgcccccatcacctggcctgcctgcaacttccagctgcgagtccgttctgaccgaactgtccgcgaccagcctgcccgtgatcacagtgagcctgccacccgaacctgctgatctccccctgccaggaagagctccgtcttccagtgaccgacctttactcagccccactcagggccaggagggtccgcaggacaaagctaagaagagacacagaaataggtccttcctgaagcacctggaaagtttgaggcgaaaggagaagtctggcagtcagcaggcagaacccaagcactctcctgcgactagtgagaaggtctctaaggctagctcctttcggagctgccgggggtttttatcagccggattttaccgcgccaagaattgggccgcaacctcagcaggtgggtccggcgccaatacaagaaaagcttgggaagcgtggccggtcgccagcttcagacacccacagtggacgcacagaggcgattgcttggtccacgttcctggagaccacaagcccgggactttccctaggtcactgagcatcgaaagcctgtgcccagaggatggccaccgactggccgactggcagccaggaaggaggtggggatgcgagggaaggagagggagctgcggctccaccggtagtcatgcttccacctatgacaacctgcctgaactgtaccctgccgagcccgtgatggtaggggccgaggcagaggatgaggatgacgaggagtccggtgggtcatatgcccacctggacgatattttgcagcacgtctggggtctgcagcagcgcgtggaactttggtcccgcgcaatgtaccctgatctgggacccggggatgaagaggaagaggaagcaacctcgagcgtcgaaatcgctacagtagaggtcaagtgtcaggccgaggccctaagccaaatggaagtacctgctcacggcgagtcacctgcatgggctcaggccgaggtccaacctgcagtgctggctccagcacaagcccccgcagaggcggaaccggttgcccaagaggaggcggaagcccccgcgcctgcgcctgcgccagcaccagctcaggactccgagcaggaggcccactcgggcggagagcccacgttcgcctccagcttgtctgttgaggagggtcattcgatctctgatacggtcgcatcgagctccgaactggactcctctggaaattcgatgaatgaggccgaagccgcaggacccctggctggcctccaggcatccatgcctagagaacgaagagattcaggagtgggcgcctccttgaccagaccttgccgcaagctccggtggcattccttccagaattctcatagaccgagcttgaactccgagtctctggagattaataggcagtttgctggccagatcaatcttcttcataaggggtcattactgcgcctaactgcctttatggagaagtatactgtgccgcacaagcaggggtgggtctggtcaatgcccaaattcatgcggaggaacaagacaccagactaccggggacagcacgtgtttggggtgccaccactgatacatgtgcagcgtaccggacagcctcttcctcagtcaatccagcaggctatgagatatttacgtagccagtgcttggatcaggtcgggatcttcaggaagtctggagtgaagagtcgcatccagaatcttaggcagatgaacgagacttctcccgacaatgtctgctatgagggtcagtcagcctatgatgtcgcagatctgctcaaacagtacttccgggacctgccagaaccaatattcactagcaaactgactactaccttcctgcagatataccagctgctccccaaagaccagtggctggcagccgcccaagctgcaaccctattgctgcctgatgaaaaccgtgaagtgttacagactctgctgtactttctgtccgatatcgcaagtgccgaggaaaaccagatgactgccggaaaccttgccgtttgccttgcgccttcaattttccatctaaacgtctccaaaaaagactccccctctccgcgcattaagagtaagcgatcgctgattggtagacccggtccacgggacctgtcggataatatggcagctacccagggtctttctcacatgatatccgattgtaagaagttgttccaggtgccacaggacatggtgctgcagttgtgctcctcctatagtgccgccgagctgagcccccccggccccgcattggctgagctacgccaggcccaggctgcaggcgtctccctttccctttacatggaggagaacatccaggacctgcttagggatgccgctgaaaggtttaaaggatggatgtccgtccccggacctcaacataccgagctggcctgccgaaaggccccagatggccacccattacggctttggaaggcctccactgaagtagctgctcctcctgcagtagtgcttcacagagtgctgcgagagcgagctctgtgggacgaagatctcttgagggcgcaagtattggaagcattaatgcctggagtcgagctataccactacgtgacagacagtatggctccccacccctgtcgggacttcgtagtgctgcgcatgtggcgatccgatctgcctcgcgggggctgcctactggtcagccagtccctggacccagaacagcccgtgcctgaatcaggggtgagagccttaatgctgacgtcccagtacttaatggaaccatgcggcctcggtcgctctcgactgacccacatctgcagagccgacctgcgcggccgctcacctgactggtataacaaagtgttcgggcatctctgcgcgatggaagtcgccaagatcagagacagcttccccacgttgcaggctgctgggcctgagacaaagctgtag

SEQ ID NO: 53903 - DNA, 3312 bp, Artificial Sequence
  derived and/or modified sequence
atgcccctgctcgacgtgttttggagttgcttcaggaaggtgaagtgtttccctcttctgcaggtgaagaaaaacgccgaggcagaggcaaagcgcgcctgtgagtggctacaggctaccggcttcccacagtatgtgcagctgtttgaggagggttcctttccccttgacatcggcagcgtgaaaaagaatcacgggttcctagatgaggactctctgggtgcactttgtaggcgactgatgacactgaacaactgtgcgagcatgaagttagaggttcattttcagtctaagcagaacgaggatagtgaagaggaggaacaatgcaccatttcatcccactgggccttccaacaagaatcaaagtgctggtcccccatggggtccagtgacctcttagcccccccttccccaggacttccagccacctcaagttgcgagagcgttctaactgagctcagcgccacaagcctacccgttatcactgtctccctgcctccggagcctgcggacctgccactgccagggcgggcgccatcgagtagcgatcggcccctcctgtcgcctacccaaggacaggagggaccccaggataaagcaaaaaagaggcatagaaataggtcatttcttaaacacctggagtctctaagacggaaagagaaaagtgggagccagcaagccgaaccgaagcactccccagcaactagtgagaaagtttcaaaggcctcatccttcagatcttgccggggcttcctttctgcgggcttttatcgggcaaagaattgggccgcaactagcgctggaggcagcggcgctaatacaagaaaagcgtgggaagcctggcctgtggcttcttttaggcatcctcagtggacccatcgcggcgactgtctcgtgcacgttccgggcgaccataagcccggaacatttccgaggtcgttgtccatcgagtccctctgtcctgaagacggacatcggctggctgactggcaacccggtaggcggtggggctgcgaagggaggagaggctcctgcggatccacaggcagtcacgcaagcacttatgataatctcccagagctttaccctgcggaacctgtcatggttggagctgaggccgaagacgaagatgatgaagaaagcggagggagctacgctcatctggatgatatactgcagcacgtgtggggactgcagcagcgggttgagttgtggagccgtgccatgtaccctgacctgggtccaggagacgaggaagaggaagaggccacctcctccgtggagatcgcaactgtagaagtgaaatgtcaggccgaggccctctcacaaatggaagtgccagctcatggggagtccccggcctgggctcaggccgaagtccagcctgcagtcctggctcctgcgcaggccccggccgaggctgagccagtggcacaggaagaggccgaagcccccgcacccgcccctgcaccagcccctgcccaggattctgaacaggaggcacactccggcggcgaacccacgtttgcgtccagtctgagcgtcgaggaggggcacagtatatctgacacagttgccagctcttctgaacttgatagttctggcaatagcatgaacgaggctgaggccgcaggccctctagccggactgcaggcctcaatgccacgggagaggagggattccggagtcggcgcttcacttactagaccatgtaggaaattgaggtggcactcctttcagaatagtcaccgcccctcccttaacagtgaaagccttgagatcaatcgtcagtttgcgggccaaattaacttgctccacaagggtagtttgctgcgcctgaccgccttcatggaaaagtatactgtgccacacaagcagggctgggtttggtccatgccaaagtttatgagacgcaacaaaacgccagattatcgcggacaacatgtgtttggtgtgccacccttgatccatgtgcaaaggacaggtcagcctcttcctcagtcaatacaacaggcaatgcgatatctgcgttcccagtgcttggatcaggttggcatcttcaggaaatcaggcgtgaagtctaggatacagaatttgcggcagatgaacgagaccagcccagataacgtctgctatgagggccagagcgcatatgatgtcgccgacctgctcaaacagtactttagggatctacccgagcccatctttacctccaagctgactaccacttttttgcaaatttatcagctgctccccaaggaccagtggttggctgccgcacaggccgccacactcctccttcctgacgaaaatagagaggtgctccagacactcctttatttcctgtcagacatagcttccgccgaagaaaatcaaatgaccgccgggaacctggcagtatgtctggctccctccatctttcatctcaatgtgtcgaagaaggactccccctcccctagaatcaagagcaaaagatcactgatcggacgacccggacctagagacctgtctgacaacatggcagccacccagggactcagtcacatgatctccgattgcaaaaaactattccaagtcccacaggacatggtcctgcagctgtgttcatcctattcagccgccgaactttccccacctggacccgctctcgccgagctccggcaagctcaggccgcaggggtttccttgagcctgtacatggaagaaaacattcaggatctcctacgagatgcggctgaaagattcaaagggtggatgagtgttccgggcccccaacatacagaactggcctgtagaaaggcgccagatggccatcctttgcgactctggaaggcctccactgaggttgctgcacctcccgcagtggttctgcacagagtgctcagggaaagagcgctctgggacgaggatttattgagggctcaggtgctggaagctcttatgccaggagtcgagttgtaccattatgtgaccgactctatggcgcctcatccttgtagggactttgtggtgctccggatgtggagatcagatctacccaggggcgggtgccttttagtttcccagtcactggatcctgagcagccagttcctgagtcaggtgtacgggcccttatgttaactagtcaatatttgatggaaccctgcggattaggaaggagtcgattgacacatatctgcagagctgacctgcgcggcagatctcctgattggtataacaaggtatttgggcatctatgcgccatggaagttgctaaaatccgagactccttccctacgttgcaagcagcgggccccgagaccaagctctag

SEQ ID NO: 53904 - DNA, 3072 bp, Artificial Sequence
  derived and/or modified sequence
atgaccctgaacaactgtgcctccatgaagctggaggtgcacttccagagcaagcagaatgaagattctgaggaggaggagcagtgcaccatcagcagccactgggccttccagcaggagagcaagtgctggagccccatgggcagcagtgacctgctggccccacccagccctggcctgcctgccaccagcagctgtgagagcgtgctgacagagctgagcgccaccagcctgcctgtgatcaccgtgtccctgcccccagagcctgctgacctgcccctgcccggccgggcccccagcagcagtgaccggcccctgctgagccccacccagggccaggagggcccccaggacaaggccaagaagaggcacaggaacagaagcttcctgaagcacctggagagcctgcggaggaaggagaagagcggcagccagcaggccgagcccaagcacagccctgccaccagcgagaaggtgtccaaggccagcagcttccgcagctgccggggcttcctgtctgctggcttctaccgggccaagaactgggccgccaccagcgctgggggcagcggggccaacaccaggaaggcctgggaggcctggcctgtggccagcttccgccacccccagtggacccacagaggagactgcctggtgcacgtgcctggggaccacaagccaggcaccttccccaggagcctgagcattgagagcctgtgcccagaagatggccaccggctggccgactggcagcccggccgccgctggggctgtgagggcagaagaggcagctgtggcagcacaggcagccacgccagcacctatgacaacctgcctgagctgtacccagctgagcctgtgatggtgggcgctgaggccgaggatgaagatgatgaggagagcggcggcagctatgcccacctggatgacatcctgcagcacgtgtggggcctgcagcagagggtggagctgtggagccgggccatgtacccagacctgggccctggagatgaggaggaggaggaggccaccagctctgtggagatcgccaccgtggaggtgaagtgccaggccgaggccctgagccagatggaggtgcctgcccatggagagagccctgcctgggcccaggccgaggtgcagcctgctgtgctggccccagcccaggccccagctgaggccgagcctgtggcccaggaggaggccgaggccccagccccagccccagccccagccccagcccaggacagcgagcaggaggcccacagcggcggggagcccacctttgccagcagcctgtctgtggaggagggccacagcatcagtgacacagtggccagcagcagcgagctggacagcagcggcaacagcatgaatgaagctgaggccgccggccccctggccggcctgcaggcctccatgccccgggagcggcgggacagcggcgtgggcgccagcctgacccggccctgcaggaagctgcgctggcacagcttccagaacagccaccggcccagcctgaacagcgagagcctggagatcaaccggcagtttgctggccagatcaacctgctgcacaagggcagcctgctgcggctgacagccttcatggagaagtacacagtgccccacaagcagggctgggtgtggagcatgcccaagttcatgagaagaaacaagaccccagactaccggggccagcacgtgtttggagtgcccccactcatccacgtgcagaggacaggccagcccctgccccagagcatccagcaggccatgagatacctgcggagccagtgcctggaccaggtgggcatcttcaggaagagcggcgtgaagagccgcatccagaacctgcggcagatgaatgagaccagcccagacaacgtgtgctatgagggccagagcgcctatgatgtggccgacctgctgaagcagtacttccgggacctgcctgagcccatcttcaccagcaagctgaccaccaccttcctgcagatctaccagctgctgcccaaggaccagtggctggccgccgcccaggccgccaccctgctgctgcctgatgagaaccgggaggtgctgcagaccctgctgtacttcctgagtgacatcgccagcgctgaggagaaccagatgacagctggcaacctggccgtgtgcctggcccccagcatcttccacctgaatgtgtccaagaaggacagccccagcccccgcatcaagagcaagaggagcctcatcggccggcccggcccccgggacctgagtgacaacatggccgccacccagggcctgagccacatgatcagtgactgcaagaagctgttccaggtgccccaggacatggtgctgcagctgtgcagcagctacagcgctgctgagctgagccccccaggccctgccctggccgagctgcggcaggcccaggccgccggcgtgtccctgagcctgtacatggaggagaacatccaggacctgctgagagatgctgctgagcgcttcaagggctggatgtctgtgcccggcccccagcacacagagctggcctgcaggaaggccccagatggccaccccctgcggctgtggaaggccagcacagaggtggccgcccccccagctgtggtgctgcaccgggtgctgcgggagcgggccctgtgggatgaggacctgctgcgggcccaggtgctggaggccctgatgcctggggtggagctgtaccactacgtgacagacagcatggccccccacccctgccgggactttgtggtgctgaggatgtggaggagtgacctgccccggggcggctgcctgctggtgtcccagagcctggaccctgagcagcctgtgcctgagagcggcgtgcgggccctgatgctgaccagccagtacctgatggagccctgtggcctgggccgcagccggctgacccacatctgcagagctgacctgcggggccgcagcccagactggtacaacaaggtgtttggccacctgtgtgccatggaggtggccaagatccgggacagcttccccaccctgcaggccgccggccctgagaccaagctgtag

SEQ ID NO: 53905 - DNA, 3312 bp, Artificial Sequence
  derived and/or modified sequence
atgcccctgctggatgtgttctggagctgcttcaggaaggtgaagtgcttccccctgctgcaggtgaagaagaatgctgaggccgaggccaagagggcctgtgagtggctgcaggccaccggcttcccccagtatgtgcagctgtttgaggagggcagcttccccctggacatcggctctgtgaagaagaaccacggcttcctggatgaggacagcctgggcgccctgtgccggcggctgatgaccctgaacaactgtgcctccatgaagctggaggtgcacttccagagcaagcagaatgaagattctgaggaggaggagcagtgcaccatcagcagccactgggccttccagcaggagagcaagtgctggagccccatgggcagcagtgacctgctggccccacccagccctggcctgcctgccaccagcagctgtgagagcgtgctgacagagctgagcgccaccagcctgcctgtgatcaccgtgtccctgcccccagagcctgctgacctgcccctgcccggccgggcccccagcagcagtgaccggcccctgctgagccccacccagggccaggagggcccccaggacaaggccaagaagaggcacaggaacagaagcttcctgaagcacctggagagcctgcggaggaaggagaagagcggcagccagcaggccgagcccaagcacagccctgccaccagcgagaaggtgtccaaggccagcagcttccgcagctgccggggcttcctgtctgctggcttctaccgggccaagaactgggccgccaccagcgctgggggcagcggggccaacaccaggaaggcctgggaggcctggcctgtggccagcttccgccacccccagtggacccacagaggagactgcctggtgcacgtgcctggggaccacaagccaggcaccttccccaggagcctgagcattgagagcctgtgcccagaagatggccaccggctggccgactggcagcccggccgccgctggggctgtgagggcagaagaggcagctgtggcagcacaggcagccacgccagcacctatgacaacctgcctgagctgtacccagctgagcctgtgatggtgggcgctgaggccgaggatgaagatgatgaggagagcggcggcagctatgcccacctggatgacatcctgcagcacgtgtggggcctgcagcagagggtggagctgtggagccgggccatgtacccagacctgggccctggagatgaggaggaggaggaggccaccagctctgtggagatcgccaccgtggaggtgaagtgccaggccgaggccctgagccagatggaggtgcctgcccatggagagagccctgcctgggcccaggccgaggtgcagcctgctgtgctggccccagcccaggccccagctgaggccgagcctgtggcccaggaggaggccgaggccccagccccagccccagccccagccccagcccaggacagcgagcaggaggcccacagcggcggggagcccacctttgccagcagcctgtctgtggaggagggccacagcatcagtgacacagtggccagcagcagcgagctggacagcagcggcaacagcatgaatgaagctgaggccgccggccccctggccggcctgcaggcctccatgccccgggagcggcgggacagcggcgtgggcgccagcctgacccggccctgcaggaagctgcgctggcacagcttccagaacagccaccggcccagcctgaacagcgagagcctggagatcaaccggcagtttgctggccagatcaacctgctgcacaagggcagcctgctgcggctgacagccttcatggagaagtacacagtgccccacaagcagggctgggtgtggagcatgcccaagttcatgagaagaaacaagaccccagactaccggggccagcacgtgtttggagtgcccccactcatccacgtgcagaggacaggccagcccctgccccagagcatccagcaggccatgagatacctgcggagccagtgcctggaccaggtgggcatcttcaggaagagcggcgtgaagagccgcatccagaacctgcggcagatgaatgagaccagcccagacaacgtgtgctatgagggccagagcgcctatgatgtggccgacctgctgaagcagtacttccgggacctgcctgagcccatcttcaccagcaagctgaccaccaccttcctgcagatctaccagctgctgcccaaggaccagtggctggccgccgcccaggccgccaccctgctgctgcctgatgagaaccgggaggtgctgcagaccctgctgtacttcctgagtgacatcgccagcgctgaggagaaccagatgacagctggcaacctggccgtgtgcctggcccccagcatcttccacctgaatgtgtccaagaaggacagccccagcccccgcatcaagagcaagaggagcctcatcggccggcccggcccccgggacctgagtgacaacatggccgccacccagggcctgagccacatgatcagtgactgcaagaagctgttccaggtgccccaggacatggtgctgcagctgtgcagcagctacagcgctgctgagctgagccccccaggccctgccctggccgagctgcggcaggcccaggccgccggcgtgtccctgagcctgtacatggaggagaacatccaggacctgctgagagatgctgctgagcgcttcaagggctggatgtctgtgcccggcccccagcacacagagctggcctgcaggaaggccccagatggccaccccctgcggctgtggaaggccagcacagaggtggccgcccccccagctgtggtgctgcaccgggtgctgcgggagcgggccctgtgggatgaggacctgctgcgggcccaggtgctggaggccctgatgcctggggtggagctgtaccactacgtgacagacagcatggccccccacccctgccgggactttgtggtgctgaggatgtggaggagtgacctgccccggggcggctgcctgctggtgtcccagagcctggaccctgagcagcctgtgcctgagagcggcgtgcgggccctgatgctgaccagccagtacctgatggagccctgtggcctgggccgcagccggctgacccacatctgcagagctgacctgcggggccgcagcccagactggtacaacaaggtgtttggccacctgtgtgccatggaggtggccaagatccgggacagcttccccaccctgcaggccgccggccctgagaccaagctgtag

SEQ ID NO: 53906 - DNA, 3072 bp, Artificial Sequence
  derived and/or modified sequence
atgaccctgaacaactgcgccagcatgaagctggaggtgcacttccaatccaaacagaacgaagatagtgaggaagaagagcaatgtaccatatcttcacattgggctttccagcaagaatccaagtgttggtcgcccatgggatctagcgatctgcttgcgccaccttcaccgggcctacccgcgacatctagctgcgaatccgtcctcacagaactgagcgcaacatcgcttccagtcatcaccgtatctttgccaccagaacccgccgatctcccccttcctggacgggctccctcctcttcagaccgccctctcctgagccccacacaagggcaggagggcccccaagataaggccaagaagcgtcatagaaaccgctccttcctgaaacacctggagtccctgagacgaaaggaaaaatctggtagtcagcaggccgaacctaagcattcccctgccacttccgaaaaagtgagcaaggcctcttctttcaggtcatgccgtgggtttctcagcgcaggcttttacagagcaaaaaattgggcagccacttccgctgggggatccggggctaatactcgcaaggcctgggaggcctggccagtggcatccttcaggcacccacaatggacccacagaggagactgtcttgtgcacgtgccgggagaccacaaacccggaaccttccctcgatccctgtctatcgagagtttgtgtccggaggacgggcatagattggccgattggcagcctgggcgccgttggggttgcgaggggcgtagaggaagctgcggcagcactggcagtcacgcttccacctacgataaccttcccgagctttaccccgccgagccagtgatggtgggagctgaagcagaggacgaagatgacgaagaaagcggtggatcgtacgctcacctagatgatatcttacagcatgtctggggccttcagcaacgcgtggagctttggtcccgggccatgtacccagacttgggacctggtgatgaagaggaagaggaagccacaagttcagtcgagatagccacggtggaagtgaaatgccaggctgaggctctgtcccaaatggaagtacccgcccacggcgaaagtcccgcctgggcacaggcagaggtgcagcctgccgtgctagctccagcgcaggcccccgccgaggccgaacctgtggctcaagaagaggctgaggccccggccccggcaccggcccccgcccctgcccaggattcggagcaggaagctcattctgggggcgagcctaccttcgctagttcattgtctgtcgaggagggtcacagtatctctgacaccgtggcgtcatctagtgagcttgacagctcaggcaactcaatgaatgaggccgaagccgctgggccgttggctgggttgcaggcgtccatgcccagggagagacgagactcaggggtgggagctagtctcaccaggccttgccgaaagctccggtggcacagctttcagaatagtcaccgcccttccttgaactcggagtccctggagataaaccgccagtttgccggacagattaacctactgcataaaggatcgctattgaggcttacagctttcatggaaaagtatacagttccccacaaacagggctgggtgtggagtatgcccaagttcatgaggaggaataagacccctgattatagagggcagcatgtattcggtgtgccccctctgatacatgtgcagcgcactggtcaaccgctaccccagtccatacagcaagctatgcggtacctccgctcccaatgtctcgaccaggttggaatttttcgcaaaagtggcgtcaagtcacgcattcagaacttacgacagatgaacgagacaagtccggataacgtatgctacgaggggcagtccgcctacgacgttgccgacctgctaaaacaatacttccgcgaccttcccgaacctatctttaccagtaagctgactacgacctttctccaaatctatcaactgctccctaaagaccagtggctcgctgccgcccaggcagccactctgctgctaccagacgagaaccgagaagttttacaaacactcctatactttctgagcgatatagcctcagccgaggaaaatcagatgaccgccggcaatctggccgtctgcctcgcgccctccatcttccacctcaacgtttcaaagaaggactcaccaagcccccgaatcaagagtaagcgatcactgatcggaaggccaggtccacgggacctctctgataacatggcagcaacccagggactgtcccatatgattagcgactgtaaaaagctgttccaggttccccaagacatggtgctccagctatgcagttcgtatagtgccgcggagctgtccccccctggtcccgcgctcgcggaactcagacaggcccaggccgccggggtttcactgtctctgtatatggaggagaacatccaggacctgctcagggatgcagccgagcgtttcaaaggatggatgtccgtgcctggcccccagcacactgaactggcatgccggaaagcccccgatgggcaccctctccgcttgtggaaggcttctacagaggtagccgctccacctgccgtcgtactgcaccgcgtgcttagggagagggccctttgggacgaagacctgttacgggcccaggtgttggaagcactaatgcccggagttgaactctatcattacgtgacagatagcatggccccccacccatgccgagactttgtggtcctgcgaatgtggcgatctgacctcccgcgagggggatgcctgttggtgagtcagagcctcgacccagagcagccggtcccagaaagcggtgtcagagctctgatgttgaccagccaatacttgatggagccatgcggcctgggccgcagccgattgacacacatctgtcgcgctgaccttagagggaggtctccagactggtacaataaggtcttcggccatctctgcgctatggaagtggcgaagatacgagatagcttccctactttacaggccgcgggccctgagacaaagctctag

SEQ ID NO: 53907 - DNA, 3072 bp, Artificial Sequence
  derived and/or modified sequence
atgaccctgaacaactgcgccagcatgaagctggaggtgcacttccaatccaaacagaacgaggattctgaggaagaagagcagtgtaccatttcttctcattgggcgttccagcaggagtctaagtgttggtctccaatgggctcaagcgatctcctcgcccctcccagcccgggactccccgccacctcgtcctgcgagagcgtcctgacggaactgagcgctaccagcctaccagtgattactgtttccctaccacctgagccggccgatctgcctcttcctggcagggcccccagtagctccgaccgcccactgctgtctccgacacagggccaggaaggaccacaagataaggcaaagaagaggcataggaatcgaagtttcctcaagcacctcgaatcacttcgcagaaaggaaaagtctgggtctcagcaggccgagccaaagcacagtcccgcaacgtccgagaaagtcagtaaagcatcctcctttaggagctgtcgcggtttcctgagcgcgggtttctacagggcgaagaattgggctgccactagcgcgggcgggtccggagcgaataccaggaaagcctgggaagcctggcccgtggccagcttccgccacccacagtggacgcaccggggggactgcctggtgcatgtacccggcgatcacaaaccaggcacttttccaaggtccctaagtatcgagtccctctgccctgaggatggacacaggctcgctgactggcagccaggaaggcggtggggctgtgaaggacggcgtgggagttgcggaagtaccggaagtcacgcaagcacctatgataatcttccagaattatatcctgccgaacctgtgatggtcggcgctgaagccgaagatgaagatgacgaggaaagtggaggatcatacgcccacctggacgatattctgcaacacgtctggggcctgcagcaacgcgtcgagctgtggtcaagagccatgtatcccgacctgggcccgggcgatgaagaggaagaggaggctacgtcctccgtggagatagccacagtggaggttaagtgccaggcggaagctctcagccagatggaggtgcccgctcacggtgagagcccagcttgggcacaagcagaggtacagccagcagtgctcgctccagcccaggctcctgctgaggcggagcccgttgcgcaggaggaagccgaagctccggccccagccccggcacctgcccctgctcaggactcagagcaggaggcgcattccggtggggagcccacttttgcttcttccctgtcagttgaggagggacattccatcagtgatactgtggctagcagttcagaactggattcctccgggaatagtatgaatgaagctgaagccgccggaccactggcaggtctgcaggccagcatgccacgtgagcgcagggactcgggggtgggggccagtctgactaggccttgccggaagctgaggtggcattccttccagaattcccacagaccttcgctgaattcagagagtctggagattaatcggcagtttgcagggcaaattaacctgcttcacaagggctccttactaaggctgacagcttttatggaaaagtacactgtaccgcataagcaagggtgggtctggtcaatgcccaagttcatgcgtcggaacaagacacctgattaccgaggccagcacgtgttcggggtcccgcctcttattcacgtgcaaagaaccggacaacctctcccccagagtatccagcaggctatgcgctatctgaggagtcagtgtctggaccaggtgggaatcttcaggaagtcgggcgttaagagtaggatacagaacctacgccagatgaatgaaacatcaccggacaatgtgtgttacgagggtcagagcgcatacgatgtggcagatctcctaaagcagtactttagggatcttcctgaaccaatttttacatcaaagctgaccacaacctttctgcagatctaccaacttctgccgaaagatcagtggctggcagctgctcaagccgctacactgctcctgccagacgagaacagagaagtactccagactttgctgtatttcctgtccgatatcgcgtctgccgaagaaaatcaaatgactgccggtaatttggcagtttgtctggcgcctagcatattccacttgaacgtgagcaagaaagattccccaagcccccgcattaaatcaaagaggagtctgattggccgcccgggccctcgggacctgtcagacaacatggccgctacacagggcctgtcacacatgatctccgattgcaagaagctctttcaggtgcctcaggatatggtactgcagctgtgttccagttatagcgccgccgaactgtcccccccaggtcccgcacttgctgaactgaggcaggcacaggctgctggcgtgtccctatcgctgtatatggaggaaaatatccaggatttactgagggacgctgccgagcggtttaagggttggatgagcgtacctggacctcagcataccgagttggcctgtcggaaggctcccgacggccaccccctgcggctgtggaaagcctccacagaggtcgctgcacctcccgccgtagtgctgcatagagtgctgcgggagcgggccttgtgggatgaagatttgctgcgggcacaggtgcttgaagcacttatgccaggcgtagaactctatcactacgtcaccgacagcatggctcctcatccctgcagagattttgtggtgctcaggatgtggcggtctgacttgccaaggggaggttgcctgctggtctcccaatccttggacccggagcagccagtgccagaaagcggcgtgcgagctttaatgctaactagccagtatctcatggaaccttgcggcctcggtcggtccaggctgacgcacatttgcagggccgatttaaggggtcggagcccggattggtacaataaggtgtttggccatctgtgtgcgatggaagttgcaaaaatccgagattcgtttccgacgttacaagccgcagggcccgagaccaagctgtag

SEQ ID NO: 53908 - DNA, 3312 bp, Artificial Sequence
  derived and/or modified sequence
atgcccctgctggacgtgttctggagctgcttccggaaggtgaagtgtttccccctgctgcaggtaaaaaaaaacgctgaagcagaggctaagcgggcctgtgagtggctgcaggctaccggatttccacaatacgtgcagctctttgaggaagggtcctttccgttggatatcggcagtgttaaaaagaaccacggattcttagatgaagactctctgggagcgctgtgtcgcagattgatgaccttgaacaactgcgccagcatgaaactggaggtacactttcagtctaaacagaacgaggacagcgaagaggaagaacagtgcacaatctcaagccattgggcgttccagcaggaaagtaaatgttggtctccaatgggttcttccgacctgctcgcaccaccatcgcccggtctcccagcaacttcaagttgtgaaagtgtgctgaccgagctctccgccacaagtttacccgtcattactgtatccctgccccctgagcccgccgatttgcccctcccaggccgcgcaccttcttccagcgatcgtccactcctttcccctacacagggccaggagggcccccaggacaaagctaaaaaaagacaccgaaatagatccttcctcaagcacctagaatctctcaggagaaaggaaaagtcaggcagccaacaggcggagcccaaacacagtcccgcaactagcgaaaaggtctcaaaagctagcagtttcaggagctgccggggtttcctgtctgcagggttctatcgcgctaaaaattgggctgccaccagcgccggcggctctggcgctaatacaagaaaagcatgggaagcctggcccgtcgccagctttcgccacccacagtggacacataggggagattgtctggtccacgtccccggtgaccataaaccggggacattcccaagaagcctgtccattgaatctttgtgccctgaggatggccaccgtcttgcggattggcagccgggacggcgctggggttgcgaggggcggcgcggctcctgtggaagcactggttcccatgcaagtacatacgacaacctgccagagttgtacccagcggagcctgtcatggttggcgcggaagcagaagatgaggacgatgaggagagtggtgggagctacgcgcacctcgacgatatcttacagcatgtatggggcctgcagcagagagtggaactgtggtccagagctatgtaccctgacttgggtccaggagacgaggaggaagaagaggcgacatccagtgtggaaatcgccacagtagaagtgaagtgccaagctgaagctctttctcagatggaggtgcctgcccacggagagagcccagcctgggcacaggccgaagtacagcctgcagttctcgcacctgcgcaagccccagcagaggccgagcccgtggcacaagaagaggcggaagcgccagcgccagctcctgccccagctccagcccaggattccgaacaggaggcacatagcgggggtgaaccaaccttcgctagttcactgtcagtggaagaggggcactcaatttctgataccgtcgcttccagcagtgagcttgacagctctgggaacagtatgaatgaggctgaagctgctggaccactggccgggctccaagccagcatgcctcgcgaaaggagagactcaggtgttggggcctctttaacccggccatgccgcaaactgcggtggcattcttttcagaattcccataggccaagccttaactcagagtccctggagatcaaccgacagtttgccggccagataaacctactacataaagggtcattactgcgcttgacagccttcatggaaaaatacacggtacctcacaaacagggctgggtctggagcatgccgaagtttatgaggcggaataaaacacctgactataggggacagcatgtcttcggcgtaccgcctctcatccacgtgcagaggaccgggcaacctttaccccagtctattcagcaagcaatgcgctatctacgctcccagtgtttggaccaggtcggcatttttcgcaagagtggagtgaagagtcgaatccagaatctgagacagatgaacgagactagtccggataatgtttgctacgagggacaatccgcttacgacgtcgccgacctgctgaaacagtattttcgggatctgcccgagcctatcttcacctccaagttgactaccacatttttgcaaatttatcagctcctgccaaaggatcagtggttggccgcggcacaggccgccaccttactgctcccggatgagaacagagaagtgttgcaaaccctgctttatttcttgtcagacatcgcctccgctgaagagaatcagatgacagccggtaatcttgcagtatgcctcgccccatcgatcttccacctgaatgttagtaaaaaggattccccctcccccagaataaagtcaaagagaagcctgataggaagacccgggccaagggatctgagcgacaacatggctgctacacaggggctgtctcacatgatctccgactgcaaaaagttatttcaggtgccacaggatatggtcctgcagctctgctccagctattcagctgccgaactgagccctcccggaccagcccttgccgaactgcggcaagcccaggccgccggcgtttctttaagtctgtacatggaggagaatattcaggatctgctacgcgacgccgcggagcggtttaagggttggatgagcgttcctggcccccagcacactgaactggcttgtaggaaagcaccagatggccatcccctgagactttggaaagcctccaccgaggtcgccgcccctcctgctgtcgtgctacatagagttctgcgagaacgtgcactgtgggacgaggatctgctgcgcgcacaggtgctggaagcattaatgccaggcgttgagctgtatcactatgttacagactccatggctccacacccttgcagggatttcgtggtcctaagaatgtggaggtccgatctcccacgcgggggctgcctactagtgagtcagtcattagaccctgagcagccagtgcccgagtctggcgtccgggcattaatgctcacctcgcagtatcttatggagccttgcgggctcgggcgatcaagactgacccatatttgcagggccgatctgagaggaagatctcccgattggtacaataaggtgttcggtcacctctgtgctatggaggtggccaagatacgagatagtttccccaccctgcaggccgccggacctgaaaccaaactgtag

SEQ ID NO: 53909 - DNA, 3072 bp, Artificial Sequence
  derived and/or modified sequence
atgaccctgaacaattgtgcctctatgaagctcgaggtgcattttcagtccaaacagaacgaggattccgaggaggaggagcaatgcacaattagctcacattgggcctttcagcaggagtcaaagtgctggagtcctatggggagctccgacctgctagcgccacccagcccaggactccccgcaacctcaagctgtgagtccgtgctcaccgagctgtccgccacaagcctacctgtgatcaccgtctcactacccccagaaccagctgatctgccattgccgggaagagctccttcatcatcggatcggcctctattatctcccacccagggacaggagggcccacaagacaaggctaaaaagagacatagaaaccggagcttcctgaagcaccttgaatcactgaggagaaaagaaaagagtggatcccaacaggcagaacccaaacactcacctgctacaagtgagaaggtatcaaaagctagcagtttccgaagttgccggggattcctctccgccggtttctatcgtgccaagaactgggccgctacctccgccggagggtctggggcaaatacacggaaagcatgggaagcatggccagttgcctcattccgtcaccctcagtggacgcaccggggtgattgtctagtgcacgtgcctggagaccataaaccaggcacctttcccagaagcctgtccatcgaatccctgtgccctgaagacgggcaccggctcgccgattggcagccaggaaggagatggggatgtgaaggcagacggggaagctgtgggagtactggttctcacgcctctacctacgacaatcttccagagctgtaccccgcagagccagtgatggtgggcgctgaggctgaggacgaagatgatgaggaatcaggcggatcttatgctcacctcgacgatatcctgcagcatgtgtggggtctccagcaaagggtagaactgtggagcagggccatgtatcccgaccttgggcctggagatgaagaggaggaagaagccactagtagcgtggagatagctactgttgaggtgaagtgccaggcagaggctttatcacagatggaagtgcccgcacatggcgagtctccagcctgggcccaagccgaagtacaaccagctgtgttggcacccgcacaggcccctgctgaagctgagccggtcgcgcaggaagaagcggaggccccagccccagcccctgcacccgctccagctcaggacagcgagcaggaagcccacagtgggggtgagcccacctttgcttctagtctgtctgtggaggaagggcactcaattagtgacaccgttgcttccagcagcgagctggactcatccggcaattctatgaacgaagcagaggccgctggtccattagctggactgcaggcatccatgcctcgggagcgaagagattcaggcgttggggctagcctaactcggccatgtcgtaagctgcggtggcattcatttcaaaacagccataggccatctttgaactccgaatcactggagattaatcgtcagtttgcgggacaaatcaacctgttgcacaaaggatcgctgctccgtctgaccgcctttatggaaaagtatacggtgccccacaagcagggatgggtgtggagcatgcccaaattcatgcggcgtaataaaacccccgactacagaggccagcatgtgttcggtgtcccccctctcatccatgttcagcggactggacagcctctacctcagtccattcagcaggccatgagataccttcggtctcagtgtctggatcaggtaggtattttccgcaagtctggagtgaagagccgcattcagaatctcagacaaatgaatgaaacatctccagataacgtgtgttacgagggacaaagtgcatacgacgtggccgatctgctgaagcagtatttcagagatctgcccgaacccatctttacctccaaactgacgaccacctttctgcagatctatcaattgttacctaaagatcaatggttggcagctgcccaggccgctactctcctgctgccggacgaaaacagggaagtgctgcaaacactgctgtatttcctttccgacatagcatccgcggaggagaaccagatgacagccggtaatctcgcagtctgtctggccccttctatattccatcttaatgtgtccaagaaggatagcccctctccccgaattaagtccaagagatccttgattgggaggccgggtccacgcgatttgagtgacaacatggctgctacccaaggcttgtcgcatatgatatctgattgtaagaagctatttcaggtgcctcaagatatggtgcttcagctctgctcttcctattccgctgctgaattaagtccaccaggtcctgccctggcggagctgcgtcaagctcaggccgctggagtgtctctgtcactatacatggaggagaacatccaggacctattgcgggatgctgccgagcgtttcaaaggttggatgtctgtgccgggaccacaacacacagaactcgcatgtcgaaaggccccagacggccatcctctcaggctttggaaggcttcaaccgaggtggccgcaccccctgcagtggtgctgcatcgggtgttaagagaacgggctctgtgggatgaagatctgttgcgagcccaggtgttggaggccctgatgccaggcgtggagctgtatcattatgtgacagacagtatggcaccgcacccttgcagagattttgtcgtgctccgcatgtggaggtcagatttaccccgtggcggttgtctcctcgtcagtcagagtttggacccagaacagccagtgcctgaaagtggggtgcgggcactaatgctgaccagccaatacctgatggagccttgcggattgggcagaagtagactcacacacatttgtcgggctgacctgaggggccgttcccctgattggtataacaaggttttcggtcacttatgtgctatggaagtggccaagatccgagactcattccctacactacaggctgccggtccagaaacaaaattatag

SEQ ID NO: 53910 - DNA, 3072 bp, Artificial Sequence
  derived and/or modified sequence
atgacattaaataactgtgcttccatgaagctagaggtgcattttcaatcgaagcagaacgaagactcagaagaagaggaacaatgtactatctcctcacactgggcttttcaacaagagagtaaatgttggtcgcccatggggtcttctgatttgctggccccacctagcccaggtctgcccgctaccagcagctgtgaatctgtacttacagagttgtccgcgacatctctacctgtcattacagtgagcctgccacctgaaccagcagatctgcctctgcccggaagggctccttctagcagcgatcgacctctactttcaccgacacagggacaagagggtccccaggataaggctaagaagcgccaccggaataggagcttccttaagcatctagaaagtttgaggaggaaggagaagtctggttctcaacaggccgagcccaagcacagccctgctacaagcgagaaggtgagcaaagccagtagctttagaagctgtcggggattcctgtcggccggtttctatcgcgcaaaaaattgggcagccacctcagccggtgggtccggtgccaatacaagaaaggcctgggaggcttggcccgtagcctctttccgccacccccagtggactcaccggggagactgcctcgtgcacgtaccgggagatcataagcctggtacattccccagatccttaagcatcgagtccttgtgtcccgaggatgggcataggctcgccgactggcagcccggacggaggtgggggtgcgaggggaggagagggagctgtggttccacgggctcacatgcaagcacgtacgacaacctgccggagctgtacccagcggaacctgtgatggtcggcgctgaggccgaggatgaggacgatgaagaatccgggggaagctacgcccatcttgacgacatcttgcagcacgtctggggccttcagcagagagtagagctgtggtctcgagccatgtatccagatttgggccctggggacgaagaagaagaggaagctacttcctccgtagagatagcaacagtggaagtaaaatgccaagctgaggccctgagccagatggaggttcctgcccacggtgagtctccagcctgggcacaggcggaggtgcagcctgctgtgctcgcccctgcgcaggccccagcagaggcagagccagtcgcacaggaggaggccgaggctcccgcaccagcccctgctcccgcacccgctcaggattcagaacaggaggcgcatagtgggggagagccaactttcgcctcttctctaagcgtggaagaaggccacagcatctcagacacagttgcatcctcctccgagctggacagtagcggaaactctatgaacgaggcggaggctgccggaccacttgccggactgcaggcctccatgcctagggagagacgggattcgggagttggggcttccttaaccaggccatgtagaaaactgcgctggcacagctttcagaacagtcaccgcccatctctgaacagtgagagcctcgaaattaacaggcagttcgccggacagatcaacttacttcataaagggtctcttcttagactcacggcctttatggagaagtacactgtgccacataagcaggggtgggtgtggtccatgcccaagttcatgaggaggaataaaaccccagattaccgcggacagcatgtgtttggcgtgcctcccctcatccacgtgcagcggaccggccagccactgcctcaatcgatacaacaggcaatgcgatacctgcggagtcagtgtttggatcaggtgggcatttttcgaaaatccggggtgaaaagccggatccaaaacctccgacaaatgaacgagaccagccccgataacgtatgttacgagggacagtctgcctatgatgtggcggacctcctgaagcagtatttcagggacctgccagaaccaattttcaccagcaagctgaccacgactttcctccagatttaccagttacttccaaaagatcagtggttggcagcagcacaggctgccactcttctgctgcccgatgagaacagggaggtcttacaaacacttctttactttttgagtgatatcgcgtcagctgaggaaaatcagatgacagccggtaacctggctgtgtgtctcgccccttccatttttcatcttaacgtttccaaaaaggactcaccaagcccacggattaaaagtaagagaagcctcattggcagacctggacctcgcgatctgtccgataatatggctgcaacgcaggggctctctcacatgatctcagactgtaagaagttatttcaggtgccccaggatatggtccttcagctgtgctcctcctatagcgctgccgagttgagtccacccggacctgccctcgcggaactacgccaggcgcaggcagcaggggtctccttatcattatatatggaggagaatattcaggatcttttacgcgatgcagctgagcgcttcaaaggctggatgtctgtgcctggacctcagcataccgaactggcatgcaggaaagcgcctgatggacatcccctaaggctgtggaaagcctcaaccgaagtcgcagcccctcctgctgtcgttctccatcgcgtgcttcgggaacgagccttgtgggacgaggatcttctgcgcgcacaggtcctcgaggccctaatgccaggagttgaactgtatcactatgtgacagattcgatggcccctcatccatgtcgggactttgtggtgctccggatgtggagatccgacctgcccagaggcggttgtctcctagtatctcaatccctggacccggagcaacccgtgccagaaagtggagtgcgcgcactgatgttgacatcacagtacctcatggaaccttgcggtctgggtcgctctcggctcacccacatctgtcgggcagatttgcggggtaggagcccggactggtacaataaagtatttggccacttgtgcgctatggaggtggccaagatcagagacagctttcctacccttcaggccgctggtcctgagactaaactctag

SEQ ID NO: 53911 - DNA, 3312 bp, Artificial Sequence
  derived and/or modified sequence
atgccattgctggacgtgttctggagctgttttagaaaggtgaaatgttttccgctgctccaggtgaaaaagaatgccgaagcagaggcaaagagagcttgtgagtggctgcaggctacaggcttccctcaatatgtgcagcttttcgaagagggaagtttccctttggacatcggcagcgtcaagaagaaccacgggttcctcgatgaggatagcctgggggctctgtgccggaggttaatgaccttgaataactgcgccagtatgaagctggaggttcacttccagagcaaacaaaacgaggacagcgaagaggaggaacagtgtactatatcatcccattgggccttccaacaggagagcaagtgttggtcgcccatgggttcctccgatttattggctccaccttcgccgggacttcctgctacctcaagctgcgagagcgtactgaccgagctgagcgcgaccagtctgcccgtcattaccgtttcgcttcccccagagcccgctgatctccccctcccaggccgtgccccatcttcttccgatcgccctctgctttcccctactcaggggcaagaaggaccacaggataaagccaagaaaagacatagaaatcggagtttcctcaagcatcttgaatccttgcggaggaaggagaaatcgggctctcagcaggccgaacccaagcactctcctgccacaagcgaaaaggtttccaaagcatctagttttagatcatgccggggatttctctccgccggattttatcgcgctaaaaattgggccgcaaccagtgccggtggctccggggctaacactagaaaggcgtgggaggcatggcctgtggcctctttccgacacccacaatggactcataggggcgactgtctcgtgcacgtccctggagaccacaaacctggcacattccccaggagtctgagcattgagagcttatgcccagaagatggtcaccggctcgctgactggcagcccggtagaaggtggggctgcgaagggagacgcggaagttgcggcagtaccggatcacatgccagtacttacgacaacctgcccgagctctatcctgcagagccagtgatggtcggtgccgaggcagaggacgaagacgatgaagagagcggcggaagctacgcccatctcgacgacatcctgcagcacgtgtggggcttgcaacaaagagtggagttgtggagccgagctatgtaccctgacctaggaccgggtgatgaggaagaagaggaggccacatccagcgtagaaatagccacagtagaagtgaagtgtcaggccgaagccttgtcgcagatggaggtgcctgcgcatggggaatcccctgcatgggctcaggccgaagtgcagccagccgtcctggctcccgcacaggcccctgccgaggccgaacccgtagcacaagaagaggcggaagcgccagccccagcccctgcgcctgcaccagcgcaggactccgaacaagaggctcattcagggggagaacccacctttgcttcttccctgagcgtcgaggaggggcacagtatatccgatactgtagcttctagctcagaactcgactcttccggtaacagtatgaatgaagcggaagcagccggtcccctggctgggctgcaagcgtctatgcctagagagcgcagggatagtggcgtaggtgcgagtctgacacgcccttgccgaaagctgcgttggcatagctttcagaattctcaccggccatcgctgaactcggaatctctagaaattaaccgccagttcgctggccagattaatttgctgcataagggttcactcttaaggcttacagcttttatggaaaagtacaccgtgccccataagcagggctgggtgtggagcatgcccaaatttatgaggagaaataaaacacctgattatcggggacaacatgtctttggagtccccccacttattcatgtgcagcgcaccgggcagcctctcccccaaagcatccagcaggctatgaggtacttaagatctcaatgtttagaccaggtgggaatctttaggaagagcggggtaaagtcccgaatccagaatctgagacagatgaatgaaacttcccctgataatgtgtgctatgagggccagtccgcctacgatgttgccgatcttctcaagcagtactttagggacttaccagagcccatcttcacctccaaactcacaaccacgtttcttcaaatctaccagctgttgcctaaggaccagtggttggcagcagcccaggcagcaaccctactgctccccgatgaaaatcgggaagtgctccagacccttctctattttctgtcagatattgccagtgcagaggagaaccagatgactgccggtaacttagctgtgtgtctggcaccttccatcttccacctgaatgtttccaaaaaggactctccctcccctcgtattaaatctaaacgatcactgattggcagacctggcccacgagaccttagcgacaatatggccgcaacacagggtctctcccatatgatctccgattgcaagaaactgttccaggtgccacaggacatggtgctccaactgtgtagctcttattcagcggctgaactttccccccctggacccgcacttgccgaactcaggcaggcccaggctgctggggtgagtctcagcctctacatggaggaaaacatccaagacctactgcgcgacgctgcagagcggtttaaagggtggatgtctgtgcccggtccccagcatactgagctagcttgcagaaaggctcctgatggtcaccccttgagattatggaaagccagcaccgaagtcgccgctccccctgccgtagtactccatagagtcctgcgcgaaagagctttgtgggatgaagacttgctacgtgctcaagtgctggaggccctgatgcctggagtggagctgtaccactacgtaaccgacagcatggcacctcatccatgccgtgacttcgtggttctaagaatgtggcggtctgacctgccgaggggagggtgtctgttggtctcccagtctttggaccccgagcagcctgtaccggagagcggcgtccgcgctctcatgctgacctcccagtacctcatggagccttgtggtctgggacggtctcgcttaacgcatatttgccgggctgacctgcggggtcggtcacctgattggtataataaagtgtttggccatttgtgcgccatggaggttgccaagatacgagactctttcccaactttgcaggccgctggccctgaaaccaaactctag

SEQ ID NO: 53912 - DNA, 4862 bp, Artificial Sequence
  derived and/or modified sequence
ggccttccaggaggcgggaggcgcccgctgtcgaggcagctgagccccggcaaccgctgctctccgcctctcccctcgcggggccggctcatggagcgcagggaccgggctggctctcgccgagccccgggcctcttttagcctcgtccccagagagggaggagccggtgcccggcacagccccgccggccctagaagctccccacgcgccaccatgcctctgctggacgttttctggtcttgcttcaggaaggtgaagtgcttcccattgctgcaggtgaagaagaacgctgaagccgaggccaaaagagcatgtgagtggcttcaagcaacaggattccctcagtatgtgcagctttttgaaggaggctgatgaccttgaataattgtgcctcgatgaaactggaggttcattttcaaagcaagcagaatgaagactcagaagaggaagagcagtgtaccatcagtagccactgggccttccagcaggaaagtaagtgctggtctcctatggggtcctctgatctgttggccccaccgagccctggcctgccagcgacctcaagctgtgagagcgtcctcaccgagcttagtgccacctctctgccagtcatcaccgtgagcctaccacccgagccagcagacttgcccttgccaggccgtgcccccagctcgagtgaccggcccctcctcagccccacccagggccaggagggtccccaggacaaagccaagaagcgccatcgtaaccgtagcttcctcaagcaccttgaatctctgaggcggaaggaaaagagtggcagccagcaagcagagcccaagcatagtccagccacctcagagaaggtctccaaagcctcatctttccgcagttgtcgtggcttcctctcagctggattttacagggccaagaactgggccgccacctcagccggtggcagtggtgccaatactcggaaggcctgggaggcctggcctgtggcctcgttccggcatcctcagtggacacaccggggtgattgcctggtgcacgttcctggggaccacaaaccaggcacattccctcgctccctgtccattgagagcctgtgtcctgaggatggacaccgcctggcagactggcagccaggtaggcggtggggctgtgaggggcgccggggctcctgtggctcaacgggcagccatgccagcacgtatgacaacttgcctgagctgtacccagctgagcctgtaatggttggggctgaggctgaagatgaagatgatgaggagagtgggggcagctatgctcacctagacgacatcctccagcacgtgtgggggctacagcaacgagtagagctgtggtctcgggccatgtacccagacctggggcctggagatgaggaagaggaggaggccacttcatcagtagaaatagccacagttgaggtcaaatgccaagctgaggctctcagccagatggaggttccggcccatggagagtccccagcctgggcccaggctgaagtccagccagcagtcctggctccggctcaggctccagctgaggctgaaccagtggcacaggaagaggctgaggccccggccccagccccggccccggccccagcccaggacagtgagcaggaggcacattcaggcggggaacccacctttgcctctagcctgtctgtggaagaaggacactccatttctgacactgtggcctcctccagcgaacttgacagtagtgggaactccatgaatgaggctgaggctgcggggcccctggctggactccaggcatcaatgccccgtgaacggcgcgattcaggtgttggggcctcacttaccagaccctgcaggaagctccgttggcatagcttccagaactcccatcgtcccagcctcaactcagagtcgctggagatcaaccggcagtttgcaggccagatcaacctcctgcacaagggctcactgctgcggcttaccgcgttcatggagaagtacactgtgccccacaagcagggctgggtctggtcaatgcccaagttcatgaggaggaacaagaccccagattaccggggacagcacgtatttggggtgccacccctcatccacgtgcagcgcacgggccagccactgccacagagcattcagcaagccatgcgctacttgcgcagccagtgcctggaccaagtaggcatcttccgcaagtctggggtcaagtccaggatccagaacctgcgtcaaatgaatgagacctcgcctgacaatgtctgctacgagggccagtcagcctacgacgtggctgacctgctaaagcagtatttccgggacctgcctgagcccatcttcaccagcaagctcaccaccactttcctccagatctaccagctcctccccaaggatcagtggttggcagcagcacaagccgccaccttgctgctccccgatgagaaccgagaggtgctacagaccctgctctacttcttaagtgacattgcctctgccgaggaaaaccagatgacagcaggcaacctggcagtgtgcctggcgccctccatcttccacctcaatgtctctaagaaggatagcccctctcccaggatcaagagcaaacgcagcctcattggcaggccaggccctagggacctgagtgacaacatggcagccacccagggcctgtcgcacatgatcagtgactgcaagaaacttttccaggtgccccaggacatggtgctgcagctgtgcagctcctacagcgcagctgagctcagccctcccggcccagccctggctgagctgcgtcaggcccaagctgcaggggtaagcctgagcctctacatggaagagaatatccaggacctgctgcgtgatgctgctgagcgcttcaagggctggatgagcgtgccagggccccagcacacggagctggcttgcaggaaggcaccggatgggcaccccctgcggctatggaaggcatccacagaggtggcagcccccccagctgtggtgctgcatcgtgttctccgggagcgggccctctgggatgaggatctgctgcgggcccaggtgctggaagccctgatgccgggtgtggagctgtaccactatgtcaccgacagcatggcaccccatccctgccgcgactttgtggtgcttcggatgtggcgctctgacctgcctcgtgggggttgcctgcttgtctcccagtccctggatccggaacaacctgtgccagagtcgggtgtgcgagccctcatgctcacatcccagtacctcatggagccttgcggcttgggccgctctcggctcacacacatctgccgggctgacctcaggggccgttctcctgactggtacaacaaagtctttggacacctgtgtgccatggaagtggcaaagatccgggactccttccccaccctgcaggcagcgggccctgagacaaagctgtgagccttgggctggtcccagggtggcaccacccaggccccctgggcaccaagggagcgagggggaataagagcagggcagccccctgggtgccgctgtcaggagcagagccaggcccaggtggctccagctgcctgtcctgtcccctttcctaaagctcctctgcacatagaggggagaaaaagagaatttaggcaactccactcccccttcacccccaaccctgtattctactctcccgaaaagagaagagaatcgcatgagtagcaagactgctgccaccagccacctgcttgtgaggccgccacttggcatgaagcctccacagctccccgcctgcaggggcaaagaggtcgacagcaatgtgtgatcccagctctctgccagactgagagggcaagccgtcttgtttgctgcaaggatgcttttgaggttggacaggaggttctggtcctgcctttggggccaacgctggctctgaagtgtctttttcagaggaattggactggagtgaatgggcacaggggtggagcgcagggcagccccagtcaccacgagctgtttcatttgtgtaaatacgatgctgaattttatgaggctgagttaagagtgggcactgacgggcccctaatatgtgacatgacgatttggcatagatagggatgtgagagtggagtaccttcctttctcaagtctcgagatgccagtgaaaccagtattccctgacttgggtttcacactttatcgaccaccccatggggtcctgtgtagcctttggccacgcactgacactgcccaggccaagcaaaagcagagtgtggttaagagacaagggtctatgtcatcatcccttttgcttatggtagtgggctaacataacagcccctttctcaagcagagacctggcccctgggccagccagatggaagggcctatcttagccagctggagcttaagccaaacctgttctgtcccactggccagccatctttgctcacatggaaattcaaatgccattcaaaggccactggtgctttatttttctatctgctgagtaaactgaaatgagatgggtcccaaccaccactgtaattttcaagcctattttatttgtacctgtaaatactgtacagctaatatatatatatatatatatatatgtgtgtgtgtgtgtgtgtgtatatgtgtttatagagatacacacacatatatatgtgtgtatatatatacacatacatatatatacacacacgcatttgcacagacacacacatatatcaattctcatgagtgtattataatctctggtgggggcaagtgtctggaaggcctgaggggcacttcagatgagaatggagaggtagggagccaggtgcagcaggatccctcaaatcaataaagcattaccagagatgcacttt

SEQ ID NO: 53913 - DNA, 4820 bp, Artificial Sequence
  derived and/or modified sequence
ctcgggttgacaacggctaagcagccgcggcagctgctcttctggctggcaccgtcacccctgcccgaccccaggccccgcgtgtgtcccggacggagcagtccctcctgggctcgcctcctgcccgctcgctctgtgtcagcgcccgaacccaaaggggtggacgcggcctccagaagccgaggccaaaagagcatgtgagtggcttcaagcaacaggattccctcagtatgtgcagctttttgaagaaggttcgtttcccctggatattggctctgtgaagaaaaaccacggttttctggacgaggactctttgggggccctgtgtaggaggctgatgaccttgaataattgtgcctcgatgaaactggaggttcattttcaaagcaagcagaatgaagactcagaagaggaagagcagtgtaccatcagtagccactgggccttccagcaggaaagtaagtgctggtctcctatggggtcctctgatctgttggccccaccgagccctggcctgccagcgacctcaagctgtgagagcgtcctcaccgagcttagtgccacctctctgccagtcatcaccgtgagcctaccacccgagccagcagacttgcccttgccaggccgtgcccccagctcgagtgaccggcccctcctcagccccacccagggccaggagggtccccaggacaaagccaagaagcgccatcgtaaccgtagcttcctcaagcaccttgaatctctgaggcggaaggaaaagagtggcagccagcaagcagagcccaagcatagtccagccacctcagagaaggtctccaaagcctcatctttccgcagttgtcgtggcttcctctcagctggattttacagggccaagaactgggccgccacctcagccggtggcagtggtgccaatactcggaaggcctgggaggcctggcctgtggcctcgttccggcatcctcagtggacacaccggggtgattgcctggtgcacgttcctggggaccacaaaccaggcacattccctcgctccctgtccattgagagcctgtgtcctgaggatggacaccgcctggcagactggcagccaggtaggcggtggggctgtgaggggcgccggggctcctgtggctcaacgggcagccatgccagcacgtatgacaacttgcctgagctgtacccagctgagcctgtaatggttggggctgaggctgaagatgaagatgatgaggagagtgggggcagctatgctcacctagacgacatcctccagcacgtgtgggggctacagcaacgagtagagctgtggtctcgggccatgtacccagacctggggcctggagatgaggaagaggaggaggccacttcatcagtagaaatagccacagttgaggtcaaatgccaagctgaggctctcagccagatggaggttccggcccatggagagtccccagcctgggcccaggctgaagtccagccagcagtcctggctccggctcaggctccagctgaggctgaaccagtggcacaggaagaggctgaggccccggccccagccccggccccggccccagcccaggacagtgagcaggaggcacattcaggcggggaacccacctttgcctctagcctgtctgtggaagaaggacactccatttctgacactgtggcctcctccagcgaacttgacagtagtgggaactccatgaatgaggctgaggctgcggggcccctggctggactccaggcatcaatgccccgtgaacggcgcgattcaggtgttggggcctcacttaccagaccctgcaggaagctccgttggcatagcttccagaactcccatcgtcccagcctcaactcagagtcgctggagatcaaccggcagtttgcaggccagatcaacctcctgcacaagggctcactgctgcggcttaccgcgttcatggagaagtacactgtgccccacaagcagggctgggtctggtcaatgcccaagttcatgaggaggaacaagaccccagattaccggggacagcacgtatttggggtgccacccctcatccacgtgcagcgcacgggccagccactgccacagagcattcagcaagccatgcgctacttgcgcagccagtgcctggaccaagtaggcatcttccgcaagtctggggtcaagtccaggatccagaacctgcgtcaaatgaatgagacctcgcctgacaatgtctgctacgagggccagtcagcctacgacgtggctgacctgctaaagcagtatttccgggacctgcctgagcccatcttcaccagcaagctcaccaccactttcctccagatctaccagctcctccccaaggatcagtggttggcagcagcacaagccgccaccttgctgctccccgatgagaaccgagaggtgctacagaccctgctctacttcttaagtgacattgcctctgccgaggaaaaccagatgacagcaggcaacctggcagtgtgcctggcgccctccatcttccacctcaatgtctctaagaaggatagcccctctcccaggatcaagagcaaacgcagcctcattggcaggccaggccctagggacctgagtgacaacatggcagccacccagggcctgtcgcacatgatcagtgactgcaagaaacttttccaggtgccccaggacatggtgctgcagctgtgcagctcctacagcgcagctgagctcagccctcccggcccagccctggctgagctgcgtcaggcccaagctgcaggggtaagcctgagcctctacatggaagagaatatccaggacctgctgcgtgatgctgctgagcgcttcaagggctggatgagcgtgccagggccccagcacacggagctggcttgcaggaaggcaccggatgggcaccccctgcggctatggaaggcatccacagaggtggcagcccccccagctgtggtgctgcatcgtgttctccgggagcgggccctctgggatgaggatctgctgcgggcccaggtgctggaagccctgatgccgggtgtggagctgtaccactatgtcaccgacagcatggcaccccatccctgccgcgactttgtggtgcttcggatgtggcgctctgacctgcctcgtgggggttgcctgcttgtctcccagtccctggatccggaacaacctgtgccagagtcgggtgtgcgagccctcatgctcacatcccagtacctcatggagccttgcggcttgggccgctctcggctcacacacatctgccgggctgacctcaggggccgttctcctgactggtacaacaaagtctttggacacctgtgtgccatggaagtggcaaagatccgggactccttccccaccctgcaggcagcgggccctgagacaaagctgtgagccttgggctggtcccagggtggcaccacccaggccccctgggcaccaagggagcgagggggaataagagcagggcagccccctgggtgccgctgtcaggagcagagccaggcccaggtggctccagctgcctgtcctgtcccctttcctaaagctcctctgcacatagaggggagaaaaagagaatttaggcaactccactcccccttcacccccaaccctgtattctactctcccgaaaagagaagagaatcgcatgagtagcaagactgctgccaccagccacctgcttgtgaggccgccacttggcatgaagcctccacagctccccgcctgcaggggcaaagaggtcgacagcaatgtgtgatcccagctctctgccagactgagagggcaagccgtcttgtttgctgcaaggatgcttttgaggttggacaggaggttctggtcctgcctttggggccaacgctggctctgaagtgtctttttcagaggaattggactggagtgaatgggcacaggggtggagcgcagggcagccccagtcaccacgagctgtttcatttgtgtaaatacgatgctgaattttatgaggctgagttaagagtgggcactgacgggcccctaatatgtgacatgacgatttggcatagatagggatgtgagagtggagtaccttcctttctcaagtctcgagatgccagtgaaaccagtattccctgacttgggtttcacactttatcgaccaccccatggggtcctgtgtagcctttggccacgcactgacactgcccaggccaagcaaaagcagagtgtggttaagagacaagggtctatgtcatcatcccttttgcttatggtagtgggctaacataacagcccctttctcaagcagagacctggcccctgggccagccagatggaagggcctatcttagccagctggagcttaagccaaacctgttctgtcccactggccagccatctttgctcacatggaaattcaaatgccattcaaaggccactggtgctttatttttctatctgctgagtaaactgaaatgagatgggtcccaaccaccactgtaattttcaagcctattttatttgtacctgtaaatactgtacagctaatatatatatatatatatatatatgtgtgtgtgtgtgtgtgtgtatatgtgtttatagagatacacacacatatatatgtgtgtatatatatacacatacatatatatacacacacgcatttgcacagacacacacatatatcaattctcatgagtgtattataatctctggtgggggcaagtgtctggaaggcctgaggggcacttcagatgagaatggagaggtagggagccaggtgcagcaggatccctcaaatcaataaagcattaccagagat

SEQ ID NO: 53914 - DNA, 4841 bp, Artificial Sequence
  derived and/or modified sequence
agggaccgggctggctctcgccgagccccgggcctcttttagcctcgtccccagagagggaggagccggtgcccggcacagccccgccggccctagaagctccccacgcgccaccatgcctctgctggacgttttctggtcttgcttcaggaaggtgaagtgcttcccattgctgcaggtgaagaagaacgctgaagccgaggccaaaagagcatgtgagtggcttcaagcaacaggattccctcagtatgtgcagctttttgaagaaggttcgtttcccctggatattggctctgtgaagaaaaaccacggttttctggacgaggactctttgggggccctgtgtaggaggctgatgaccttgaataattgtgcctcgatgaaactggaggttcattttcaaagcaagcagaatgaagactcagaagaggaagagcagtgtaccatcagtagccactgggccttccagcaggaaagtaagtgctggtctcctatggggtcctctgatctgttggccccaccgagccctggcctgccagcgacctcaagctgtgagagcgtcctcaccgagcttagtgccacctctctgccagtcatcaccgtgagcctaccacccgagccagcagacttgcccttgccaggccgtgcccccagctcgagtgaccggcccctcctcagccccacccagggccaggagggtccccaggacaaagccaagaagcgccatcgtaaccgtagcttcctcaagcaccttgaatctctgaggcggaaggaaaagagtggcagccagcaagcagagcccaagcatagtccagccacctcagagaaggtctccaaagcctcatctttccgcagttgtcgtggcttcctctcagctggattttacagggccaagaactgggccgccacctcagccggtggcagtggtgccaatactcggaaggcctgggaggcctggcctgtggcctcgttccggcatcctcagtggacacaccggggtgattgcctggtgcacgttcctggggaccacaaaccaggcacattccctcgctccctgtccattgagagcctgtgtcctgaggatggacaccgcctggcagactggcagccaggtaggcggtggggctgtgaggggcgccggggctcctgtggctcaacgggcagccatgccagcacgtatgacaacttgcctgagctgtacccagctgagcctgtaatggttggggctgaggctgaagatgaagatgatgaggagagtgggggcagctatgctcacctagacgacatcctccagcacgtgtgggggctacagcaacgagtagagctgtggtctcgggccatgtacccagacctggggcctggagatgaggaagaggaggaggccacttcatcagtagaaatagccacagttgaggtcaaatgccaagctgaggctctcagccagatggaggttccggcccatggagagtccccagcctgggcccaggctgaagtccagccagcagtcctggctccggctcaggctccagctgaggctgaaccagtggcacaggaagaggctgaggccccggccccagccccggccccggccccagcccaggacagtgagcaggaggcacattcaggcggggaacccacctttgcctctagcctgtctgtggaagaaggacactccatttctgacactgtggcctcctccagcgaacttgacagtagtgggaactccatgaatgaggctgaggctgcggggcccctggctggactccaggcatcaatgccccgtgaacggcgcgattcaggtgttggggcctcacttaccagaccctgcaggaagctccgttggcatagcttccagaactcccatcgtcccagcctcaactcagagtcgctggagatcaaccggcagtttgcaggccagatcaacctcctgcacaagggctcactgctgcggcttaccgcgttcatggagaagtacactgtgccccacaagcagggctgggtctggtcaatgcccaagttcatgaggaggaacaagaccccagattaccggggacagcacgtatttggggtgccacccctcatccacgtgcagcgcacgggccagccactgccacagagcattcagcaagccatgcgctacttgcgcagccagtgcctggaccaagtaggcatcttccgcaagtctggggtcaagtccaggatccagaacctgcgtcaaatgaatgagacctcgcctgacaatgtctgctacgagggccagtcagcctacgacgtggctgacctgctaaagcagtatttccgggacctgcctgagcccatcttcaccagcaagctcaccaccactttcctccagatctaccagctcctccccaaggatcagtggttggcagcagcacaagccgccaccttgctgctccccgatgagaaccgagaggtgctacagaccctgctctacttcttaagtgacattgcctctgccgaggaaaaccagatgacagcaggcaacctggcagtgtgcctggcgccctccatcttccacctcaatgtctctaagaaggatagcccctctcccaggatcaagagcaaacgcagcctcattggcaggccaggccctagggacctgagtgacaacatggcagccacccagggcctgtcgcacatgatcagtgactgcaagaaacttttccaggtgccccaggacatggtgctgcagctgtgcagctcctacagcgcagctgagctcagccctcccggcccagccctggctgagctgcgtcaggcccaagctgcaggggtaagcctgagcctctacatggaagagaatatccaggacctgctgcgtgatgctgctgagcgcttcaagggctggatgagcgtgccagggccccagcacacggagctggcttgcaggaaggcaccggatgggcaccccctgcggctatggaaggcatccacagaggtggcagcccccccagctgtggtgctgcatcgtgttctccgggagcgggccctctgggatgaggatctgctgcgggcccaggtgctggaagccctgatgccgggtgtggagctgtaccactatgtcaccgacagcatggcaccccatccctgccgcgactttgtggtgcttcggatgtggcgctctgacctgcctcgtgggggttgcctgcttgtctcccagtccctggatccggaacaacctgtgccagagtcgggtgtgcgagccctcatgctcacatcccagtacctcatggagccttgcggcttgggccgctctcggctcacacacatctgccgggctgacctcaggggccgttctcctgactggtacaacaaagtctttggacacctgtgtgccatggaagtggcaaagatccgggactccttccccaccctgcaggcagcgggccctgagacaaagctgtgagccttgggctggtcccagggtggcaccacccaggccccctgggcaccaagggagcgagggggaataagagcagggcagccccctgggtgccgctgtcaggagcagagccaggcccaggtggctccagctgcctgtcctgtcccctttcctaaagctcctctgcacatagaggggagaaaaagagaatttaggcaactccactcccccttcacccccaaccctgtattctactctcccgaaaagagaagagaatcgcatgagtagcaagactgctgccaccagccacctgcttgtgaggccgccacttggcatgaagcctccacagctccccgcctgcaggggcaaagaggtcgacagcaatgtgtgatcccagctctctgccagactgagagggcaagccgtcttgtttgctgcaaggatgcttttgaggttggacaggaggttctggtcctgcctttggggccaacgctggctctgaagtgtctttttcagaggaattggactggagtgaatgggcacaggggtggagcgcagggcagccccagtcaccacgagctgtttcatttgtgtaaatacgatgctgaattttatgaggctgagttaagagtgggcactgacgggcccctaatatgtgacatgacgatttggcatagatagggatgtgagagtggagtaccttcctttctcaagtctcgagatgccagtgaaaccagtattccctgacttgggtttcacactttatcgaccaccccatggggtcctgtgtagcctttggccacgcactgacactgcccaggccaagcaaaagcagagtgtggttaagagacaagggtctatgtcatcatcccttttgcttatggtagtgggctaacataacagcccctttctcaagcagagacctggcccctgggccagccagatggaagggcctatcttagccagctggagcttaagccaaacctgttctgtcccactggccagccatctttgctcacatggaaattcaaatgccattcaaaggccactggtgctttatttttctatctgctgagtaaactgaaatgagatgggtcccaaccaccactgtaattttcaagcctattttatttgtacctgtaaatactgtacagctaatatatatatatatatatatatatgtgtgtgtgtgtgtgtgtgtatatgtgtttatagagatacacacacatatatatgtgtgtatatatatacacatacatatatatacacacacgcatttgcacagacacacacatatatcaattctcatgagtgtattataatctctggtgggggcaagtgtctggaaggcctgaggggcacttcagatgagaatggagaggtagggagccaggtgcagcaggatccctcaaatcaataaagcattaccagagatgca

SEQ ID NO: 53915 - DNA, 4864 bp, Artificial Sequence
  derived and/or modified sequence
ggccttccaggaggcgggaggcgcccgctgtcgaggcagctgagccccggcaaccgctgctctccgcctctcccctcgcggggccggctcatggagcgcagggaccgggctggctctcgccgagccccgggcctcttttagcctcgtccccagagagggaggagccggtgcccggcacagccccgccggccctagaagctccccacgcgccaccatgcctctgctggacgttttctggtcttgcttcaggaaggtgaagtgcttcccattgctgcaggtgaagaagaacgctgaagccgaggccaaaagagcatgtgagtggcttcaagcaacaggattccctcagtatgtgcagctttttgaaggaggctgatgaccttgaataattgtgcctcgatgaaactggaggttcattttcaaagcaagcagaatgaagactcagaagaggaagagcagtgtaccatcagtagccactgggccttccagcaggaaagtaagtgctggtctcctatggggtcctctgatctgttggccccaccgagccctggcctgccagcgacctcaagctgtgagagcgtcctcaccgagcttagtgccacctctctgccagtcatcaccgtgagcctaccacccgagccagcagacttgcccttgccaggccgtgcccccagctcgagtgaccggcccctcctcagccccacccagggccaggagggtccccaggacaaagccaagaagcgccatcgtaaccgtagcttcctcaagcaccttgaatctctgaggcggaaggaaaagagtggcagccagcaagcagagcccaagcatagtccagccacctcagagaaggtctccaaagcctcatctttccgcagttgtcgtggcttcctctcagctggattttacagggccaagaactgggccgccacctcagccggtggcagtggtgccaatactcggaaggcctgggaggcctggcctgtggcctcgttccggcatcctcagtggacacaccggggtgattgcctggtgcacgttcctggggaccacaaaccaggcacattccctcgctccctgtccattgagagcctgtgtcctgaggatggacaccgcctggcagactggcagccaggtaggcggtggggctgtgaggggcgccggggctcctgtggctcaacgggcagccatgccagcacgtatgacaacttgcctgagctgtacccagctgagcctgtaatggttggggctgaggctgaagatgaagatgatgaggagagtgggggcagctatgctcacctagacgacatcctccagcacgtgtgggggctacagcaacgagtagagctgtggtctcgggccatgtacccagacctggggcctggagatgaggaagaggaggaggccacttcatcagtagaaatagccacagttgaggtcaaatgccaagctgaggctctcagccagatggaggttccggcccatggagagtccccagcctgggcccaggctgaagtccagccagcagtcctggctccggctcaggctccagctgaggctgaaccagtggcacaggaagaggctgaggccccggccccagccccggccccggccccagcccaggacagtgagcaggaggcacattcaggcggggaacccacctttgcctctagcctgtctgtggaagaaggacactccatttctgacactgtggcctcctccagcgaacttgacagtagtgggaactccatgaatgaggctgaggctgcggggcccctggctggactccaggcatcaatgccccgtgaacggcgcgattcaggtgttggggcctcacttaccagaccctgcaggaagctccgttggcatagcttccagaactcccatcgtcccagcctcaactcagagtcgctggagatcaaccggcagtttgcaggccagatcaacctcctgcacaagggctcactgctgcggcttaccgcgttcatggagaagtacactgtgccccacaagcagggctgggtctggtcaatgcccaagttcatgaggaggaacaagaccccagattaccggggacagcacgtatttggggtgccacccctcatccacgtgcagcgcacgggccagccactgccacagagcattcagcaagccatgcgctacttgcgcagccagtgcctggaccaagtaggcatcttccgcaagtctggggtcaagtccaggatccagaacctgcgtcaaatgaatgagacctcgcctgacaatgtctgctacgagggccagtcagcctacgacgtggctgacctgctaaagcagtatttccgggacctgcctgagcccatcttcaccagcaagctcaccaccactttcctccagatctaccagctcctccccaaggatcagtggttggcagcagcacaagccgccaccttgctgctccccgatgagaaccgagaggtgctacagaccctgctctacttcttaagtgacattgcctctgccgaggaaaaccagatgacagcaggcaacctggcagtgtgcctggcgccctccatcttccacctcaatgtctctaagaaggatagcccctctcccaggatcaagagcaaacgcagcctcattggcaggccaggccctagggacctgagtgacaacatggcagccacccagggcctgtcgcacatgatcagtgactgcaagaaacttttccaggtgccccaggacatggtgctgcagctgtgcagctcctacagcgcagctgagctcagccctcccggcccagccctggctgagctgcgtcaggcccaagctgcaggggtaagcctgagcctctacatggaagagaatatccaggacctgctgcgtgatgctgctgagcgcttcaagggctggatgagcgtgccagggccccagcacacggagctggcttgcaggaaggcaccggatgggcaccccctgcggctatggaaggcatccacagaggtggcagcccccccagctgtggtgctgcatcgtgttctccgggagcgggccctctgggatgaggatctgctgcgggcccaggtgctggaagccctgatgccgggtgtggagctgtaccactatgtcaccgacagcatggcaccccatccctgccgcgactttgtggtgcttcggatgtggcgctctgacctgcctcgtgggggttgcctgcttgtctcccagtccctggatccggaacaacctgtgccagagtcgggtgtgcgagccctcatgctcacatcccagtacctcatggagccttgcggcttgggccgctctcggctcacacacatctgccgggctgacctcaggggccgttctcctgactggtacaacaaagtctttggacacctgtgtgccatggaagtggcaaagatccgggactccttccccaccctgcaggcagcgggccctgagacaaagctgtgagccttgggctggtcccagggtggcaccacccaggccccctgggcaccaagggagcgagggggaataagagcagggcagccccctgggtgccgctgtcaggagcagagccaggcccaggtggctccagctgcctgtcctgtcccctttcctaaagctcctctgcacatagaggggagaaaaagagaatttaggcaactccactcccccttcacccccaaccctgtattctactctcccgaaaagagaagagaatcgcatgagtagcaagactgctgccaccagccacctgcttgtgaggccgccacttggcatgaagcctccacagctccccgcctgcaggggcaaagaggtcgacagcaatgtgtgatcccagctctctgccagactgagagggcaagccgtcttgtttgctgcaaggatgcttttgaggttggacaggaggttctggtcctgcctttggggccaacgctggctctgaagtgtctttttcagaggaattggactggagtgaatgggcacaggggtggagcgcagggcagccccagtcaccacgagctgtttcatttgtgtaaatacgatgctgaattttatgaggctgagttaagagtgggcactgacgggcccctaatatgtgacatgacgatttggcatagatagggatgtgagagtggagtaccttcctttctcaagtctcgagatgccagtgaaaccagtattccctgacttgggtttcacactttatcgaccaccccatggggtcctgtgtagcctttggccacgcactgacactgcccaggccaagcaaaagcagagtgtggttaagagacaagggtctatgtcatcatcccttttgcttatggtagtgggctaacataacagcccctttctcaagcagagacctggcccctgggccagccagatggaagggcctatcttagccagctggagcttaagccaaacctgttctgtcccactggccagccatctttgctcacatggaaattcaaatgccattcaaaggccactggtgctttatttttctatctgctgagtaaactgaaatgagatgggtcccaaccaccactgtaattttcaagcctattttatttgtacctgtaaatactgtacagctaatatatatatatatatatatatatgtgtgtgtgtgtgtgtgtgtatatgtgtttatagagatacacacacatatatatgtgtgtatatatatacacatacatatatatacacacacgcatttgcacagacacacacatatatcaattctcatgagtgtattataatctctggtgggggcaagtgtctggaaggcctgaggggcacttcagatgagaatggagaggtagggagccaggtgcagcaggatccctcaaatcaataaagcattaccagagatgcactttaa

SEQ ID NO: 53916 - protein, 646 aa, Artificial Sequence
  derived and/or modified sequence
MAEKALEAVGCGLGPGAVAMAVTLEDGAEPPVLTTHLKKVENHITEAQRFSHLPKRSAVDIEFVELSYSVREGPCWRKRGYKTLLKCLSGKFCRRELIGIMGPSGAGKSTFMNILAGYRESGMKGQILVNGRPRELRTFRKMSCYIMQDDMLLPHLTVLEAMMVSANLKLSEKQEVKKELVTEILTALGLMSCSHTRTALLSGGQRKRLAIALELVNNPPVMFFDEPTSGLDSASCFQVVSLMKSLAQGGRTIICTIHQPSAKLFEMFDKLYILSQGQCIFKGVVTNLIPYLKGLGLHCPTYHNPADFIIEVASGEYGDLNPMLFRAVQNGLCAMAEKKSSPEKNEVPAPCPPCPPEVDPIESHTFATSTLTQFCILFKRTFLSILRDTVLTHLRFMSHVVIGVLIGLLYLHIGDDASKVFNNTGCLFFSMLFLMFAALMPTVLTFPLEMAVFMREHLNYWYSLKAYYLAKTMADVPFQVVCPVVYCSIVYWMTGQPAETSRFLLFSALATATALVAQSLGLLIGAASNSLQVATFVGPVTAIPVLLFSGFFVSFKTIPTYLQWSSYLSYVRYGFEGVILTIYGMERGDLTCLEERCPFREPQSILRALDVEDAKLYMDFLVLGIFFLALRLLAYLVLRYRVKSER

SEQ ID NO: 53917 - DNA, 1941 bp, Artificial Sequence
  derived and/or modified sequence
atggccgagaaagccctcgaagccgtaggctgtggactggggcctggagccgtcgcaatggccgttactttggaagatggcgcggaacctccagtgctgaccacacacctgaagaaggtggaaaatcatatcacagaggcccaaaggtttagtcacctccctaaaaggtccgctgtggacatcgaatttgtggagctgtcttactcggtccgcgagggtccttgttggaggaagcggggatataaaaccctgttgaaatgtctgtcaggcaagttttgtagacgcgaactgatcggcatcatggggccctccggcgccggtaaatctacattcatgaatattctcgcagggtatcgggagtcagggatgaaaggacaaattcttgtcaatggacgcccccgcgagctgcggactttcaggaagatgagctgctatatcatgcaagacgacatgctcctgccacacctcactgttctggaggccatgatggtctccgccaatctcaaactttctgaaaagcaggaagtaaaaaaggaactggtgaccgaaatcctcacagccctgggcctgatgtcctgttcccataccagaaccgctctgctttccggtggccagcgcaaacggctggctatcgcgttggagttagtgaataatccacccgtgatgttttttgacgaaccaacctccggactggatagcgcttcctgctttcaggttgtgagcctgatgaaatctctggcccaaggcggtagaactatcatctgtaccatacaccaaccctccgctaaactttttgagatgttcgataaactgtatattttatcacaagggcaatgtatcttcaaaggtgtggtcacaaatctgatcccttatctgaaagggttgggtctgcattgcccaacttatcacaaccccgctgactttatcattgaagtagcctccggagagtacggcgacctcaatcccatgctgtttagggccgtccagaacggcctctgtgctatggccgaaaaaaaaagttctcccgagaaaaacgaggtgcctgcaccctgtccaccctgcccgccagaggttgacccgattgagagtcacacctttgctacaagcacgcttacccagttctgcattctgtttaaacgtacatttctgtcaatcttaagagatacagttctgacacatttacgattcatgtcccacgtggtcatcggcgttcttatcggactcctgtaccttcacatcggggacgatgccagcaaggtgtttaacaacactggctgtctcttcttttcaatgctgttcctgatgtttgccgccttgatgcccacggtgctgacatttcctttagagatggctgtatttatgagggagcacctcaactactggtatagcctcaaagcctactatctggccaagaccatggccgatgtgccatttcaagtggtgtgcccggttgtgtattgcagcatcgtgtactggatgaccgggcagccagctgagaccagtcgcttcctcctcttctccgccctggctacagccactgcccttgtcgcccagtcactgggtctcctgatcggcgcggcctccaacagccttcaagtggccacattcgttggcccggtcacggcaatcccggtgttgctctttagtggcttttttgtctcttttaaaaccatccccacttatctgcagtggtccagctacctcagctatgtgagatacggctttgagggggtgattctgaccatatatggtatggagagaggcgatttgacgtgcctcgaggagcggtgtcccttccgggaaccccagtcaatcctccgagcactggacgtggaagatgcaaagctttatatggattttcttgtgctgggcattttcttccttgccttacgactgttggcatacttggtgctgcggtaccgagttaagagcgagcgctag

SEQ ID NO: 53918 - DNA, 1941 bp, Artificial Sequence
  derived and/or modified sequence
atggccgaaaaggccctggaggctgtgggctgcggcttggggcctggggccgtggccatggccgtaacattggaggatggcgccgagcctcctgttctaacgacgcacttgaagaaagttgagaaccatatcaccgaagctcagcgtttcagccatctccccaagcgaagcgctgtggacatagagttcgtggagctttcctatagcgtcagggaaggaccttgctggaggaagaggggatacaagacactgctcaaatgtctctctggcaagttttgtcggcgggaattgattggaatcatggggcccagcggcgccggtaaaagcaccttcatgaatatcctcgctggctaccgcgagtccggcatgaaagggcagatcttggttaacgggcgaccccgtgaacttcgtacattccgaaaaatgagttgctacatcatgcaggatgacatgcttttgccccacctgactgtcttagaagcgatgatggtttctgccaacctcaagctgtcagagaaacaagaggtcaaaaaagagctggtaacagagattctcactgccttaggcctcatgtcatgttcacacactcgaactgcactactctccggtggccagagaaaacgcctggcaatagccttggaattggtcaacaatccaccagtgatgttcttcgatgaacccacttctggattggattccgccagctgttttcaggttgtttctctcatgaaaagccttgctcagggtggccgaacaattatttgcactatacaccaaccctcagcgaagctgttcgagatgtttgacaagctgtacatcttgtcccaaggacaatgtatctttaaaggtgtcgtcactaaccttataccttacttaaagggcttggggctgcactgtcccacataccataatcctgctgattttataatagaagtggctagtggtgaatatggagaccttaatcccatgctgtttcgggctgttcagaacgggctgtgtgctatggcggagaagaagtcttcccctgaaaagaatgaagtgcccgcaccttgtcctccctgcccccccgaagtggatcccatcgagagccacacatttgccacctccactctgactcagttttgtatacttttcaaacggaccttcctatctatcctcagggacactgtacttacacacctcagatttatgtcacacgtcgtcatcggggtgctcatcggattactgtatttgcacataggtgacgacgcctcaaaagtctttaacaacaccggctgcttattcttctccatgctgtttctcatgtttgccgcactgatgccaacagttttaacattcccacttgaaatggcagtgttcatgagagagcatttgaactattggtatagtttgaaggcctactatctggccaaaactatggctgacgtcccatttcaggtggtctgtccagtggtgtactgtagcatcgtgtattggatgacaggccagccggccgagacctcacgatttctgctgttcagtgctctagctacagcaacagctctggtggcacaatcactggggctccttatcggagccgctagcaactcattacaggtagccacatttgtgggccccgtcaccgccatcccggtgttactgttctctggcttctttgtgagttttaaaactatccccacctatctgcaatggagtagctacctttcatatgtgcgatatggtttcgaaggggtcattcttaccatctatgggatggaaagaggggacttaacctgtcttgaggagcgatgccccttccgcgagccccagtccattctccgtgcactggacgtcgaggatgcgaagctgtatatggatttcctggtgctcggcatttttttcctggctctgcggctgctggcatatctggtcctccgttaccgcgttaaatccgaacgatag

SEQ ID NO: 53919 - DNA, 1941 bp, Artificial Sequence
  derived and/or modified sequence
atggcagaaaaagcactggaggcagtgggatgtggactaggtccaggcgctgtcgccatggctgtcacactcgaagatggagcggaacctcccgtgctaaccacacacctcaaaaaagtggaaaaccacattaccgaagcgcagagattcagtcacttacccaaacgatcggccgtggatattgaattcgtggagcttagttactctgttagagaggggccttgttggcgaaaaaggggatacaagactttactgaaatgtctttctggcaaattttgtcggagagaactcatcggcataatgggccctagtggtgccggcaagtccaccttcatgaatattctggcaggttatcgagagtctggaatgaaggggcagatcctcgtgaacggcaggcctcgtgaactgcgaacttttcggaagatgtcttgttatattatgcaggacgatatgttgctccctcacctgacggttttagaggcaatgatggtgtcggccaacctcaaactgtctgagaaacaggaagtaaaaaaagaactcgtgactgaaatactgacggcactgggtctgatgagttgtagccacactcggacggcgcttttgtccggaggccaacggaaaaggcttgccattgctctggaacttgtcaataacccccctgtcatgttcttcgatgaaccgacctccggccttgattcagcgagctgctttcaggtggtgtcgttaatgaaatccctggctcaaggtggcaggacaattatttgtacaattcaccagccttctgctaaattgttcgagatgtttgacaagttgtatatactgagtcagggacaatgcatcttcaaaggtgtggtgacaaacctgatcccttatcttaaggggctcggactccactgcccaacataccacaaccccgctgattttatcattgaggttgctagtggcgagtacggcgatctcaatcccatgctgtttcgcgctgtgcagaatgggctgtgtgccatggcagagaagaaatccagccccgaaaaaaacgaagtccccgccccttgccccccatgtccacctgaagtcgatcctattgaatctcacacttttgccacctccaccctgacacagttctgtattcttttcaagaggaccttcctgagcatactcagagacacagtgctcacgcatttgcgattcatgtctcacgttgtgattggcgttctgatcgggctcttgtacttgcatattggagacgatgcctctaaagtgtttaacaacaccggctgcctgttcttctccatgttgttccttatgttcgccgccttaatgcccacagtgttgacattccccttggagatggctgtcttcatgcgggagcacctgaattattggtatagcctcaaggcttattacctggctaaaacaatggccgatgtcccatttcaggtggtgtgtcctgttgtgtattgttctatagtctactggatgacgggccagcccgcggagacctctcgcttcctgctgttcagcgccctggctacagccactgcactggtcgcccaatccctcggactattgatcggtgccgctagcaacagcctccaggtcgctacattcgtcggccctgtcacggcaattcccgttctgctgttctctggattcttcgtgtcgttcaagaccattcccacttacctgcagtggtcaagctatctgtcttatgttcgttacggcttcgagggcgtcattctgacgatttatggaatggaacgcggcgatctgacatgtctagaggagaggtgtccgttcagggaacctcagtccatcctccgcgctctggatgtcgaagacgctaagctctacatggacttcctggtgctgggcatcttctttttggcattaagacttctggcatatctagtgttgagatatagggtgaaaagcgagagatag

SEQ ID NO: 53920 - DNA, 1941 bp, Artificial Sequence
  derived and/or modified sequence
atggccgagaaggccctggaggccgtgggctgcggcctgggccctggagctgtggccatggctgtgaccctggaggatggagctgagccccctgtgctgaccacccacctgaagaaggtggagaaccacatcacagaggcccagcgcttcagccacctgcccaagaggtctgctgtggacattgaatttgtggagctgagctacagcgtgcgggagggcccctgctggaggaagaggggctacaagaccctgctgaagtgcctgagcggcaagttctgccggcgggagctgattggcatcatgggccccagcggggccggcaagagcaccttcatgaacatcctggccggctaccgggagagcggcatgaagggccagatcctggtgaatggccggccccgggagctgcggaccttcaggaagatgagctgctacatcatgcaggatgacatgctgctgccccacctgactgtgctggaggccatgatggtgtctgccaacctgaagctgtctgagaagcaggaggtgaagaaggagctggtgacagagatcctgacagccctgggcctgatgagctgcagccacaccaggacagccctgctgagcggcggccagaggaagaggctggccatcgccctggagctggtgaacaacccccctgtgatgttctttgatgagcccaccagcggcctggacagcgccagctgcttccaggtggtgtccctgatgaagagcctggcccagggcggccgcaccatcatctgcaccatccaccagcccagcgccaagctgtttgagatgtttgacaagctgtacatcctgagccagggccagtgcatcttcaagggcgtggtgaccaacctgatcccctacctgaagggcctgggcctgcactgccccacctaccacaacccagctgacttcatcatcgaggtggccagcggggagtatggagacctgaaccccatgctgttccgggctgtgcagaatggcctgtgtgccatggccgagaagaagagcagccctgagaagaatgaggtgcctgccccctgccccccctgccccccagaggtggaccccatcgagagccacacctttgccaccagcaccctgacccagttctgcatcctcttcaagaggaccttcctgagcatcctgcgggacacagtgctgacccacctgcgcttcatgagccacgtggtgattggagtgctgattggcctgctgtacctgcacatcggagatgatgccagcaaggtgttcaacaacacaggctgcctcttcttctccatgctgttcctgatgtttgctgccctgatgcccaccgtgctgaccttccccctggagatggctgtgttcatgagggagcacctgaactactggtacagcctgaaggcctactacctggccaagaccatggctgatgtgcccttccaggtggtgtgccctgtggtgtactgcagcatcgtgtactggatgacaggccagcctgctgagaccagccgcttcctgctcttcagcgccctggccacagccacagccctggtggcccagagcctgggcctgctgattggagctgccagcaacagcctgcaggtggccacctttgtgggccctgtgacagccatccctgtgctgctcttcagcggcttctttgtgtccttcaagaccatccccacctacctgcagtggagcagctacctgtcctatgtgcgctatggctttgaaggagtcatcctgaccatctacggcatggagcggggggacctgacctgcctggaggagcgctgccccttccgggagccccagagcatcctgcgggccctggatgtggaggatgccaagctgtacatggacttcctggtgctgggcatcttcttcctggccctgcggctgctggcctacctggtgctgcgctacagagtgaagtctgagaggtag

SEQ ID NO: 53921 - DNA, 1941 bp, Artificial Sequence
  derived and/or modified sequence
atggccgagaaggccctggaggccgtgggctgcggcctgggccccggggccgtggccatggcagtgacactggaggatggtgcagagccgcccgtgttgacgacccacctcaagaaggtggaaaatcacattactgaggcccagagattcagccatttaccaaagcggagcgccgtcgacatcgagtttgtggagctctcttattctgtaagagaaggcccttgttggcggaagcgcggctataaaaccctgctcaagtgcctttctggaaagttttgcaggcgggaattaataggcatcatgggaccctctggggcagggaagtccaccttcatgaacatcctggcaggatacagggaatccgggatgaagggccagatcctagtaaacggaagacctcgagagctccgcaccttcaggaagatgtcatgttacatcatgcaggatgatatgctgctgcctcacctgactgtcttggaggccatgatggtgtcagccaaccttaagctgagcgagaagcaggaggtgaaaaaagagctggtgaccgagatcctcacagctctcggactcatgagctgtagccacacgaggacagcgcttttgagcggagggcagcgcaagaggctggccattgccttggaattagtgaacaacccacctgtcatgttcttcgacgagccaacgagcggcctcgacagtgcaagttgcttccaagttgtcagcctgatgaaaagtctcgcgcaaggcggcagaaccatcatttgcaccatccaccagccctccgccaagttgtttgaaatgtttgataagctgtatatcctgtcccagggacagtgtatatttaagggagtcgtcactaatctgattccctacttaaaggggctggggttgcattgcccaacttatcacaaccccgcggatttcattattgaggtggctagcggggagtatggagacctgaatccaatgttgttcagagccgtgcagaacgggctgtgcgcgatggctgagaagaagtcgtcacctgaaaagaacgaagtccctgcaccatgtccaccctgccctccggaagtggatcctatcgaatcacacacattcgcaacgtccacactaacccaattttgtatcctgtttaagcgcacgttcctctctatcctgcgggacacagtgctgacgcatctgaggtttatgagtcatgtcgtgattggcgtcctgattgggctattgtacctgcacatcggcgatgacgccagtaaggtcttcaacaataccggatgcctctttttcagtatgctttttcttatgtttgcagcattaatgccaacggtgctgacgttccccctggaaatggctgtttttatgcgggaacacctgaactactggtacagtctcaaagcatactacctcgcgaagacaatggctgacgtgccttttcaggtagtctgccccgttgtgtactgtagcatcgtgtactggatgacaggccaacccgcggagacttcccgttttctgctcttttcagctctggccaccgcgactgcactagttgctcaatctctggggctccttatcggggccgcctccaactctctccaagttgcgaccttcgtgggccccgtcacggctatcccagttctgctgttcagcggcttttttgtgtcattcaagaccatacccacttatcttcagtggagtagttatctctcatatgtgagatacggattcgagggagtgatcttaacaatctacggcatggaaagaggggaccttacgtgtttagaggagaggtgccccttcagggagccccagagtatccttagggcgctggatgtggaggatgccaagctctatatggacttcttagttctcgggatcttttttttggctcttagactgctagcctacctcgttctgcggtaccgtgtgaagtctgaaaggtag

SEQ ID NO: 53922 - DNA, 1941 bp, Artificial Sequence
  derived and/or modified sequence
atggccgagaaggccctggaggccgtgggctgcggcctgggccccggcgcagtggcgatggctgtcactttggaggacggcgcagagcctcctgttttaactacccatctgaaaaaggttgagaatcacattaccgaggcccaacgcttctcccatttgccaaaacgctctgccgttgatattgagttcgtagaactgtcctatagcgtgcgtgaaggcccctgttggaggaaacggggctacaaaactctgttaaagtgcctatccggaaagttttgtaggagagagcttataggaattatgggccccagtggggccggaaagtccacctttatgaatattctggctggctacagagagagcggaatgaagggccaaattctggtgaatggtagaccaagggagctgagaacctttcgcaagatgagctgctacataatgcaggatgacatgctgctgccacacctgacggtgctggaggcaatgatggtatctgccaatctgaagctcagtgaaaagcaagaggtgaagaaagaactggttaccgagattctcaccgctttgggtctcatgtcttgcagccacacccgcacagcgctactgtcaggggggcagcggaaaaggctcgccattgccctggagctggtcaacaatcccccagtaatgtttttcgatgaacccacatctggactagattccgcgtcttgtttccaggtcgtgagtcttatgaaaagccttgcccagggcggcaggacaattatttgcactattcaccagccgtcggcgaagttattcgaaatgttcgacaagttatacattctctcgcagggccagtgtattttcaagggagtggtgaccaacctgatcccctatttgaaaggactgggattgcactgtcccacttatcacaacccagctgactttatcatcgaagtggcatccggggagtacggggatctgaaccctatgctattccgagccgtccagaacgggctgtgtgccatggccgagaagaaaagcagcccagaaaagaatgaagtcccagctccttgtcctccttgtccccctgaggtagatcccatagagtcacacacgtttgcaactagcaccttaacgcagttttgtatactgtttaagagaaccttcctgtcaattctgcgcgacacagtactgacacacctgcggtttatgagccacgtggtaattggggtcctgattggcctcctatacctgcatatcggcgacgatgcttctaaggtattcaacaacacgggctgcctcttctttagtatgttgttccttatgtttgccgcattgatgcccaccgtgctgacattcccacttgagatggcagttttcatgcgagagcacctcaactactggtacagcttgaaggcctactatctggcaaaaactatggctgatgtaccttttcaagtggtctgcccagtcgtctattgctcaatcgtatactggatgaccggacagcccgcggagacatcccggttcttacttttttctgctctggccactgccacagcactggtggcacaatctttgggcctgttgataggcgctgcctctaacagcctccaggtcgccacattcgtggggcctgtgacagctattccagtcttactgtttagcggattttttgtgagtttcaagacaatccctacatacctgcagtggtcatcctacctgagctacgtcaggtacgggtttgagggcgtgattctaaccatttatggaatggagaggggcgaccttacatgcctggaagagcggtgcccgttccgcgaaccacagagcattttacgcgccctcgatgtggaggacgcaaaactgtacatggatttcttggtcctgggtatcttctttctggccttacgcctgttggcctacctcgtgctgaggtatcgtgtaaaaagcgagcgatag

SEQ ID NO: 53923 - DNA, 1941 bp, Artificial Sequence
  derived and/or modified sequence
atggccgagaaggccctggaggccgtgggctgcggcctgggccccggggctgtcgcaatggccgtcactttggaggacggagctgagccgcccgtgctcactacgcacctgaagaaagtggagaatcacataaccgaagctcagcgctttagccacttaccaaagcgtagtgccgtagacatcgagtttgtcgaactttcttatagtgtgagggagggaccctgctggcggaagagaggttataagacgcttttgaagtgcctctccgggaagttctgccgcagggagttaatcggtataatggggccatctggagcaggcaagtccacattcatgaatatcttagcgggttaccgtgaatcgggtatgaaaggccaaattctggttaacggccggccacgcgaactccgtacctttcggaaaatgagttgttatatcatgcaggatgacatgttgttgcctcatctgacagttttagaggctatgatggtctctgcaaacctcaagctcagtgaaaagcaagaggtaaaaaaggagttggtaaccgaaatcctcaccgctctgggactaatgtcctgctcccacacgcgcaccgctcttctgtctggcggccagcggaagagactggccatcgctttggagttagtcaacaatccccctgttatgttttttgacgagccgacatcgggcctcgactctgcctcttgttttcaagtggtaagtctgatgaagtcccttgcacaagggggcaggacaattatttgtactatccatcagccaagcgctaagttgtttgaaatgttcgataagttgtacatccttagccagggccagtgcatcttcaaaggggtagtgaccaacttaattccctaccttaaagggctgggactccattgtcctacttaccacaatcccgccgactttattatcgaggtggccagcggcgagtatggtgatttgaaccctatgctctttcgcgctgtacagaatggactctgcgcgatggccgaaaaaaagtctagtcccgagaaaaacgaggtacctgcaccctgtccaccctgtcccccagaagtggatcccatagagtcacataccttcgccaccagcaccttgactcagttctgcattctgtttaagagaaccttcctgtccatcttgagggatacggttttgacacacctacgattcatgtcccacgttgtaatcggagtgctcataggccttctgtacctgcacattggagatgatgcttctaaggtgtttaacaatactgggtgtctattcttcagcatgttgttcctgatgttcgctgcccttatgcccaccgtgcttacattccccctggagatggccgtgttcatgagagagcacctcaactactggtacagcctgaaagcatactatttggccaagaccatggctgacgttcctttccaagttgtatgccccgtggtgtactgtagtatcgtgtattggatgaccggccagcccgcagaaacatcaaggtttctgctgttttccgctctcgcaaccgccacagctctggttgcccagtctctggggttactgatcggagccgctagcaattcactgcaagtcgcaactttcgtaggtcccgtcaccgccattcccgtgttgctgttctcaggtttcttcgtctcttttaagaccattccgacctatctccaatggagttcatacttaagctatgtacggtatggcttcgaaggcgtcattctgaccatctacggaatggaacgcggagacttgacatgcctggaagagagatgtcctttccgagaaccccagtccatcctgcgggccctcgatgtggaagatgctaagctgtacatggacttcttggttctgggtatcttctttcttgcgctgaggctactggcttatcttgttctaagatacagagtgaagtccgagcggtag

SEQ ID NO: 53924 - DNA, 1941 bp, Artificial Sequence
  derived and/or modified sequence
atggccgagaaggccctagaggctgtcgggtgtggtctgggcccaggggctgtagctatggctgtgacgttggaagatggagccgaacctcctgtactgacgacacacttaaaaaaggtcgagaaccacatcaccgaggcccagagattcagtcatcttcccaagaggtctgccgtggatatagagttcgtggagcttagctacagcgtgagagagggcccttgttggcgaaaaaggggttacaaaacgctgctgaaatgtttaagcgggaaattctgtagacgagagctcatcggaattatggggcctagcggagccggaaaaagcacatttatgaacattctcgctggctaccgcgaatctggcatgaaagggcagatcctcgtgaatggaagaccaagagagctgaggaccttcagaaagatgtcatgctatattatgcaggacgacatgctcctcccccacctgacagtgttggaggccatgatggtgtctgccaatcttaagctgtccgagaagcaggaagtgaagaaggaactcgttacagagatcctgactgccttggggctcatgagctgcagtcatacgagaactgccctactgtcagggggtcagaggaagcggttggccatcgctttagaactggtgaataatccccctgttatgttcttcgatgagcctacatcaggcttggactccgcttcttgcttccaagtggtcagtctaatgaaatctctggctcagggaggtagaaccatcatctgcaccatccatcagccgtctgctaagctgtttgagatgtttgacaagctgtacattctttcccaaggacagtgtattttcaaaggagttgtgactaacctgattccttatttgaaagggttgggcctgcactgcccaacttatcacaacccagccgacttcatcatcgaggtagcctcaggagagtatggagacctaaaccccatgctgtttagggccgttcaaaacggtctgtgcgccatggcagaaaagaagtccagccccgagaaaaacgaagtgccagctccctgtcctccgtgtcccccagaagtcgatcccatcgagtctcatacatttgccacaagcaccctgacacagttctgtatcctgtttaagaggacctttctgagtatattgagagataccgttcttacacacttaagattcatgtcccacgttgtaattggggtgctcattggtctactgtatctgcatattggagatgacgcgagtaaggtgtttaataataccggctgtctcttcttttccatgctgtttttaatgtttgctgcactgatgccaacagttttgacatttccgttagagatggctgtctttatgagagagcacttaaattattggtatagtttgaaagcatactatctggctaagaccatggctgatgtgccttttcaggtggtgtgccccgttgtgtactgctctatagtgtattggatgactgggcagcctgctgaaactagtaggtttctgctcttctcagcactcgctaccgctactgcacttgtggcccagtccctgggactcctgattggcgctgcttctaattccttacaggtcgctaccttcgtaggacctgtcaccgctatccctgtcctgttattctccggttttttcgtcagcttcaagaccataccaacttatctccaatggagtagttatctgtcttatgtccgctacggctttgagggcgtcattctcacaatctatgggatggaacgtggggacctgacttgcctggaagagaggtgtcctttcagggaaccccagagcattctgagggccctcgacgtggaagatgcgaagctctatatggatttcctggtgctgggcattttctttttagccctgaggttgttggcttatctcgtgctgagatatcgtgtgaaatcagaacgctag

SEQ ID NO: 53925 - DNA, 1941 bp, Artificial Sequence
  derived and/or modified sequence
atggccgaaaaggccctggaagctgtggggtgcggactagggcctggcgcagttgcaatggcagtcaccctcgaggatggcgctgagcctccagtactgacaactcatctgaagaaggtggaaaaccacatcactgaagctcagagattttcacacttgcccaaacgaagcgctgtagacatcgagtttgttgaattaagctattcggtcagagaaggcccttgctggagaaaaagaggatacaagaccctattgaagtgtctgagtggcaagttttgcaggcgggaacttattggaataatgggcccttcgggtgcaggaaagagtacctttatgaacatattagctggataccgggaaagcgggatgaagggccagatcctcgtaaatgggcgaccccgtgagctgagaacctttagaaaaatgtcctgctacatcatgcaagacgatatgcttctgccacatctgactgtgctcgaagccatgatggtatctgccaatctgaagctcagcgagaagcaggaggtgaagaaagaactggttacagagatccttaccgctctaggcctcatgagctgttctcacacaagaaccgccctgctctccggaggtcagagaaaacgcctcgctatcgccctcgaattagtgaataatcctcctgtcatgttctttgacgaacctacctcaggcctggacagcgcctcctgcttccaggttgtctcactcatgaaatccctggcccaggggggacggaccatcatctgtacgatccaccagccatcagcaaaactgttcgagatgtttgacaaactgtacattctcagtcaggggcagtgtatcttcaaaggggtcgttacaaatctgattccgtatcttaaagggctcggcctccattgtcctacttatcacaatccagctgattttatcatagaagtcgctagcggagagtacggagatctcaatcccatgctgttcagagccgtccaaaacggcctatgcgccatggccgaaaagaagagcagtccggagaaaaatgaagtgcccgctccttgccccccatgccctcctgaggtcgatcctatagagtcgcatacttttgctacctccacactcacccagttttgtatcctgttcaagcggacctttctgagcatattgcgggacacagtactcacccatctgcgatttatgtcccacgtcgttattggagtcttaattggacttctgtacctgcacataggcgatgacgcaagcaaggtttttaataacaccgggtgcctgttcttctccatgctgttcctcatgttcgcagctctgatgcccaccgtgctgacctttcctctggaaatggcagtctttatgcgagagcacctgaactactggtattctttaaaggcctattacttagccaagaccatggcagacgtgccttttcaagtggtctgtccagtggtctattgttcaatcgtgtattggatgaccggacaacctgccgagacaagcaggtttctgctgtttagcgctctcgcaaccgctactgctctcgtggctcaaagcttgggcctgcttatcggggctgccagcaacagtctgcaagtagcaaccttcgttggtcccgtaacagccattccagtcctcctttttagcggtttcttcgttagtttcaaaacgatccctacttatttacagtggagcagctacctgtcatatgtgaggtatgggttcgagggggttatcctcacgatttacggtatggagcgtggtgacttgacatgtcttgaagagcgttgtcccttccgtgaaccacaaagcatactgcgcgcacttgacgtggaagacgccaagctctatatggacttccttgtgctgggcatattttttctcgcactgagattgctcgcttacctggtgctccgttatcgcgtgaagtccgaaagatag

SEQ ID NO: 53926 - DNA, 1941 bp, Artificial Sequence
  derived and/or modified sequence
atggccgagaaagccctcgaggctgtggggtgcggcttagggcctggagctgtggccatggccgtcaccctagaggacggagcggagcccccagtgctgacaacccacctaaagaaggtcgagaatcacataacagaggcccagcggttctctcatctgccaaagcggagtgctgtggacattgagtttgtggagctgagctactctgtacgggagggaccgtgttggaggaaacggggttataaaacactgctgaagtgtttgagtggaaaattttgccgcagagagctgattggaattatgggcccttctggggcaggaaagtccaccttcatgaatatattggcgggatatagagaatccggcatgaaagggcaaatcctagtcaacggcagaccgagagagcttcgtacctttaggaagatgtcatgttatattatgcaggacgatatgctcctgccacatctgacagtattggaggccatgatggtgtccgctaatctgaagctatcagagaaacaagaggtcaaaaaggagcttgtaactgagatcttgaccgcgctcggtctgatgagctgttctcatactcgaactgccttactttccggtggtcagagaaaaagactagcgatcgccttggagctggtcaacaaccctcctgtgatgttcttcgatgaaccaaccagcggcctggacagtgcgtcttgctttcaggttgtctctctgatgaagtctttagcccaggggggacgcactatcatatgtaccatacaccagccaagcgccaagctgttcgaaatgtttgataagctgtacatcctcagccaaggccagtgcatctttaagggcgtggtaacaaacctcattccatacttgaagggactgggtttacactgtccaacttatcacaatcctgccgacttcatcattgaggtcgcctccggcgagtatggagacctgaaccccatgctctttcgagccgtacagaacggcctctgtgctatggcagaaaagaagagttcccctgagaaaaacgaagtccccgctccttgccctccttgccctccagaggttgatcctattgagtcccacacgttcgccacctcgaccctgacacagttctgtatcctgtttaaaagaacctttttaagcatcctgagagacaccgtgctgacccatctgcggtttatgtctcacgtagtgatcggagtcctaattggacttttgtatctacacatcggagatgacgcttctaaggttttcaataacactggatgccttttcttttcaatgctttttctgatgttcgcggctttaatgccaaccgtcctcaccttccccctggagatggcggtttttatgcgcgagcacctgaattactggtatagcctaaaggcttactacctggctaaaaccatggcagacgtcccgttccaagtggtctgcccagtggtttactgcagtatcgtgtactggatgaccggccaacccgcagagacctctaggttcttactgttcagcgcccttgccactgctacagccttagtggcgcagagcctcggactgcttattggggcagctagtaacagtttacaggtagccacctttgtggggccagtgaccgccatccccgttttgcttttctctggattctttgtctcatttaaaacaatacccacatacttacagtggtcctcctaccttagctatgtccgatacggttttgagggtgtaatactgacaatatatgggatggagcgcggagacctaacgtgcctggaagaacgctgcccatttcgggagccacaatcaatcctgagggccctcgacgtcgaggacgccaagctctacatggatttcctcgtgctgggaatcttttttcttgcattgcgactgctggcatatcttgtgctgagatatagggtaaagagtgagaggtag

SEQ ID NO: 53927 - DNA, 3849 bp, Artificial Sequence
  derived and/or modified sequence
aagaacggcgggaccggcgagcagtagctggtaggagagcgcagtcgccccgcgggctcggaggacacagcgtccgggaccaggctctgggaagcgggtgtgcacagcccagcagagtcagggcgcgaccccaaccgcctctcaccatccttgccgtctcctccgagccgagggccggccctcctgcctcgcctgccccgccccggccccgccccggcccgggccgccgggaccgggagccgggacgcgggtgccgcagcccgaggcaggtaaggggagccccggctctccgtccccggtccgtggcagcgctgagcatcccggccccgcaccggcccgggggcgcgtcaaggtcggcggcgtgatggcggagaaggcgctggaggccgtgggctgtggactagggccgggggctgtggccatggccgtgacgctggaggacggggcggaaccccctgtgctgaccacgcacctgaagaaggtggagaaccacatcactgaagcccagcgcttctcccacctacccaagcgctcagccgtggacatcgagttcgtggagctgtcctattccgtgcgggaggggccctgctggcgcaaaaggggttataagacccttctcaagtgcctctcaggtaaattctgccgccgggagctgattggcatcatgggcccctcaggggctggcaagtctacattcatgaacatcttggcaggatacagggagtctggaatgaaggggcagatcctggttaatggaaggccacgggagctgaggaccttccgcaagatgtcctgctacatcatgcaagatgacatgctgctgccgcacctcacggtgttggaagccatgatggtctctgctaacctgaagctgagtgagaagcaggaggtgaagaaggagctggtgacagagatcctgacggcactgggcctgatgtcgtgctcccacacgaggacagccctgctctctggcgggcagaggaagcgtctggccatcgccctggagctggtcaacaacccgcctgtcatgttctttgatgagcccaccagtggtctggatagcgcctcttgtttccaagtggtgtccctcatgaagtccctggcacaggggggccgtaccatcatctgcaccatccaccagcccagtgccaagctctttgagatgtttgacaagctctacatcctgagccagggtcagtgcatcttcaaaggcgtggtcaccaacctgatcccctatctaaagggactcggcttgcattgccccacctaccacaacccggctgacttcatcatcgaggtggcctctggcgagtatggagacctgaaccccatgttgttcagggctgtgcagaatgggctgtgcgctatggctgagaagaagagcagccctgagaagaacgaggtccctgccccatgccctccttgtcctccggaagtggatcccattgaaagccacacctttgccaccagcaccctcacacagttctgcatcctcttcaagaggaccttcctgtccatcctcagggacacggtcctgacccacctacggttcatgtcccacgtggttattggcgtgctcatcggcctcctctacctgcatattggcgacgatgccagcaaggtcttcaacaacaccggctgcctcttcttctccatgctgttcctcatgttcgccgccctcatgccaactgtgctcaccttccccttagagatggcggtcttcatgagggagcacctcaactactggtacagcctcaaagcgtattacctggccaagaccatggctgacgtgccctttcaggtggtgtgtccggtggtctactgcagcattgtgtactggatgacgggccagcccgctgagaccagccgcttcctgctcttctcagccctggccaccgccaccgccttggtggcccaatctttggggctgctgatcggagctgcttccaactccctacaggtggccacttttgtgggcccagttaccgccatccctgtcctcttgttctccggcttctttgtcagcttcaagaccatccccacttacctgcaatggagctcctatctctcctatgtcaggtatggctttgagggtgtgatcctgacgatctatggcatggagcgaggagacctgacatgtttagaggaacgctgcccgttccgggagccacagagcatcctccgagcgctggatgtggaggatgccaagctctacatggacttcctggtcttgggcatcttcttcctagccctgcggctgctggcctaccttgtgctgcgttaccgggtcaagtcagagagatagaggcttgccccagcctgtaccccagccctgcagcaggaagcccccagtcccagccctttgggactgttttaaccttatagacttgggcactggttcctggcggggctatcctctcctcccttggctcctccacaggctggctgtcggactgcgctcccagcctgggctctgggagtgggggctccagccctccccactatgcccaggagtcttcccaagttgatgcggtttgtagcttcctccctactctctccaacacctgcatgcaaagactactgggaggctgctgcctccttcctgcccatggcaccctcctctgctgtctgcctgggagccctaggctctctagggccccacttacaactgaccaaagtggccccctctgggggtccccaccacacaagtgtttgtaaactgggctgctataaggttggagttccagggctgggccctggtggagtccactggaagtcccattatggatgttgaaatggacagggaaggactctggaagtctcttcctcctcctcctcttctctccacccctagaccctggctgacttggacaatctgccaggacagaagctgggttttctgtctaggtcaccactcccaatcctggggattggagaggcctggggctgtgggatgccccatccccctccccatcacctttggtgggggcagggcctggtggcacctgtgcaataatgtctgtgtttctctcccacctgccactggaactggagaatgcactttattctgggcggggggtgagtgggggaagacccaaccctcctttctcgctgcccctaacgcatgcacggtctcgtgatgctccctccctctccggagtgacaggcacatacatgagaacaggccatctcagccctacacacttgccatcccctacagcacagaggaagagtgatggtggcatgctggtggtggcgggtgctggtgggaggacagtgccaacctcctcctggggatcccatgttggagactctaaggataaggctggtgctgcccagggtgtctacaggaactgcaggtgtctacccccaagtcttccctcctcccaagccaggggtggcacagggcactagatccctggagttcaggaaccaacacaagcacaaccacgggcataagttggccttggccactgccacccacggccctccttttgtgctccatgctggcatcttcactcccctaccccttccccagccactgctgctcattcaaacttctgtccatgtccctccactgttcctatcagcaggtggcccctgggcatcagaacagcctgccctgggcaccaggtggcagacacactcagagcatgtctggctttcctggtgggtccaggctcattctgcttctgatttcccctcccccagggctcattttccccctttttcctgtacacatccctgtctacctcctctcaccctgccacagattcttcctatcacacagggatgccagttgtatttgtgggatttcacccattattaataaaacctatatttatacag

SEQ ID NO: 53928 - DNA, 2458 bp, Artificial Sequence
  derived and/or modified sequence
aagggatggggagtgggacgcagccggaggcctgaagcctcctcctctccgccttcccctggtccgccctgcactcaccctgctaccccgacctcctagagcgggcagcctctgccggctgcctcttctcccccgccccctattccttcagtccccaggggctgctggcctgcggggtcggcggcgtgatggcggagaaggcgctggaggccgtgggctgtggactagggccgggggctgtggccatggccgtgacgctggaggacggggcggaaccccctgtgctgaccacgcacctgaagaaggtggagaaccacatcactgaagcccagcgcttctcccacctacccaagcgctcagccgtggacatcgagttcgtggagctgtcctattccgtgcgggaggggccctgctggcgcaaaaggggttataagacccttctcaagtgcctctcaggtaaattctgccgccgggagctgattggcatcatgggcccctcaggggctggcaagtctacattcatgaacatcttggcaggatacagggagtctggaatgaaggggcagatcctggttaatggaaggccacgggagctgaggaccttccgcaagatgtcctgctacatcatgcaagatgacatgctgctgccgcacctcacggtgttggaagccatgatggtctctgctaacctgaagctgagtgagaagcaggaggtgaagaaggagctggtgacagagatcctgacggcactgggcctgatgtcgtgctcccacacgaggacagccctgctctctggcgggcagaggaagcgtctggccatcgccctggagctggtcaacaacccgcctgtcatgttctttgatgagcccaccagtggtctggatagcgcctcttgtttccaagtggtgtccctcatgaagtccctggcacaggggggccgtaccatcatctgcaccatccaccagcccagtgccaagctctttgagatgtttgacaagctctacatcctgagccagggtcagtgcatcttcaaaggcgtggtcaccaacctgatcccctatctaaagggactcggcttgcattgccccacctaccacaacccggctgacttcatcatcgaggtggcctctggcgagtatggagacctgaaccccatgttgttcagggctgtgcagaatgggctgtgcgctatggctgagaagaagagcagccctgagaagaacgaggtccctgccccatgccctccttgtcctccggaagtggatcccattgaaagccacacctttgccaccagcaccctcacacagttctgcatcctcttcaagaggaccttcctgtccatcctcagggacacggtcctgacccacctacggttcatgtcccacgtggttattggcgtgctcatcggcctcctctacctgcatattggcgacgatgccagcaaggtcttcaacaacaccggctgcctcttcttctccatgctgttcctcatgttcgccgccctcatgccaactgtgctcaccttccccttagagatggcggtcttcatgagggagcacctcaactactggtacagcctcaaagcgtattacctggccaagaccatggctgacgtgccctttcaggtggtgtgtccggtggtctactgcagcattgtgtactggatgacgggccagcccgctgagaccagccgcttcctgctcttctcagccctggccaccgccaccgccttggtggcccaatctttggggctgctgatcggagctgcttccaactccctacaggtggccacttttgtgggcccagttaccgccatccctgtcctcttgttctccggcttctttgtcagcttcaagaccatccccacttacctgcaatggagctcctatctctcctatgtcaggtatggctttgagggtgtgatcctgacgatctatggcatggagcgaggagacctgacatgtttagaggaacgctgcccgttccgggagccacagagcatcctccgagcgctggatgtggaggatgccaagctctacatggacttcctggtcttgggcatcttcttcctagccctgcggctgctggcctaccttgtgctgcgttaccgggtcaagtcagagagatagaggcttgccccagcctgtaccccagccctgcagcaggaagcccccagtcccagccctttgggactgttttaaccttatagacttgggcactggttcctggcggggctatcctctcctcccttggctcctccacaggctggctgtcggactgcgctcccagcctgggctctgggagtgggggctccagccctccccactatgcccaggagtcttcccaagttgatgcggtttgtagcttcctccctactctctccaacacctgcatgcaaagactactgggaggctgctgcctccttcctgcccatggcaccctcctctgctgtctgcct

SEQ ID NO: 53929 - DNA, 2552 bp, Artificial Sequence
  derived and/or modified sequence
ggagctttgagccgggctcggtggtctgccccaaactgagcaggccctccccttgcaggtcggcggcgtgatggcggagaaggcgctggaggccgtgggctgtggactagggccgggggctgtggccatggccgtgacgctggaggacggggcggaaccccctgtgctgaccacgcacctgaagaaggtggagaaccacatcactgaagcccagcgcttctcccacctacccaagcgctcagccgtggacatcgagttcgtggagctgtcctattccgtgcgggaggggccctgctggcgcaaaaggggttataagacccttctcaagtgcctctcaggtaaattctgccgccgggagctgattggcatcatgggcccctcaggggctggcaagtctacattcatgaacatcttggcaggatacagggagtctggaatgaaggggcagatcctggttaatggaaggccacgggagctgaggaccttccgcaagatgtcctgctacatcatgcaagatgacatgctgctgccgcacctcacggtgttggaagccatgatggtctctgctaacctgaagctgagtgagaagcaggaggtgaagaaggagctggtgacagagatcctgacggcactgggcctgatgtcgtgctcccacacgaggacagccctgctctctggcgggcagaggaagcgtctggccatcgccctggagctggtcaacaacccgcctgtcatgttctttgatgagcccaccagtggtctggatagcgcctcttgtttccaagtggtgtccctcatgaagtccctggcacaggggggccgtaccatcatctgcaccatccaccagcccagtgccaagctctttgagatgtttgacaagctctacatcctgagccagggtcagtgcatcttcaaaggcgtggtcaccaacctgatcccctatctaaagggactcggcttgcattgccccacctaccacaacccggctgacttcatcatcgaggtggcctctggcgagtatggagacctgaaccccatgttgttcagggctgtgcagaatgggctgtgcgctatggctgagaagaagagcagccctgagaagaacgaggtccctgccccatgccctccttgtcctccggaagtggatcccattgaaagccacacctttgccaccagcaccctcacacagttctgcatcctcttcaagaggaccttcctgtccatcctcagggacacggtcctgacccacctacggttcatgtcccacgtggttattggcgtgctcatcggcctcctctacctgcatattggcgacgatgccagcaaggtcttcaacaacaccggctgcctcttcttctccatgctgttcctcatgttcgccgccctcatgccaactgtgctcaccttccccttagagatggcggtcttcatgagggagcacctcaactactggtacagcctcaaagcgtattacctggccaagaccatggctgacgtgccctttcaggtggtgtgtccggtggtctactgcagcattgtgtactggatgacgggccagcccgctgagaccagccgcttcctgctcttctcagccctggccaccgccaccgccttggtggcccaatctttggggctgctgatcggagctgcttccaactccctacaggtggccacttttgtgggcccagttaccgccatccctgtcctcttgttctccggcttctttgtcagcttcaagaccatccccacttacctgcaatggagctcctatctctcctatgtcaggtatggctttgagggtgtgatcctgacgatctatggcatggagcgaggagacctgacatgtttagaggaacgctgcccgttccgggagccacagagcatcctccgagcgctggatgtggaggatgccaagctctacatggacttcctggtcttgggcatcttcttcctagccctgcggctgctggcctaccttgtgctgcgttaccgggtcaagtcagagagatagaggcttgccccagcctgtaccccagccctgcagcaggaagcccccagtcccagccctttgggactgttttaaccttatagacttgggcactggttcctggcggggctatcctctcctcccttggctcctccacaggctggctgtcggactgcgctcccagcctgggctctgggagtgggggctccagccctccccactatgcccaggagtcttcccaagttgatgcggtttgtagcttcctccctactctctccaacacctgcatgcaaagactactgggaggctgctgcctccttcctgcccatggcaccctcctctgctgtctgcctgggagccctaggctctctagggccccacttacaactgaccaaagtggccccctctgggggtccccaccacacaagtgtttgtaaactgggctgctataaggttggagttccagggctgggccctggtggagtccactggaagtcccattatggatgttgaaatggacagggaaggactctggaagtctcttcctcctcctcctcttctctcc

SEQ ID NO: 53930 - DNA, 1941 bp, Artificial Sequence
  derived and/or modified sequence
atggccgagaaggccctggaggccgtgggctgcggcctgggccccggcgccgtggccatggccgtgaccctggaggacggcgccgagccccccgtgctgaccacccacctgaagaaggtggagaaccacatcaccgaggcccagagattcagccacctgcccaagagaagcgccgtggacatcgagttcgtggagctgagctacagcgtgagagagggcccctgctggagaaagagaggctacaagaccctgctgaagtgcctgagcggcaagttctgcagaagagagctgatcggcatcatgggccccagcggcgccggcaagagcaccttcatgaacatcctggccggctacagagagagcggcatgaagggccagatcctggtgaacggcagacccagagagctgagaaccttcagaaagatgagctgctacatcatgcaggacgacatgctgctgccccacctgaccgtgctggaggccatgatggtgagcgccaacctgaagctgagcgagaagcaggaggtgaagaaggagctggtgaccgagatcctgaccgccctgggcctgatgagctgcagccacaccagaaccgccctgctgagcggcggccagagaaagagactggccatcgccctggagctggtgaacaacccccccgtgatgttcttcgacgagcccaccagcggcctggacagcgccagctgcttccaggtggtgagcctgatgaagagcctggcccagggcggcagaaccatcatctgcaccatccaccagcccagcgccaagctgttcgagatgttcgacaagctgtacatcctgagccagggccagtgcatcttcaagggcgtggtgaccaacctgatcccctacctgaagggcctgggcctgcactgccccacctaccacaaccccgccgacttcatcatcgaggtggccagcggcgagtacggcgacctgaaccccatgctgttcagagccgtgcagaacggcctgtgcgccatggccgagaagaagagcagccccgagaagaacgaggtgcccgccccctgccccccctgcccccccgaggtggaccccatcgagagccacaccttcgccaccagcaccctgacccagttctgcatcctgttcaagagaaccttcctgagcatcctgagagacaccgtgctgacccacctgagattcatgagccacgtggtgatcggcgtgctgatcggcctgctgtacctgcacatcggcgacgacgccagcaaggtgttcaacaacaccggctgcctgttcttcagcatgctgttcctgatgttcgccgccctgatgcccaccgtgctgaccttccccctggagatggccgtgttcatgagagagcacctgaactactggtacagcctgaaggcctactacctggccaagaccatggccgacgtgcccttccaggtggtgtgccccgtggtgtactgcagcatcgtgtactggatgaccggccagcccgccgagaccagcagattcctgctgttcagcgccctggccaccgccaccgccctggtggcccagagcctgggcctgctgatcggcgccgccagcaacagcctgcaggtggccaccttcgtgggccccgtgaccgccatccccgtgctgctgttcagcggcttcttcgtgagcttcaagaccatccccacctacctgcagtggagcagctacctgagctacgtgagatacggcttcgagggcgtgatcctgaccatctacggcatggagagaggcgacctgacctgcctggaggagagatgccccttcagagagccccagagcatcctgagagccctggacgtggaggacgccaagctgtacatggacttcctggtgctgggcatcttcttcctggccctgagactgctggcctacctggtgctgagatacagagtgaagagcgagagatag

SEQ ID NO: 53931 - DNA, 1206 bp, Artificial Sequence
  derived and/or modified sequence
atgaaatgtgactttaattgcaaccacgtgcactccgggttgaagctcgtgaagcctgacgatatcggccgactcgtgagctacacacctgcctatctggagggcagttgtaaagactgcattaaggactatgagagattgagctgtattgggtcaccaatcgtttcccctcgaattgtgcagttggagactgaaagcaaacggctacacaacaaggagaatcagcacgtgcagcaaacactaaatagcaccaatgagattgaggcactagagacatctagactgtatgaggattccggttattcttcctttagtctgcagtctggactgtcagaacatgaagagggcagtctcctagaggaaaacttcggagactcacttcagagttgcctgctacagatccagagtcccgatcagtacccaaacaaaaacctgcttcccgtcctgcatttcgaaaaggtggtttgcagcacactaaagaagaatgccaagagaaacccgaaagttgatcgcgagatgctgaaagagataatcgcccggggcaactttaggttacagaacatcatcggtaggaaaatggggctggagtgtgtcgacattctctccgaacttttcaggcgagggctgcgccatgttcttgccaccatactcgcccagctctcagatatggatctaatcaatgtgtcaaaagttagcacgacctggaagaaaattttggaggacgacaaaggggcctttcagctgtactccaaggccatccagcgggtgactgagaacaacaataagttttccccccacgccagcactcgcgaatacgtgatgttccgtacgccactggccagcgtccagaagtctgctgctcagacgagcttgaaaaaggatgcccaaacaaagctgagtaaccaaggggaccagaagggttctacttactcgagacacaacgagttctcagaggtcgctaagactctgaagaagaatgaatccctcaaggcgtgcattaggtgcaacagtcccgccaaatatgactgttacctgcaaagagcgacctgtaagcgagagggttgcggctttgactactgtactaaatgtttgtgtaattaccacacaaccaaggattgctctgacggaaaactcctaaaggcctcatgcaaaatagggcctcttcccgggaccaagaaaagcaaaaaaaatttgagaagactgtag

SEQ ID NO: 53932 - DNA, 1206 bp, Artificial Sequence
  derived and/or modified sequence
atgaagtgtgacttcaactgcaaccacgtgcacagcggcctgaagctggtgaagccagatgacatcggccgcctggtgtcctacaccccagcctacctggagggcagctgcaaggactgcatcaaggactatgaaaggctgagctgcatcggcagccccatcgtgagccccagaattgtgcagctggagacagagagcaagaggctgcacaacaaggagaaccagcacgtgcagcagaccctgaacagcaccaatgaaattgaggccctggagaccagccggctgtatgaagattctggctacagcagcttcagcctgcagagcggcctgtctgaacatgaggagggcagcctgctggaggagaactttggagacagcctgcagagctgcctgctgcagatccagagcccagaccagtaccccaacaagaacctgctgcctgtgctgcactttgagaaggtggtgtgcagcaccctgaagaagaatgccaagaggaaccccaaggtggaccgggagatgctgaaggagatcatcgcccggggcaacttccggctgcagaacatcattggaaggaagatgggcctggagtgtgtggacatcctgtctgagctgttccggcggggcctgcggcacgtgctggccaccatcctggcccagctgagtgacatggacctgatcaacgtgtccaaggtgtccaccacctggaagaagatcctggaggatgacaagggggccttccagctgtacagcaaggccatccagagggtgacagagaacaacaacaagttcagcccccacgccagcacccgggagtatgtgatgttccgcacccccctggcctctgtgcagaagtctgctgcccagaccagcctgaagaaggatgcccagaccaagctgagcaaccagggcgaccagaagggcagcacctacagccgccacaatgagttcagcgaggtggccaagaccctgaagaagaatgaaagcctgaaggcctgcatccgctgcaacagccctgccaagtatgactgctacctgcagagggccacctgcaagcgggagggctgcggctttgactactgcaccaagtgcctgtgcaactaccacaccaccaaggactgcagtgatggcaagctgctgaaggccagctgcaagattggccccctgcccggcaccaagaagagcaagaagaacctgcggcggctgtag

SEQ ID NO: 53933 - DNA, 1206 bp, Artificial Sequence
  derived and/or modified sequence
atgaagtgcgacttcaactgcaaccacgtgcacagcggcctgaagctcgtgaaacccgacgacataggccggctggtgtcctacacaccagcgtacctggaaggcagctgcaaggactgtataaaggactatgagcggctgtcttgcataggctctcccatcgtgagcccgcgaatcgtccagctcgaaaccgagagcaagaggttgcacaacaaggagaatcagcatgtccagcagactctgaactccaccaatgagattgaagccttggagacatcaaggctgtatgaagactcgggctattcatccttttccctgcaatccggactgtccgagcatgaagaaggaagtcttctcgaggaaaacttcggcgactctcttcagagctgcctgctccagattcagtcacctgatcaatatccaaacaaaaatctgttgcccgttctgcactttgagaaagtcgtctgtagcacactcaaaaagaacgctaaacgaaaccctaaagtggacagagaaatgcttaaagagattatcgcaagagggaactttaggctgcaaaatattattggacgaaaaatgggccttgagtgcgttgacatcctatccgagctctttaggagggggctgcggcacgtactggccaccatcttagcacagctgagtgacatggatctcattaatgtgtccaaagtgtccacaacatggaaaaaaattttagaggacgacaagggtgctttccaactgtactccaaggcgattcagcgagtgaccgaaaataataacaagttttcccctcatgcatctacacgcgagtatgtcatgtttagaacccccctcgcgtctgtccagaaatctgctgctcagacaagcctcaagaaagacgcccagaccaaactctccaatcagggcgaccagaaaggttcaacatactctcgacataatgagtttagcgaagtggccaagacactcaagaagaacgagtcactaaaagcctgtatcagatgcaactcacctgcgaagtacgactgctacctgcagcgagccacatgcaagcgcgaagggtgtggtttcgattactgtaccaagtgcctatgcaactaccataccactaaggactgttctgatgggaaactgttgaaggcttcatgcaagattggaccattgccgggcactaaaaagagtaaaaagaacctgcgtagactctag

SEQ ID NO: 53934 - DNA, 1206 bp, Artificial Sequence
  derived and/or modified sequence
atgaagtgcgattttaactgcaatcacgtacactccggtcttaagcttgtgaaacccgatgatattggcaggctagtgagctataccccggcttaccttgagggcagctgtaaggattgcatcaaagactatgaaagactgtcctgcatagggtcccccatcgtgtccccgagaatcgttcagctggagaccgaatctaagaggcttcataacaaggaaaaccagcacgtgcaacaaaccttgaactctacaaacgaaatagaggctttggaaacttctaggctgtacgaggattctggctactcatccttctcactgcaatcaggtctctcggaacatgaagaaggatccttgctcgaagaaaattttggagatagtctccaatcatgtttgctgcagatccagtcacctgaccagtaccccaacaaaaatcttctccctgtcctgcattttgagaaggttgtctgttctacactaaaaaagaacgcaaaaaggaacccaaaggtggatcgcgaaatgctcaaagagatcatcgcccgtggcaacttccggctccagaatatcataggacgcaagatgggcctggagtgtgtggacattttgtctgagctatttagacgtgggctgcggcacgtgcttgcaacgatcctggcacaactgagtgatatggacctcattaacgtgtctaaggttagtactacctggaagaaaatacttgaagacgataagggggcattccagttgtacagcaaggccatccaaagggtgacagaaaataataataagttcagccctcatgcttctacgcgcgagtacgtgatgtttcggaccccattagcctcagtgcagaaatcagctgcccagacctcactgaagaaggatgctcaaaccaagttaagcaaccaaggggatcagaaaggttccacgtacagtaggcataatgagttctctgaggtggccaaaactttaaagaaaaatgaatcactcaaggcgtgcatccggtgtaatagtccggctaagtacgattgttatcttcagagagctacatgcaagcgagaaggatgtggatttgattattgtacaaaatgcttgtgcaactaccacacaacaaaagattgcagcgatggtaagctgctgaaagccagctgcaagatcgggcctctgcccggtacgaagaagtctaaaaagaacttgcgcaggctatag

SEQ ID NO: 53935 - DNA, 1206 bp, Artificial Sequence
  derived and/or modified sequence
atgaagtgcgacttcaactgcaaccacgtgcacagcggcctgaagctggtgaagcccgacgacatcggcagactggtgagctacacccccgcctacctggagggcagctgcaaggactgcatcaaggactacgagagactgagctgcatcggcagccccatcgtgagccccagaatcgtgcagctggagaccgagagcaagagactgcacaacaaggagaaccagcacgtgcagcagaccctgaacagcaccaacgagatcgaggccctggagaccagcagactgtacgaggacagcggctacagcagcttcagcctgcagagcggcctgagcgagcacgaggagggcagcctgctggaggagaacttcggcgacagcctgcagagctgcctgctgcagatccagagccccgaccagtaccccaacaagaacctgctgcccgtgctgcacttcgagaaggtggtgtgcagcaccctgaagaagaacgccaagagaaaccccaaggtggacagagagatgctgaaggagatcatcgccagaggcaacttcagactgcagaacatcatcggcagaaagatgggcctggagtgcgtggacatcctgagcgagctgttcagaagaggcctgagacacgtgctggccaccatcctggcccagctgagcgacatggacctgatcaacgtgagcaaggtgagcaccacctggaagaagatcctggaggacgacaagggcgccttccagctgtacagcaaggccatccagagagtgaccgagaacaacaacaagttcagcccccacgccagcaccagagagtacgtgatgttcagaacccccctggccagcgtgcagaagagcgccgcccagaccagcctgaagaaggacgcccagaccaagctgagcaaccagggcgaccagaagggcagcacctacagcagacacaacgagttcagcgaggtggccaagaccctgaagaagaacgagagcctgaaggcctgcatcagatgcaacagccccgccaagtacgactgctacctgcagagagccacctgcaagagagagggctgcggcttcgactactgcaccaagtgcctgtgcaactaccacaccaccaaggactgcagcgacggcaagctgctgaaggccagctgcaagatcggccccctgcccggcaccaagaagagcaagaagaacctgagaagactgtag

SEQ ID NO: 53936 - protein, 535 aa, Artificial Sequence
  derived and/or modified sequence
MAGNCGARGALSAHTLLFDLPPALLGELCAVLDSCDGALGWRGLGAVLSPSEKSYQEGGFPNILFKETANVTVDNVLIPEHNEKGILLKSSISFQNIIEGTRNFHKDFLIGEGEIFEVYRVEIQNLTYAVKLFKQEKKMQCKKHWKRFLSELEVLLLFHHPNILELAAYFTETEKFCLIYPYMRNGTLFDRLQCVGDTAPLPWHIRIGILIGISKAIHYLHNVQPCSVICGSISSANILLDDQFQPKLTDFAMAHFRSHLEHQSCTINMTSSSSKHLWYMPEEYIRQGKLSIKTDVYSFGIVIMEVLTGCRVVLDDPKHIQLRDLLRELMEKRGLDSCLSFLDKKVPPCPRNFSAKLFCLAGRCAATRAKLRPSMDEVLNTLESTQASLYFAEDPPTSLKSFRCPSPLFLENVPSIPVEDDESQNNNLLPSDEGLRIDRMTQKTPFECSQSEVMFLSLDKKPESKRNEEACNMPSSSCEESWFPKYIVPSQDLRPYKVNIDPSSEAPGHSCRSRPVESSCSSKFSWDEYEQYKKE

SEQ ID NO: 53937 - DNA, 1608 bp, Artificial Sequence
  derived and/or modified sequence
atggcaggcaattgcggggcccgtggcgccctttcggctcacactctgttattcgacttacccccggctctgctcggggagctgtgtgcagtcttggactcctgcgacggggccttaggctggaggggccttggagctgttctgagtcccagcgagaaatcatatcaggagggtgggttccccaacatactgtttaaggaaacagccaacgtgacggtagacaatgtgctcattccagagcacaacgagaagggcatcctcctaaagagctctattagtttccaaaacatcattgagggaacaagaaatttccataaggattttttgattggcgaaggggagatcttcgaggtctaccgtgtcgagattcaaaatctgacctacgcagtcaaactattcaaacaggaaaagaagatgcaatgcaaaaaacactggaagcggtttctatcagaactggaagtattactgctgtttcatcatcctaacattttggagctggctgcatactttaccgaaacagagaagttttgcttgatatacccatacatgaggaatggcactctcttcgaccgccttcaatgtgtaggagatactgccccactcccatggcacattcggattggcattcttattggaatttcaaaggctatacactatttacataatgtccagccatgtagcgttatctgcggaagtatcagtagtgcaaatattctcctagacgaccaatttcagcctaagctgacagattttgcaatggcacattttcggtcccacctagagcatcagtcatgcacaatcaacatgacctcctcgagctcaaaacacctctggtatatgcctgaggaatatatccgccagggtaagctgtcaattaagacagatgtctactcatttgggatagttatcatggaagttctgacaggctgtagggtggtactagatgaccccaagcacattcaactgcgcgaccttcttagagagctaatggagaagaggggcctagacagttgtctttcattcctcgataaaaaagtgcccccgtgcccccgcaacttttcagcaaagcttttctgtctcgccggcaggtgtgccgccactcgagccaaattaaggccctccatggacgaagtgttaaacaccttggagagtacccaagcctctttgtatttcgccgaagatccccccacctcactgaaaagcttcagatgtccttctccactttttctcgaaaatgtgccaagtatccctgtcgaggatgacgaatctcagaacaataacctcctaccttctgacgagggactacggatagacagaatgacgcagaaaactcctttcgagtgctctcaatcggaagttatgttcctgtcattagacaagaagcccgagagcaagagaaacgaggaggcatgcaacatgcccagctctagttgtgaggagtcctggtttcctaagtacattgttccatcccaggacctacgaccctacaaggtcaatatcgatccgtcaagcgaagctcctggccatagttgcaggtcccggcccgtagagtcttcttgcagttctaagttctcctgggatgagtacgaacaatacaaaaaagagtag

SEQ ID NO: 53938 - DNA, 1853 bp, Artificial Sequence
  derived and/or modified sequence
gacctggactccgcctcgtccccggggctcgggcagccgagccatggcggggaactgtggggcccgcggcgcgctgtcggcgcacacgctgctgttcgacctgccgcccgcgctgctcggagagctctgcgctgttctggacagctgcgacggcgcgctgggctggcgcggcctgggagcagtgttgagtccttcagagaagagttatcaggaaggtggatttccaaatatattattcaaggaaacagccaatgtcaccgtggataatgttcttattcctgaacataatgaaaaaggaatactgcttaaatcttccatcagctttcaaaatatcatagaaggaactagaaatttccacaaagacttcctaattggagaaggagagatttttgaggtatacagagtggagattcaaaacctaacatatgctgtcaaattatttaaacaggagaaaaaaatgcagtgtaagaagcattggaagaggtttttatctgagcttgaagttttactactgtttcatcacccaaacatactagagttggctgcatattttacagagactgagaagttctgtctgatttatccatacatgagaaatggaacactttttgacagattgcagtgtgtaggtgacacggccccactcccttggcacattcgaatcggtatattaataggaatatccaaagccattcactacctgcacaacgttcaaccatgctcggtcatctgtggcagtatatcaagtgcaaacatccttttggatgatcagtttcaacccaaactaactgattttgccatggcacacttccggtcccacctagaacatcagagttgtaccataaatatgaccagcagcagcagtaaacatctgtggtacatgccagaagagtacatcagacaggggaaactttccattaaaacagatgtctacagctttggaattgtaataatggaagttctaacaggatgtagagtagtgttagatgatccaaaacatatccagctgcgggatctccttagagaattgatggagaagagaggcctggattcatgtctctcatttctagataagaaagtgcctccctgccctcggaatttctctgccaagctcttctgtttggcaggccggtgtgctgcaacgcgggcaaagttaagaccatcaatggatgaagttttaaatactcttgaaagtactcaagccagcttgtattttgctgaagatcctcccacatcactaaagtccttcaggtgtccttctcctctattcctggagaatgtaccaagtattccagtggaagatgatgaaagccagaataacaatttactaccttctgatgaaggcctgaggatagacagaatgactcagaaaactccttttgaatgcagccagtctgaggttatgtttctgagcttggacaaaaagccagagagcaagagaaatgaggaagcttgcaacatgcccagttcttcttgtgaagaaagttggttcccaaagtatatagttccatcccaggacttaaggccctataaggtaaatatagatccttcttcagaagctccagggcattcttgcaggagcaggccagtggagagcagctgttcctccaaattttcctgggatgaatatgaacagtacaaaaaagaataaattctaccagaagataaagaaaaaagcaagtattgcataggcacctgagcataggtatgaccttgggaagacattggctccataagcaatgccaagagaatgatcaatagtgagtttgggtgatgcagataaacaatctggataattccatttcttttttcccaaaccctcaaacagagtgccttaaaaaattgttttatca

SEQ ID NO: 53939 - DNA, 1608 bp, Artificial Sequence
  derived and/or modified sequence
atggccggcaactgtggggcccggggggccctgagcgcccacaccctgctgtttgacctgcccccagccctgctgggggagctgtgtgctgtgctggacagctgtgatggagccctgggctggaggggcctgggcgctgtgctgagccccagcgagaagagctaccaggagggcggcttccccaacatcctcttcaaggagacagccaacgtgacagtggacaacgtgctgatccctgagcacaatgagaagggcatcctgctgaagagcagcatctccttccagaacatcatcgagggcaccaggaacttccacaaggacttcctgattggagagggggagatctttgaggtgtacagagtggagatccagaacctgacctatgctgtgaagctgttcaagcaggagaagaagatgcagtgcaagaagcactggaagcgcttcctgtctgagctggaggtgctgctgctcttccaccaccccaacatcctggagctggccgcctacttcacagaaacagagaagttctgcctgatctacccctacatgagaaatggcaccctgtttgaccggctgcagtgtgtgggggacacagcccccctgccctggcacatcagaattggcatcctgattggcatcagcaaggccatccactacctgcacaacgtgcagccctgcagcgtcatctgtggcagcatcagcagcgccaacatcctgctggatgaccagttccagcccaagctgacagactttgccatggcccacttccgcagccacctggagcaccagagctgcaccatcaacatgaccagcagcagcagcaagcacctgtggtacatgcctgaggagtacatccggcagggcaagctgagcatcaagacagatgtgtacagctttggaattgtcatcatggaggtgctgaccggctgccgggtggtgctggatgaccccaagcacatccagctgcgggacctgctgcgggagctgatggagaagaggggcctggacagctgcctgtccttcctggacaagaaggtgcccccctgccccaggaacttcagcgccaagctgttctgcctggccggccgctgtgccgccacccgggccaagctgcggcccagcatggatgaggtgctgaacaccctggagagcacccaggccagcctgtactttgctgaagatcctcccaccagcctgaagagcttccgctgccccagccccctcttcctggagaatgtgcccagcatccctgtggaggatgatgagagccagaacaacaacctgctgcccagtgatgagggcctgagaattgacaggatgacccagaagaccccatttgaatgttcccagagcgaggtgatgttcctgagcctggacaagaagccagagagcaagagaaatgaggaggcctgcaacatgcccagcagcagctgtgaggagagctggttccccaagtacatcgtgcccagccaggacctgcggccctacaaggtgaacatcgaccccagcagcgaggcccctggccacagctgccgcagcaggcctgtggagagcagctgcagcagcaagttctcctgggatgaatatgagcagtacaagaaggagtag

SEQ ID NO: 53940 - DNA, 1608 bp, Artificial Sequence
  derived and/or modified sequence
atggccggcaactgcggcgcccggggcgccctgagcgcccacaccctcctgtttgacctgccaccagctcttctgggcgaactgtgcgccgtgcttgattcctgcgatggagctctcggctggagaggactcggggccgtcctttctccaagtgaaaagagctatcaggaagggggattccccaacatcttgttcaaggagacggctaacgtcacagttgataatgtgctcatccctgagcacaatgagaagggaatcttacttaagtcttccatctcatttcagaatatcattgagggaacaaggaactttcataaggatttcctgatcggcgaaggcgaaattttcgaggtctaccgggtggaaattcagaaccttacttacgccgtcaaactcttcaaacaggaaaaaaagatgcagtgcaaaaagcattggaaaagatttttgtctgagcttgaggttctcctgctgttccaccaccccaatatcctggagctggctgcgtatttcactgaaacagagaagttctgtctaatttatccgtacatgcggaacggaaccctctttgataggctgcagtgtgtcggtgataccgcgcccctgccgtggcacatacggattggaatactgatcggaatcagtaaagcaatccattatttgcacaatgttcagccgtgtagcgtgatctgtggatccatctcttctgctaatattctgctggacgaccaattccagcctaaacttactgactttgccatggctcattttcgaagccatcttgagcatcaatcctgtacgattaatatgacctctagctcctccaagcatctgtggtacatgccggaggagtacattcggcaggggaagctgtctatcaaaaccgacgtgtactccttcggtattgtgatcatggaggttctcactggatgccgggtcgtccttgatgatccgaagcacattcagctgcgcgacctactgagggagctaatggagaaacggggactagattcctgcttatcctttctggacaagaaggtacccccatgcccccgcaacttttcagcaaaactattctgcctggccggtaggtgtgcagcgactagagcgaagctgaggcccagtatggatgaagtgctgaatacgctggaaagtacccaggccagcttgtacttcgccgaggaccctccgaccagtctgaaatctttccgatgtccaagcccattattcctggagaacgtgccaagcatccctgtggaggacgacgaatcacagaacaataatctactgccctccgatgaagggctgagaattgaccgcatgactcagaaaacaccctttgagtgttcccagagcgaggtgatgttcttgagtttagacaaaaaacctgagtccaagagaaatgaagaggcctgtaacatgccgtcgagtagttgtgaggagagctggttcccgaaatacatagtgccttcacaagacttgcgcccttacaaagtcaacatcgacccttcaagcgaggcgcccggacattcatgcaggagtcgacctgtagaatcctcgtgttcgagcaagttttcatgggatgagtacgagcagtacaagaaagaatag

SEQ ID NO: 53941 - DNA, 1608 bp, Artificial Sequence
  derived and/or modified sequence
atggccggtaattgcggggctcgaggggctttgagcgcgcatacactcctgtttgacctcccccctgcactcctgggagagctgtgcgccgttctggactcctgtgacggcgctctgggttggcgcggtctgggcgctgtgctgtcacccagtgaaaagtcctaccaagaggggggatttcctaacatcctgtttaaagaaaccgcgaatgtgactgttgataatgtgctgatcccggaacataatgagaagggaatccttctcaagagctccatctcattccagaacattatcgaagggactaggaacttccacaaagacttcctgattggtgagggcgagatatttgaagtgtaccgcgtcgaaattcagaacctaacttacgcagtaaaactttttaagcaagagaagaaaatgcagtgcaagaagcactggaagaggttcctctccgagttggaggttctgttgctgttccaccaccccaatatattagaactggcggcatattttacggagaccgaaaagttctgtctgatatatccctatatgagaaacgggactctgttcgatcgtctgcagtgcgtcggcgataccgctcccttgccctggcatatccgcattggtatcctgataggaatctctaaggccatacattacttacacaatgtgcagccttgctcagttatttgtggctccattagcagcgccaacatcctgctggacgatcagtttcagcctaaactgactgactttgcgatggcccattttagatctcacctggagcaccagtcctgtacgattaatatgactagtagctccagtaagcatctgtggtatatgcccgaggagtacatccgccagggcaaactgagcatcaaaacagacgtatatagcttcggaattgtcattatggaagtgctcacgggctgtagggtagtgctggacgacccaaaacacatccagctgagagatttattgagagagctgatggagaagcggggtctagattcgtgcttgagtttcttggacaagaaggtccccccatgcccacggaatttctcagcaaaactgttctgtcttgcaggccgatgcgctgccacacgggcaaagttgcggccttctatggacgaagttctcaacaccctcgagtccacacaggcaagcctgtatttcgcggaagatccaccaaccagcctgaagtctttccgctgtccctcccccctcttcctggagaacgtgcccagcatcccagtggaagacgacgagtcacagaacaacaacctattacctagcgacgaaggcctgcgaatcgatcgtatgactcaaaaaactccctttgagtgttctcagtctgaggttatgtttctctcactggacaaaaagccagagtctaagcgtaatgaggaagcctgtaatatgccctctagctcctgtgaggagagttggtttcccaagtacatcgtgccctcccaggacctgcgcccttacaaggtgaacatcgatccatcctcggaagcgcctggccacagttgtcgatcacgcccagtggaaagctcttgctcttctaaattcagctgggatgagtatgagcagtacaagaaagagtag

SEQ ID NO: 53942 - DNA, 1608 bp, Artificial Sequence
  derived and/or modified sequence
atggccggcaactgcggcgccagaggcgccctgagcgcccacaccctgctgttcgacctgccccccgccctgctgggcgagctgtgcgccgtgctggacagctgcgacggcgccctgggctggagaggcctgggcgccgtgctgagccccagcgagaagagctaccaggagggcggcttccccaacatcctgttcaaggagaccgccaacgtgaccgtggacaacgtgctgatccccgagcacaacgagaagggcatcctgctgaagagcagcatcagcttccagaacatcatcgagggcaccagaaacttccacaaggacttcctgatcggcgagggcgagatcttcgaggtgtacagagtggagatccagaacctgacctacgccgtgaagctgttcaagcaggagaagaagatgcagtgcaagaagcactggaagagattcctgagcgagctggaggtgctgctgctgttccaccaccccaacatcctggagctggccgcctacttcaccgagaccgagaagttctgcctgatctacccctacatgagaaacggcaccctgttcgacagactgcagtgcgtgggcgacaccgcccccctgccctggcacatcagaatcggcatcctgatcggcatcagcaaggccatccactacctgcacaacgtgcagccctgcagcgtgatctgcggcagcatcagcagcgccaacatcctgctggacgaccagttccagcccaagctgaccgacttcgccatggcccacttcagaagccacctggagcaccagagctgcaccatcaacatgaccagcagcagcagcaagcacctgtggtacatgcccgaggagtacatcagacagggcaagctgagcatcaagaccgacgtgtacagcttcggcatcgtgatcatggaggtgctgaccggctgcagagtggtgctggacgaccccaagcacatccagctgagagacctgctgagagagctgatggagaagagaggcctggacagctgcctgagcttcctggacaagaaggtgcccccctgccccagaaacttcagcgccaagctgttctgcctggccggcagatgcgccgccaccagagccaagctgagacccagcatggacgaggtgctgaacaccctggagagcacccaggccagcctgtacttcgccgaggacccccccaccagcctgaagagcttcagatgccccagccccctgttcctggagaacgtgcccagcatccccgtggaggacgacgagagccagaacaacaacctgctgcccagcgacgagggcctgagaatcgacagaatgacccagaagacccccttcgagtgcagccagagcgaggtgatgttcctgagcctggacaagaagcccgagagcaagagaaacgaggaggcctgcaacatgcccagcagcagctgcgaggagagctggttccccaagtacatcgtgcccagccaggacctgagaccctacaaggtgaacatcgaccccagcagcgaggcccccggccacagctgcagaagcagacccgtggagagcagctgcagcagcaagttcagctgggacgagtacgagcagtacaagaaggagtag

SEQ ID NO: 53943 - protein, 547 aa, Artificial Sequence
  derived and/or modified sequence
MAGTKNKTRAQAKTEKKAAIQAKAGAEREATGVVRPVAKTRAKAKAKTGSKTDAVAEMKAVSKNKVVAETKEGALSEPKTLGKAMGDFTPKAGNESTSSTCKNEAGTDAWFWAGEEATINSWFWNGEEAGNSFSTKNDKPEIGAQVCAEELEPAAGADCKPRSGAEEEEEENVIGNWFWEGDDTSFDPNPKPVSRIVKPQPVYEINEKNRPKDWSEVTIWPNAPAVTPAVLGFRSQAPSEASPPSYIVLASAEENACSLPVATACRPSRNTRSCSQPIPECRFDSDPCIQTIDEIRRQIRIREVNGIKPFACPCKMECYMDSEEFEKLVSLLKSTTDPLIHKIARIAMGVHNVHPFAQEFINEVGVVTLIESLLSFPSPEMRKKTVITLNPPSGDERQRKIELHVKHMCKETMSFPLNSPGQQSGLKILGQLTTDFVHHYIVANYFSELFHLLSSGNCKTRNLVLKLLLNMSENPTAARDMINMKALAALKLIFNQKEAKANLVSGVAIFINIKEHIRKGSIVVVDHLSYNTLMAIFREVKEIIETM

SEQ ID NO: 53944 - DNA, 1644 bp, Artificial Sequence
  derived and/or modified sequence
atggccggcaccaagaacaagaccagagcccaggccaagaccgagaagaaggccgccatccaggccaaggccggcgccgagagagaggccaccggcgtggtgagacccgtggccaagaccagagccaaggccaaggccaagaccggcagcaagaccgacgccgtggccgagatgaaggccgtgagcaagaacaaggtggtggccgagaccaaggagggcgccctgagcgagcccaagaccctgggcaaggccatgggcgacttcacccccaaggccggcaacgagagcaccagcagcacctgcaagaacgaggccggcaccgacgcctggttctgggccggcgaggaggccaccatcaacagctggttctggaacggcgaggaggccggcaacagcttcagcaccaagaacgacaagcccgagatcggcgcccaggtgtgcgccgaggagctggagcccgccgccggcgccgactgcaagcccagaagcggcgccgaggaggaggaggaggagaacgtgatcggcaactggttctgggagggcgacgacaccagcttcgaccccaaccccaagcccgtgagcagaatcgtgaagccccagcccgtgtacgagatcaacgagaagaacagacccaaggactggagcgaggtgaccatctggcccaacgcccccgccgtgacccccgccgtgctgggcttcagaagccaggcccccagcgaggccagcccccccagctacatcgtgctggccagcgccgaggagaacgcctgcagcctgcccgtggccaccgcctgcagacccagcagaaacaccagaagctgcagccagcccatccccgagtgcagattcgacagcgacccctgcatccagaccatcgacgagatcagaagacagatcagaatcagagaggtgaacggcatcaagcccttcgcctgcccctgcaagatggagtgctacatggacagcgaggagttcgagaagctggtgagcctgctgaagagcaccaccgaccccctgatccacaagatcgccagaatcgccatgggcgtgcacaacgtgcaccccttcgcccaggagttcatcaacgaggtgggcgtggtgaccctgatcgagagcctgctgagcttccccagccccgagatgagaaagaagaccgtgatcaccctgaacccccccagcggcgacgagagacagagaaagatcgagctgcacgtgaagcacatgtgcaaggagaccatgagcttccccctgaacagccccggccagcagagcggcctgaagatcctgggccagctgaccaccgacttcgtgcaccactacatcgtggccaactacttcagcgagctgttccacctgctgagcagcggcaactgcaagaccagaaacctggtgctgaagctgctgctgaacatgagcgagaaccccaccgccgccagagacatgatcaacatgaaggccctggccgccctgaagctgatcttcaaccagaaggaggccaaggccaacctggtgagcggcgtggccatcttcatcaacatcaaggagcacatcagaaagggcagcatcgtggtggtggaccacctgagctacaacaccctgatggccatcttcagagaggtgaaggagatcatcgagaccatgtag

SEQ ID NO: 53945 - DNA, 1644 bp, Artificial Sequence
  derived and/or modified sequence
atggcgggcaccaagaataaaacaagggcccaagctaagactgaaaaaaaagcagctatccaggctaaggcaggggccgagcgcgaggcaactggggttgtacgacccgtggcgaaaactcgagcgaaagccaaagcaaagaccgggagtaagaccgatgccgttgcagaaatgaaggcagtctctaagaataaagtcgttgccgagactaaagaaggggcccttagcgagcctaagacccttggcaaagctatgggagattttactcctaaggccggcaatgaaagtacttcaagtacttgcaagaatgaagccggcaccgacgcttggttctgggcaggcgaggaggctactataaattcatggttttggaacggagaagaagccgggaattcatttagcacaaagaacgataaacctgagatcggcgcccaagtgtgcgcagaagaattagaacctgctgctggggctgactgtaagccccgctctggcgctgaggaggaggaggaagaaaacgtcataggcaactggttttgggagggcgacgatacttctttcgatccgaaccctaagccagtgtctaggattgttaaacctcagcccgtgtatgagattaatgagaaaaaccggcccaaggactggtctgaagttaccatttggccaaatgcgcctgccgtaactcccgccgtgctggggttccggtctcaggctccctcggaggcatcccctccatcttacatcgtgctcgctagcgcagaggagaatgcctgcagcttgcctgtcgccactgcttgtagaccttcgagaaacacacgcagttgtagtcagcctattcccgagtgtcgttttgattcagatccgtgcatacaaactattgatgagattcgcaggcagataagaatccgggaggtgaatggaataaagccatttgcctgcccctgtaagatggaatgttacatggacagcgaggaattcgaaaagctcgtaagccttctcaagagcaccacagaccccctgattcataaaatagctaggatagcaatgggcgttcacaacgtgcacccttttgcccaagagttcatcaatgaagtgggagtcgtgaccctgattgagtccctgcttagcttcccttctcctgagatgcgaaaaaaaactgtcattactctgaacccacctagtggtgacgaaagacagcgtaagatcgagctccacgtgaagcacatgtgcaaagaaacaatgtcattccctctgaacagtcctggccagcagtctggcctcaaaattctcggtcaattaaccactgattttgtgcaccactacatcgtggccaactatttctctgagctatttcacctcctgagctccggtaactgcaagaccaggaatctcgtcctaaaactgttgctaaacatgtcagagaatcccacagccgcccgagatatgattaatatgaaggccctggccgcgctcaagttgatatttaaccagaaagaggccaaagcaaatctggtctctggtgttgcgatatttatcaatataaaggagcatatccggaagggcagcattgtggtggtggaccacctgtcctacaatacactgatggcaatctttcgggaagtgaaagaaattatagaaacaatgtag

SEQ ID NO: 53946 - DNA, 3974 bp, Artificial Sequence
  derived and/or modified sequence
gagaggagtgttttcttgcatccagaaaagacctgagaggcggacgacacctgtgctccgcagagcagaacgtgggaggaacggcgggatgttaaggagctcaagaagcagagagtctacctgcccgacgcgttcgtggagaggagcagcggttgctgttggaggaggtgggtgcaaggacggcagatggcatccctgagaggtggtgactgagactagatgcgggtgcaggtccatctccactggtggctgtggtggctttggattgttggaagaccatcaccttcagcaggtctgcacttgggaacaatcattctcccccagcccgagcgtgcctctgccctctgtatcattgacagaggctgtatgtttggaaagagaactttgtgactgcagaactgacagttgactctaattcttgctaccaagtttttccccgacccagtgaaagagtgttaagacttcgacctaggacacattgagaaccaaggccaagactggacagggccatataactgggcttcaaccatggctgggactaagaataagacaagagcccaggccaaaactgaaaaaaaggctgctatacaagctaaagctggagcagagagggaggctactggtgttgttaggcctgtagccaagaccagggccaaagcaaaagccaagacagggtctaagacagatgcagtagcagagatgaaggcagtgtctaagaacaaggttgttgctgagacgaaggaaggagctctgtcagagcctaagactctgggcaaagccatgggagatttcactcccaaggctgggaatgagtccaccagctccacatgtaaaaatgaggctggtactgatgcctggttctgggctggggaagaggccactatcaattcctggttctggaatggagaagaggctggtaatagtttcagcactaagaatgataaacctgaaattggtgcccaggtctgtgctgaggagttggaacctgcggctggggccgattgcaaacctaggtcaggggctgaggaggaggaggaagagaatgttattgggaactggttttgggaaggagatgatactagttttgaccctaatcctaaacctgtgagcaggatagttaagcctcagcctgtgtatgaaattaatgaaaaaaataggcccaaggactggtctgaggtaactatctggcccaatgcccctgctgtaactccagctgtgttaggatttagatcccaggcaccatctgaggcaagccctccttcatatattgttctggcctccgctgaagaaaatgcctgttctttgcctgtggcaacagcttgccgcccttctaggaacactcgctcatgctcacagcctatccctgagtgtcgttttgattctgacccctgcatccagaccatagatgagattagacgtcaaatcaggatcagggaggtaaatgggattaagccatttgcttgtccttgcaaaatggaatgctatatggattctgaggaatttgaaaaacttgttagcttacttaagtcaactactgatcctcttattcataaaatagcacggattgcaatgggtgtccataatgttcacccatttgcccaagagtttattaacgaagtaggtgtagtgacacttattgaaagcttgctcagttttccttcccctgaaatgagaaaaaagactgtaattactctgaatcctccttctggggatgaaagacaacgcaaaattgaattacatgttaagcatatgtgtaaagaaaccatgtcatttcctttgaactcaccgggacagcaatctggattaaagatactaggacaactgactactgattttgtccatcactacattgttgccaattacttttcagagcttttccatttgctgtcctcaggaaattgcaaaaccagaaatcttgttttgaaactacttttaaatatgtctgaaaatccaactgcagccagagacatgatcaatatgaaggcattggcagcattaaaactcatctttaaccagaaagaggcaaaagccaatcttgttagtggtgtggccatatttattaacataaaggagcatatcagaaaaggctcaattgtagttgttgatcacttgagttataatacactcatggccattttcagggaagttaaagagattattgaaacaatgtaaaatgagccagagatagaacattttaagccatcttcaaactctagcaggctgtacattacagtgtacacattatacactgcatctttaacacagagtcacctgtgacaggctctaggtttgagctagactattttgggggtatcaaatgaatattataccttgggctgaaaatgtttgatttttatcttgtctagattggcatatttttaacattttacttaagatagcaaaccagttcgttttaagtaagctaacttgttcattagtatctgtggcttaaaatggcaaaaaagaaaatatccttgagtttgtaatctagttacagaagtaaggcatacacacacacaaagataacagtacctagagagagagtgtgtgtgagtgtgcgtgtctctgtgtgtgcacgtgcacgctcatggccaaatgtgcgcactctacataaaggaggcaggagttcctataggctatttaatgtaagagaaactatttttctcctgttccagctgtatcagatactcgttccgcaacacagaaatgactcagaatctcagacaaaatgtattatttgttcaattttaattttgctactacattcataactcttaaattgttaggctgtttcatttacatcaaagttatctcacaaaagagaaggcaggaaacgttttgtgagtgcctattctatgtcaaacactgtgttggcaccatattttacaagtttttttcctcttctcacagtgatcttgtgagttagttacttatatttttattagaactcattattctgggtaccctccaatgagaattagagaggttaaataccttttcctagattcccacagcaggaaggtggcatagctgttttgtctgacaccagaacccatctcaccacactgctttacagtcttcctgaaggacattttgaggtgggggggccttcaaagctcagagactggtttgaatggtttaattttgcaatggatcatgtccatgccaggtgttacaattcttaacttcctccaaattcgtgtgtccattagacatttggctacatctggctggaggtcaggagaaaattctgaggtaaatagatggattttatctggcagtgtcgaaaatagtaggagcctaaaactttgttcaatgagtaagatgtagatttggagtcatcagcaggggaaacttgttagatgtcctttgtatctttttctatccatttgtattttttctttcccaaagagctgaaatcattttataccctgaatttaaaaggtaattgcttttttcctccttgcgaaatcataccttaattttttttttttttttttttaccatttatgatttattctcctatgtgtcatatgaaaggccaaggggctttatcttttactagtaggcaagcctgggcatttctgcatttgtgccagctaacactacaaaatagacttaattagagaaatttagacccagaattgcagcttcaacaacacaaaacaggaaagctagaagaggttgctgtgtcaacctacaagatagtgattcttggaagttggtatggaccagaaagcattcccaggacatttaggctatggctgagttctctaagactcagggtgggaattataatccctggtctaagctgatatgaaagtttctatgtgtgaaaatatggagttatatgctttgagattttctgccagttaaactaaaacaagatcatactgtaaatgtttgtaacttgcttccccccactgtatactgtaaacatctttgcatgtcaataaatatgcctctacaacata

SEQ ID NO: 53947 - DNA, 1644 bp, Artificial Sequence
  derived and/or modified sequence
atggcaggaacaaaaaataaaacaagagcacaggcaaagaccgaaaagaaggccgccatccaagcaaaagctggtgcagagagggaagctaccggcgtggtaaggcctgttgcgaagaccagagccaaggcaaaagcgaaaacaggtagtaagactgacgccgtcgcagagatgaaggccgtctcaaaaaacaaggtggtcgcagagaccaaagaaggcgccctctctgagcctaaaaccctcggtaaggccatgggtgatttcacaccaaaagccgggaatgagagcactagctctacctgtaaaaacgaggcaggtactgatgcatggttttgggcgggagaggaggctaccatcaatagctggttctggaacggcgaagaggccggtaattctttttcaaccaagaacgataagccagagatcggagcacaggtgtgcgctgaggaactcgaacccgccgccggtgctgactgcaagcctcgtagtggagccgaagaggaggaagaggagaacgtaatcggaaactggttttgggaaggcgacgatacctccttcgatcccaaccccaagccagtgtcacgtattgtgaagcctcagcctgtgtatgaaataaacgaaaagaacaggccaaaagactggtccgaggtgacgatctggcctaatgccccagcagtgacccctgctgttcttggttttcggagtcaggcgccctctgaggctagcccgcccagctatattgtactggccagtgctgaggaaaacgcatgcagcctgcccgtggcgaccgcctgtcggccctctcggaacactagaagctgctcccagcccattccagagtgccggtttgacagtgacccatgcatacagactattgatgagataagacgacaaattaggatccgcgaagtgaacgggatcaagccctttgcttgcccttgtaagatggaatgttacatggattccgaggaatttgagaaactcgtaagcttgttgaagtccaccacagatcctctaattcataaaatcgcaaggatcgccatgggcgtccataatgtccacccattcgctcaagaattcatcaatgaagttggtgtggtcaccttgatcgaatccctgttgagcttcccatctcctgaaatgaggaaaaagaccgtgattacgctgaatccaccctcaggcgacgaacggcaaaggaagattgagcttcacgttaagcacatgtgcaaagaaaccatgtcgttccctttaaactccccaggtcagcaatctggtttgaagattctgggtcaactcaccactgattttgtacaccactacatcgtggctaattactttagcgagttgttccaccttttgtcttcaggaaactgtaagacacgcaacctcgtgcttaaactgctgctaaatatgagcgagaatcctacagcagctcgcgacatgatcaacatgaaagctttagcggctctgaagctgatcttcaaccaaaaagaggccaaagccaatttggtcagtggcgttgccattttcatcaacattaaagaacatatcagaaagggaagcattgtggtggtagatcacctctcttacaatacacttatggctatcttcagagaagtaaaagaaatcatagagaccatgtag

SEQ ID NO: 53948 - DNA, 1644 bp, Artificial Sequence
  derived and/or modified sequence
atggcggggaccaaaaataagacacgagctcaggccaagacggagaagaaagcagccattcaggcgaaggcgggggctgagcgcgaggccacaggtgttgttagacccgtcgccaaaactcgggctaaggccaaggccaagactggttctaagacagatgctgttgctgagatgaaagccgtttccaaaaacaaggtggtggcggaaaccaaggagggagcgctcagcgaacccaaaaccctcggcaaggcaatgggcgacttcacccctaaagctggaaacgaatctacaagcagcacctgtaaaaacgaggcaggaaccgatgcatggttttgggcaggggaggaggcgaccattaacagctggttttggaatggggaggaggcaggtaattctttctcaactaaaaacgacaagccagaaatcggtgcgcaggtttgcgctgaagaacttgaacccgccgccggggctgattgcaagcctaggtcaggcgccgaagaagaggaggaagaaaatgtcatagggaactggttctgggaaggagatgacacttctttcgaccccaatcctaaacccgtctctaggattgtgaaaccccagccagtttacgaaattaacgaaaagaaccggcccaaagactggagcgaggtgacaatatggccaaacgcacctgcagttactccagcagtgcttggctttagaagccaagctcccagcgaagcttcccccccatcgtacattgtattagcttctgctgaggaaaacgcctgctcactgcccgttgccacagcctgtcgaccgagtcggaatacgaggtcttgctcgcagcctattcctgagtgccgatttgactctgatccgtgtatccagaccatcgatgagatccgccggcagatcagaatacgcgaggtaaacggcattaagccttttgcctgcccatgtaaaatggagtgttatatggactcagaagagtttgagaagctcgtgagtctgttaaagagtacaaccgaccctttaatccataagatcgcgagaattgctatgggcgtccacaatgtgcacccttttgcccaagagttcatcaatgaggtaggagttgtgacactaattgagtcgttactgagttttccttctcctgagatgcgtaaaaagaccgtcattaccttaaatcctccgagtggcgatgaacgccagcggaagattgaactacacgtgaaacatatgtgcaaagaaactatgtctttcccactaaactctcccggacagcagagcgggttaaaaatccttggccagctgaccaccgacttcgttcatcactacattgtggccaactacttttctgagttattccatttgctatccagcggcaactgtaagacccgcaaccttgtgctcaagctcttgttaaacatgtctgagaacccaaccgccgcgcgtgacatgattaacatgaaggctcttgctgcccttaagcttatttttaatcaaaaggaggctaaggccaaccttgtgtcaggcgtcgccatctttataaacatcaaggagcacattagaaagggctcaatcgttgtcgtggatcacctcagttacaataccctcatggccatatttagagaggtgaaagaaatcatcgagactatgtag

SEQ ID NO: 53949 - DNA, 1644 bp, Artificial Sequence
  derived and/or modified sequence
atggctgggaccaagaataaaacaagggcacaggcaaaaacagagaaaaaggcggcaatacaggccaaggccggagcggaacgagaggccaccggggtcgtgcgcccagtagctaagacacgcgctaaggcaaaagccaagacagggtctaagactgatgccgtggccgagatgaaggccgtgtctaaaaataaggttgtcgctgagaccaaggagggtgcactgtctgaaccaaaaaccctaggaaaggctatgggcgactttaccccaaaagccggcaatgagtctacctcctccacatgtaagaatgaggctggaacagatgcatggttctgggcgggggaagaagctaccattaacagctggttctggaacggcgaggaggcgggcaactccttcagcacaaagaacgacaagcccgagataggagcacaggtctgcgctgaggagctggagcccgcggcaggcgcggattgcaagcctaggagcggcgctgaagaggaagaggaagagaacgtcatcggaaattggttctgggaaggcgatgatacatcctttgacccaaatccaaaacctgtttcccggattgtgaagccccagcctgtctacgagatcaacgaaaagaataggcccaaggattggtcagaggtgacaatctggcccaacgccccagctgtgacccctgccgtccttggcttcaggagtcaggcccctagtgaagcctctccaccttcctatattgttctggcaagtgccgaagagaacgcttgctctctgccggtggccacagcatgcagaccctctaggaacacccgctcttgcagccagcctattccagagtgtcgttttgacagtgatccatgtatccagacaatagacgaaattagacggcagatccgcatcagagaagtcaatgggatcaaaccattcgcatgcccgtgcaagatggagtgctacatggactccgaagagtttgaaaagctggtgtccctactaaagtcaactaccgaccctctgattcacaaaatagcccgcattgctatgggcgtgcataacgtccaccccttcgctcaggaattcatcaacgaagtgggagttgtgactctgattgagtctctgctaagcttcccctcccccgagatgcgcaaaaagacagtaattacactcaacccaccaagcggggacgagagacaacgcaagatcgagctccatgtaaagcatatgtgcaaagagactatgtcattccctcttaattcccccggccaacagagtgggctgaaaatcctgggacaactgacaacagacttcgtgcaccactacatcgtggctaattacttttccgagctctttcacctgctgtcctccgggaattgtaagaccagaaacctcgtcctgaagctgcttcttaatatgtcagaaaacccgacagcggcgcgggatatgatcaacatgaaagccttagcagctctcaagttgatcttcaaccagaaagaggcaaaggctaatctggtatctggcgtggccatctttataaacattaaggagcacataaggaaaggttctatcgtggtggtggatcaccttagctataatacactgatggctattttccgcgaagtaaaggaaatcatcgaaaccatgtag

SEQ ID NO: 53950 - DNA, 1644 bp, Artificial Sequence
  derived and/or modified sequence
atggccggaactaagaataagacgcgggcacaggctaagacagagaagaaggcagccattcaagcaaaggctggcgccgagagagaagccaccggtgtggtgagacccgtcgccaaaacgagggcaaaagccaaggctaagactggctctaaaaccgatgcggtggccgagatgaaggcagtgtcaaaaaacaaagttgtagccgagacaaaagaaggcgccctgtccgagcctaagactcttggcaaggccatgggcgacttcactcctaaagccggcaatgaaagtacctcgtctacatgtaaaaacgaggctggaaccgatgcctggttttgggctggtgaggaggcaactatcaactcctggttctggaacggcgaagaggcgggcaactctttcagcaccaagaacgataaacccgagattggcgcgcaggtctgtgcagaagagttggagccagccgccggcgccgattgtaaacctcgctccggcgccgaggaggaggaagaagagaatgtgattggaaattggttttgggagggcgatgatacgtcgttcgatccaaacccaaaacctgtctcacgtatcgtgaaacctcagcctgtttacgagattaacgagaaaaaccggcctaaagattggagtgaagtgaccatctggcctaatgctccagccgttactccggctgtgcttggctttcggtcccaggcaccatcagaagcctccccgccctcttacatcgtgctggcctccgctgaggaaaacgcttgcagtttgccggtggccactgcatgcagacctagcaggaatacccgttcctgtagtcagccaatccccgagtgtcgcttcgactctgatccctgcattcagacgattgatgaaatcagacggcagatccggattcgggaggtgaatggaatcaagcctttcgcctgtccttgcaaaatggagtgctacatggacagtgaagaattcgagaaattagtgagtttgttaaagagcactactgatcctctgattcacaagatcgctagaatcgccatgggggtgcataatgttcaccccttcgcacaggagtttataaacgaggtcggggtggtcaccctgattgagagtttgctgtcctttccctctcctgagatgcgaaagaaaacagttatcacactgaacccacctagcggggatgaacgtcagcgtaaaatagagctgcacgttaagcacatgtgcaaagagactatgtccttcccccttaactctcctgggcagcagagtggactgaaaattctaggccagctgacgactgacttcgtgcatcactacatcgttgccaactatttcagtgaactgtttcacctcctgagctctggcaactgcaagaccaggaacttagtgctgaagctgctgttgaatatgtccgaaaaccctaccgctgctcgtgatatgatcaacatgaaagctttggcggctcttaagctgatatttaaccaaaaggaagcaaaggcaaatctggtaagcggagtcgctattttcatcaatattaaagaacatatccgcaaaggctcaattgtggtggtggatcacctctcatataacacacttatggccatattccgagaggtcaaggaaataatagaaacaatgtag

SEQ ID NO: 53951 - DNA, 5130 bp, Artificial Sequence
  derived and/or modified sequence
gagaatcgaagtgaggagccgccagaggagagctgaggagaggagggggaggtcgacgacctgggccctgggcctctgaaggaaaggagctgtaacttctattgggaaaatgactgacttcaaagttggcaggaggtgtaatcaggctgcaggtcttggggtgattagggaatcattgaggaagagcagacaggtctgtttctttctaggttcctgtagagatctgtatgtagctgttcacttggaagttaattaagaaagaacaaaaactattcatttggattcaaggtccatctccactggtggctgtggtggctttggattgttggaagaccatcaccttcagcaggtctgcacttgggaacaatcattctcccccagcccgagcgtgcctctgccctctgtatcattgacagaggctgtatgtttggaaagagaactttgtgactgcagaactgacagttgactctaattcttgctaccaagtttttccccgacccagtgaaagagtgttaagacttcgacctaggacacattgagaaccaaggccaagactggacagggccatataactgggcttcaaccatggctgggactaagaataagacaagagcccaggccaaaactgaaaaaaaggctgctatacaagctaaagctggagcagagagggaggctactggtgttgttaggcctgtagccaagaccagggccaaagcaaaagccaagacagggtctaagacagatgcagtagcagagatgaaggcagtgtctaagaacaaggttgttgctgagacgaaggaaggagctctgtcagagcctaagactctgggcaaagccatgggagatttcactcccaaggctgggaatgagtccaccagctccacatgtaaaaatgaggctggtactgatgcctggttctgggctggggaagaggccactatcaattcctggttctggaatggagaagaggctggtaatagtttcagcactaagaatgataaacctgaaattggtgcccaggtctgtgctgaggagttggaacctgcggctggggccgattgcaaacctaggtcaggggctgaggaggaggaggaagagaatgttattgggaactggttttgggaaggagatgatactagttttgaccctaatcctaaacctgtgagcaggatagttaagcctcagcctgtgtatgaaattaatgaaaaaaataggcccaaggactggtctgaggtaactatctggcccaatgcccctgctgtaactccagctgtgttaggatttagatcccaggcaccatctgaggcaagccctccttcatatattgttctggcctccgctgaagaaaatgcctgttctttgcctgtggcaacagcttgccgcccttctaggaacactcgctcatgctcacagcctatccctgagtgtcgttttgattctgacccctgcatccagaccatagatgagattagacgtcaaatcaggatcagggaggtaaatgggattaagccatttgcttgtccttgcaaaatggaatgctatatggattctgaggaatttgaaaaacttgttagcttacttaagtcaactactgatcctcttattcataaaatagcacggattgcaatgggtgtccataatgttcacccatttgcccaagagtttattaacgaagtaggtgtagtgacacttattgaaagcttgctcagttttccttcccctgaaatgagaaaaaagactgtaattactctgaatcctccttctggggatgaaagacaacgcaaaattgaattacatgttaagcatatgtgtaaagaaaccatgtcatttcctttgaactcaccgggacagcaatctggattaaagatactaggacaactgactactgattttgtccatcactacattgttgccaattacttttcagagcttttccatttgctgtcctcaggaaattgcaaaaccagaaatcttgttttgaaactacttttaaatatgtctgaaaatccaactgcagccagagacatgatcaatatgaaggcattggcagcattaaaactcatctttaaccagaaagaggcaaaagccaatcttgttagtggtgtggccatatttattaacataaaggagcatatcagaaaaggctcaattgtagttgttgatcacttgagttataatacactcatggccattttcagggaagttaaagagattattgaaacaatgtaaaatgagccagagatagaacattttaagccatcttcaaactctagcaggctgtacattacagtgtacacattatacactgcatctttaacacagagtcacctgtgacaggctctaggtttgagctagactattttgggggtatcaaatgaatattataccttgggctgaaaatgtttgatttttatcttgtctagattggcatatttttaacattttacttaagatagcaaaccagttcgttttaagtaagctaacttgttcattagtatctgtggcttaaaatggcaaaaaagaaaatatccttgagtttgtaatctagttacagaagtaaggcatacacacacacaaagataacagtacctagagagagagtgtgtgtgagtgtgcgtgtctctgtgtgtgcacgtgcacgctcatggccaaatgtgcgcactctacataaaggaggcaggagttcctataggctatttaatgtaagagaaactatttttctcctgttccagctgtatcagatactcgttccgcaacacagaaatgactcagaatctcagacaaaatgtattatttgttcaattttaattttgctactacattcataactcttaaattgttaggctgtttcatttacatcaaagttatctcacaaaagagaaggcaggaaacgttttgtgagtgcctattctatgtcaaacactgtgttggcaccatattttacaagtttttttcctcttctcacagtgatcttgtgagttagttacttatatttttattagaactcattattctgggtaccctccaatgagaattagagaggttaaataccttttcctagattcccacagcaggaaggtggcatagctgttttgtctgacaccagaacccatctcaccacactgctttacagtcttcctgaaggacattttgaggtgggggggccttcaaagctcagagactggtttgaatggtttaattttgcaatggatcatgtccatgccaggtgttacaattcttaacttcctccaaattcgtgtgtccattagacatttggctacatctggctggaggtcaggagaaaattctgaggtaaatagatggattttatctggcagtgtcgaaaatagtaggagcctaaaactttgttcaatgagtaagatgtagatttggagtcatcagcaggggaaacttgttagatgtcctttgtatctttttctatccatttgtattttttctttcccaaagagctgaaatcattttataccctgaatttaaaaggtaattgcttttttcctccttgcgaaatcataccttaattttttttttttttttttttaccatttatgatttattctcctatgtgtcatatgaaaggccaaggggctttatcttttactagtaggcaagcctgggcatttctgcatttgtgccagctaacactacaaaatagacttaattagagaaatttagacccagaattgcagcttcaacaacacaaaacaggaaagctagaagaggttgctgtgtcaacctacaagatagtgattcttggaagttggtatggaccagaaagcattcccaggacatttaggctatggctgagttctctaagactcagggtgggaattataatccctggtctaagctgatatgaaagtttctatgtgtgaaaatatggagttatatgctttgagattttctgccagttaaactaaaacaagatcatactgtaaatgtttgtaacttgcttccccccactgtatactgtaaacatctttgcatgtcaataaatatgcctctacaacatatttttgaatcacttaatatttttcccatgttaacagttggtatatagtgttgtaaacctttattgcatattctcataacatacaatatacacattcttttgcaaaaatgggaacacagtattgagacttgccttttcctcttaacacttatcttttcaatttagtattatatagatctgtcacatgctttttatctaataactttatagaaatataattgccatacattaagctgcatgttgaaagtatacagtgtgatcagttttggaatgtatatacacacaaaaccataaccacaatcaaaattgtaaatacattcatcacccaccaaagctactttttttttgagacagagtcttgctctgtcacccaggctggagtacagtggcgcaatctcggcccactgcaacctctgcttcccaggttcaagtgattctcgtgccttagcctcctgagcagctgggactacaggtgcatgccaccacatccgactaatttttttttttattttttgtatttttagtagagacagggtttcaccatgttggccaggctggtcttgaactcctggtctcaagtgatctacccatcttggtctccctgagtgccaggattacaggcgtgagccaccatgcccagcctcccccaaagcttcttaatgcccttttgtaatccctccctcccctctctccctgtgcccctaacccaggcaaccatgggacattttctgacaaaatagaattgttttcatttcctgtaattgtgtataaatggactcatatagcatgtactctttggtcgggaggggatctggcttatttcacttagtgtaattatttgagattcatccatatcatgtgtctcactatttcattgctttttattgccaagtagtattccaccatatggctttaccacagtttatttatccattcacttattgatggacatttgggctgttcagagtttggccattataagtaaagcagctatgagcatttgtgtacaagtgtttttatggacataggctttcatatctttggaatgacatctaacaatattgaatcttcgacccatgaataaaatctctctccactta

SEQ ID NO: 53952 - DNA, 1644 bp, Artificial Sequence
  derived and/or modified sequence
atggccggcaccaagaacaagacccgggcccaggccaagacagagaagaaggccgccatccaggccaaggccggggctgagcgggaggccactggagtggtgcggcctgtggccaagacccgggccaaggccaaggccaagacaggcagcaagacagatgctgtggccgagatgaaggctgtgtccaagaacaaggtggtggccgagaccaaggagggcgccctgtctgagcccaagaccctgggcaaggccatgggagacttcacccccaaggctggaaatgaaagcaccagcagcacctgcaagaatgaagctggaacagatgcctggttctgggccggggaggaggccaccatcaacagctggttctggaatggagaggaggccggcaacagcttcagcaccaagaatgacaagccagagatcggggcccaggtgtgtgccgaggagctggagcctgctgctggagctgactgcaagcccaggtctggagctgaggaggaggaggaggagaatgtcatcggcaactggttctgggagggagatgacaccagctttgaccccaaccccaagcctgtgagccgcatcgtgaagccccagcctgtgtatgagatcaatgagaagaaccggcccaaggactggagcgaggtgaccatctggcccaatgccccagctgtgaccccagctgtgctgggcttccgcagccaggcccccagcgaggccagccccccatcctacatcgtgctggccagcgctgaggagaatgcctgcagcctgcctgtggccacagcctgccggcccagcaggaacaccaggagctgcagccagcccatccctgagtgccgctttgacagcgacccctgcatccagaccattgatgagatccggcggcagatccgcatccgggaggtgaatggcatcaagccctttgcctgcccctgcaagatggagtgctacatggacagcgaggagtttgagaagctggtgtccctgctgaagagcaccacagaccccctcatccacaagatcgcccgcatcgccatgggcgtgcacaacgtgcacccctttgcccaggagttcatcaatgaggtgggcgtggtgaccctcatcgagagcctgctgtccttccccagccctgagatgaggaagaagacagtcatcaccctgaaccccccatctggagatgagcggcagaggaagattgagctgcacgtgaagcacatgtgcaaggagaccatgtccttccccctgaacagccctggccagcagagcggcctgaagatcctgggccagctgaccacagactttgtgcaccactacatcgtggccaactacttcagcgagctgttccacctgctgagcagcggcaactgcaagaccaggaacctggtgctgaagctgctgctgaacatgtctgagaaccccacagctgcccgggacatgatcaacatgaaggccctggccgccctgaagctgatcttcaaccagaaggaggccaaggccaacctggtgtctggagtggccatcttcatcaacatcaaggagcacatcaggaagggcagcatcgtggtggtggaccacctgagctacaacaccctgatggccatcttccgggaggtgaaggagatcatcgagaccatgtag

SEQ ID NO: 53953 - DNA, 1644 bp, Artificial Sequence
  derived and/or modified sequence
atggccggcaccaagaacaagacccgggcccaggccaagaccgagaagaaagccgcaatacaggctaaggcgggagctgagcgagaggccacaggcgtggtgagacccgtggccaagacgcgggccaaagccaaagccaaaaccggctcaaagaccgacgctgtcgctgagatgaaagccgtgagtaaaaataaagtagtggcggaaacgaaggaaggggctctgagtgagcccaagactcttggcaaagccatgggcgattttacacctaaggcaggcaacgaaagtactagctctacgtgtaagaatgaggccggcaccgatgcctggttctgggctggcgaagaggccaccatcaactcatggttctggaatggcgaagaagccgggaacagcttcagcacaaaaaacgacaaacccgagatcggcgctcaggtctgcgctgaggagctcgaaccagcagcaggtgcagactgtaagcctcgctctggtgcagaagaggaggaggaggagaacgtgatcggcaattggttctgggagggagacgatacctctttcgacccgaatccaaaaccagtatcacggattgtgaaaccacagcccgtctatgaaatcaatgaaaaaaatcgcccaaaagactggagtgaagtgaccatctggcccaacgcccccgccgtgacacccgctgtgttgggcttccgtagtcaggctccgagcgaggcatcaccaccgagttatatcgtcctcgcaagtgctgaagaaaacgcttgcagcctgcccgtcgcaactgcttgccgtcctagtcgcaatacgcggagttgcagccagcctattcctgagtgccggtttgacagcgacccctgtatccagactatcgatgaaattcgcaggcaaatacgaattcgagaggttaacggaataaagccctttgcttgtccgtgtaaaatggagtgctacatggatagcgaggagtttgagaagctggtgagcctgctcaaatcaactactgatcccttgatacacaaaatagcgcgaattgcgatgggcgttcacaatgtccacccattcgcccaggaattcatcaatgaagttggagtagtcaccctaattgagtctcttttgagttttcccagtcccgagatgcgcaagaagactgtaattacacttaatcctccgtccggggatgagcgccaacgcaaaattgaactccatgtcaagcatatgtgtaaagagacaatgagcttccctctgaattcgcccggccagcagtcaggtctcaagatcctgggacagctcaccaccgacttcgtccaccattatatcgtcgccaactattttagcgaactgtttcacctgcttagttctggaaattgtaaaacccggaatcttgttttgaagttgctcctgaatatgagcgaaaaccccacagctgccagagatatgattaatatgaaggctcttgctgctctcaagttgatctttaatcagaaagaagcaaaggccaacctcgtttccggggttgctatcttcattaacattaaagagcacatcagaaagggctccatcgtggttgtagaccatctgtcttataatacccttatggccatttttcgtgaggtaaaagaaatcattgaaaccatgtag

SEQ ID NO: 53954 - DNA, 1644 bp, Artificial Sequence
  derived and/or modified sequence
atggccggcaccaagaacaagacccgggcccaggccaagaccgagaagaaagcagcgatccaggctaaggctggggccgagagagaggccactggtgtggtgcgtccagttgctaagactcgggccaaggccaaggccaaaacaggtagtaagacagatgccgtcgcagagatgaaagcggtcagcaagaataaagttgtcgcagaaacaaaagaaggggccctgagtgagcctaaaacactcggaaaggctatgggggatttcacccccaaggcaggcaacgaatctacttcaagcacctgtaagaacgaggccggcactgatgcatggttttgggctggagaggaggcgaccatcaacagctggttttggaacggcgaagaggctggtaactctttttccaccaaaaatgacaagcctgaaatcggcgcacaggtttgcgccgaagagcttgaacctgctgcaggggcggactgcaaaccacgatcaggcgctgaagaagaggaggaggaaaatgtgattgggaattggttctgggagggggatgacacgtctttcgaccccaacccaaagccggtgtcccggatcgtgaagccacaacctgtatacgaaatcaacgagaagaatcgaccaaaggactggagcgaagtgaccatttggcccaacgcccccgcagtgacaccggccgtgctcggattccgaagccaagctcccagcgaggcgagccctccctcctacatcgtgttagctagcgcagaagagaacgcttgcagccttcccgttgccactgcatgccggcctagtcggaacacacgatcgtgcagtcagccaattcctgagtgtcggttcgattcggacccttgcatccagactatagacgagatacgacggcagatcaggatccgggaagtgaacgggatcaagccttttgcttgcccctgcaagatggaatgttacatggacagcgaggagtttgagaagctagtgtcacttctgaagtccactacagaccctctgatacacaagatcgcccggattgccatgggcgtgcataacgtgcacccttttgcgcaggaattcatcaatgaggtgggtgtcgtgacgctgatagagtccctgctgtcttttcccagtcccgagatgcgtaagaagacggttattaccctaaatccaccttccggggacgagcgccagaggaagatcgagctgcacgtgaagcacatgtgcaaggagacaatgtcattccctctgaatagtcccggccaacagtccggcttgaagatactcggccagcttactaccgattttgtgcaccactacatcgtggcaaattatttttccgaacttttccacctcctgtcttccggcaattgtaaaacaaggaatctcgtgttgaaattgctgctcaatatgtccgaaaaccctacagctgcacgggatatgatcaatatgaaagcacttgctgcactcaaactgatctttaaccagaaagaggcaaaagccaatttagtctccggcgtcgctatcttcatcaacataaaggaacatattaggaaaggctcgatcgtggtggtggaccatcttagctataatacactgatggctattttcagggaagtgaaggaaatcatagagacaatgtag

SEQ ID NO: 53955 - DNA, 1644 bp, Artificial Sequence
  derived and/or modified sequence
atggccggcaccaagaacaagacccgggcccaggccaagaccgagaaaaaagctgcgattcaggcgaaagccggggccgagcgtgaggcaaccggcgttgtgcgacccgtggcaaagactagagcaaaggcaaaagcgaagaccggttctaaaactgatgcagtcgccgagatgaaggccgtgagcaaaaacaaggttgtggccgagaccaaggaaggagctctgagcgagccgaagaccctaggtaaagcaatgggcgacttcacacccaaggccgggaacgaatccacatcttcaacgtgcaaaaacgaggctggcaccgacgcctggttctgggccggggaagaagccacaatcaactcctggttctggaacggagaggaggcaggcaatagcttctctaccaaaaacgacaagccagagattggtgcgcaggtctgcgccgaagagctcgaaccagcagccggagccgactgcaagcccaggtccggggccgaggaagaggaagaagaaaacgtgatcgggaattggttctgggagggagatgatacgtcatttgatccaaacccaaagccagtcagtagaatcgtcaagccccaaccggtgtacgaaattaatgaaaagaatagacccaaggactggtcggaggttaccatctggccaaatgcacccgcagtgacccctgccgtgctaggatttcgcagtcaggccccctccgaagcctctcctccctcctacattgtccttgcttcagccgaggaaaatgcatgctccctccccgttgctacagcctgcaggccatcacggaataccaggtcatgcagtcagcccatcccagaatgccggttcgacagtgacccctgcattcagacaatagatgaaattcggagacagatacgcatacgagaggttaacgggattaagccgttcgcttgtccctgcaagatggagtgttacatggattctgaagaattcgagaaactggtctctctacttaaaagcacgaccgacccgctgattcataagattgcacgaattgcgatgggcgtgcataacgtgcacccattcgcacaggagtttatcaatgaagtgggggttgtgacacttatcgagtccctactatccttcccatctcccgagatgcggaaaaagacggttatcactctaaatccacctagcggggacgagcgtcagcgaaaaatcgagctgcatgttaagcacatgtgtaaagaaaccatgtctttcccactcaacagccctgggcaacaaagtgggctgaaaattctgggccagctcactaccgactttgtgcaccactatatcgtggctaactactttagcgaactgttccatctgctgagttctggcaattgcaagacaagaaacctggtcctgaaactattgttaaatatgagtgaaaatcctactgctgcgagagatatgattaacatgaaggccttagccgcattgaagcttattttcaatcagaaagaagctaaagccaacctggtatccggggtggcgatcttcattaacatcaaggaacatatccgcaaaggttcaatagtcgtcgtcgaccacttaagttacaacacccttatggcgatcttccgcgaagtgaaggagataatcgaaacaatgtag

SEQ ID NO: 53956 - DNA, 1644 bp, Artificial Sequence
  derived and/or modified sequence
atggccggcaccaagaacaagacccgggcccaggccaagaccgagaagaaggctgccattcaagccaaggcaggcgctgaaagagaggctacaggggtcgttcggccagttgcgaagaccagggcgaaagccaaggccaagaccggttccaaaaccgatgcggtggccgagatgaaggcagtatcaaagaacaaggtcgtggctgagaccaaggaaggcgcgctaagcgaaccaaaaactttgggcaaagcaatgggcgatttcactcccaaagcaggtaatgagtctacgagctccacatgtaagaatgaagccggaaccgacgcttggttttgggctggtgaggaagctactatcaactcctggttttggaacggcgaggaggctggcaattcattttctacgaaaaacgacaagccggaaatcggggcacaggtctgtgcggaggaattggaacctgctgccggcgccgactgtaaacccaggtctggcgccgaagaggaagaggaagagaatgtgatagggaactggttttgggagggtgacgataccagctttgaccctaaccctaaaccggtcagtagaattgtcaaacctcagcccgtctacgaaatcaacgagaaaaatcgtcctaaagactggagcgaagtgaccatctggcccaacgcgcctgccgttacccctgccgtgctgggattccgctcacaagccccttctgaagccagtccaccatcgtatatcgttttggcctctgccgaggagaacgcctgcagcctgccagtggctactgcatgccgccccagcagaaatacccgaagctgtagccagcctatccccgaatgtcggttcgactctgacccatgcatccaaaccatcgacgagatccgcagacaaatacggatccgcgaggtgaatggcattaaaccatttgcctgcccctgtaaaatggagtgctacatggacagcgaagaatttgaaaaactggtgagtcttctgaaatccaccaccgacccattgattcacaagattgctcgcatcgctatgggcgtccataatgtccacccatttgcccaggagtttattaatgaagtgggcgtggtaactctaatagagtcactgctgtccttcccttcaccagaaatgaggaaaaaaactgttattactcttaatcccccatctggagatgagagacagcgaaaaattgagctccatgtgaagcacatgtgcaaagagaccatgagttttcccttaaactcacctggacagcagtctgggctcaagattctggggcagcttaccactgactttgtgcaccactatatagtggctaactatttctctgaattgttccatcttctctcttccggcaattgcaaaaccaggaatctggtactcaaattgctactgaatatgtccgagaaccctacagccgcgcgggatatgatcaacatgaaggcactagccgcactgaagctaatcttcaaccagaaggaagccaaagctaacttggtgtcaggagtggctatttttataaatattaaagaacacatacggaagggttcaatagtggttgtcgaccatttgtcctataacactttgatggccattttcagagaggtgaaggaaattatagaaactatgtag

SEQ ID NO: 53957 - DNA, 1644 bp, Artificial Sequence
  derived and/or modified sequence
atggccggcaccaagaacaagacccgggcccaggccaagaccgagaaaaaagccgctatccaggcgaaggctggagcagaacgggaagcaaccggcgtcgttaggcccgtggccaagacaagggcaaaggctaaggccaagacaggatccaagacagatgcagttgcagagatgaaggcagtctccaagaacaaagtagtggccgagacaaaagagggagctttgagcgaaccaaagacgctcggcaaggcaatgggggactttactcctaaagccggcaacgagagcacctcctctacatgtaagaatgaggcgggaactgatgcctggttctgggccggagaagaagcgacaataaactcatggttttggaacggagaagaggccggcaactccttttccactaaaaacgacaaacctgagatcggagctcaggtgtgcgcagaagaactggagccagccgccggcgctgactgtaagcctcgcagcggcgccgaagaggaagaggaagagaatgtgatcggcaattggttttgggagggggatgacactagcttcgaccccaatcctaaacccgtttccaggatcgtgaaaccacagcctgtatatgagatcaacgagaagaatcgacctaaggattggtccgaggttacgatctggcccaatgcccctgcggtgaccccagcagtgctgggatttagatcacaggctccatcagaggcctcaccaccatcgtatattgttctggcctcagccgaagaaaatgcttgttcactacctgtggcaacggcatgtcgaccttcaaggaatactagatcttgctcccaaccaattcctgaatgcagatttgattctgatccctgcattcaaacaatcgacgaaataaggcggcaaattcggatccgagaggtaaacgggattaagcccttcgcttgtccttgcaaaatggaatgttacatggacagtgaagaattcgaaaaactggtgtcactcttgaagtccaccaccgaccctctgatacacaaaatcgcaaggatcgcgatgggcgtgcacaatgtgcatcccttcgcacaggagtttataaatgaagtcggagtggtcactctgatcgagagccttctgtccttcccttctcctgaaatgaggaagaaaaccgttattactctgaatcctcccagtggagacgagcggcaaagaaaaatcgagctgcacgtcaaacacatgtgtaaggaaaccatgtctttccctctaaattctcccggacaacagtctggacttaaaattctcggtcaattgaccacagacttcgtacatcactacatagtggctaactatttctccgagttgttccatcttctttcgagcggcaattgcaagacgcggaatctggttctaaaactgctgcttaatatgtctgaaaaccccacagctgcgcgggatatgattaacatgaaagcgctggctgcgctgaagttgatttttaaccagaaggaggctaaggctaacctagtgagcggagtagcaatattcatcaacataaaagaacatattcggaagggatccatagttgtagttgaccatctgagttacaacactttgatggcaatattccgagaggtaaaagagattatcgagaccatgtag

SEQ ID NO: 53958 - DNA, 1644 bp, Artificial Sequence
  derived and/or modified sequence
atggccggaactaagaataaaacacgcgcacaggcaaagactgaaaaaaaggctgctatacaggctaaagctggcgcagagagggaagccaccggagtggtacggcctgtcgcaaaaacccgcgctaaggctaaggctaaaacaggctccaaaaccgatgccgttgccgaaatgaaggccgtttcaaagaataaggtggttgcggaaacaaaggaaggagccttgagcgagcctaaaacacttggtaaggctatgggcgatttcacgcccaaggccggaaatgagagcaccagttccacttgcaagaatgaggcgggaacagacgcatggttttgggctggagaggaggccaccataaattcctggttttggaatggagaggaggccggtaatagtttctccacgaagaacgataaaccagaaatcggggctcaggtgtgtgctgaggagttggagccagccgctggcgctgactgcaagcctcggtccggcgcagaggaagaggaggaggagaatgtgatagggaactggttttgggaaggggacgatacctccttcgaccctaaccccaagccagtttccaggattgtgaagccacagcccgtttacgagatcaacgaaaagaaccgccctaaggattggtctgaggttactatatggccgaatgccccagccgtgacccccgctgtactgggattccgcagccaggcgccatccgaggccagccccccatcctatattgtcctagcctccgccgaagaaaacgcctgttctcttcctgttgcaacggcttgccgcccttccagaaatacgcggagttgcagtcagcctatccctgaatgccgattcgattcagacccctgtatccaaactatcgatgagatacgtcggcaaattcgaatccgcgaagtgaacggtatcaagcccttcgcctgtccctgcaagatggagtgttacatggattccgaggagttcgaaaaactcgtgtctttattaaagtcaactactgatccactgattcataagatcgcaaggatcgccatgggagttcataacgttcatccgttcgctcaggaattcattaatgaagtaggagtggtcactctgattgaaagtttgctttcctttccaagtcctgagatgaggaagaagacggtgatcaccttgaacccaccctcgggggatgaacgccagcgtaaaatagaattacacgtaaaacatatgtgtaaggagaccatgagcttccctctgaactccccaggtcagcagtcaggactcaagattttagggcagctgactaccgacttcgtgcatcattatatcgtagccaactacttctctgaattattccatttgctctcatctggcaactgtaagactcggaacctagtactcaagctcttactcaacatgagtgaaaaccccactgcagcccgtgacatgatcaacatgaaggcactcgccgcactgaagcttatctttaaccaaaaggaagcaaaggccaatctggtcagcggagttgccatttttatcaacatcaaggagcatattcggaagggctctatcgtggtggtggaccatttgtcctataacacactgatggcaattttcagagaagtgaaggagattattgaaacaatgtag

SEQ ID NO: 53959 - DNA, 1644 bp, Artificial Sequence
  derived and/or modified sequence
atggcagggactaagaacaagaccagagctcaggccaagacagagaagaaggccgctatccaggccaaagccggtgcagaacgagaggctaccggagtcgtgcgtccagtcgccaaaactcgagctaaggcaaaagccaagacaggatccaaaactgatgcagtcgctgagatgaaggcggtgtctaagaacaaagttgttgccgaaaccaaggagggtgccctcagcgagcctaaaacgctggggaaagcaatgggcgatttcacacccaaggcaggaaatgagagtacgtcatcaacctgtaaaaacgaggccggtactgacgcctggttttgggcaggagaagaggctacgatcaacagctggttttggaacggcgaagaagccggaaattccttctccaccaaaaatgataagcctgaaataggagcacaggtctgtgcggaagagctcgaacccgctgccggagcagactgtaaacctcgctcgggagccgaggaggaggaagaagaaaatgtgatcggaaactggttttgggagggcgacgacacctcattcgatcctaatcccaagccagtttctagaatcgttaagcctcagcccgtgtatgaaatcaatgaaaaaaaccgtccaaaagactggtccgaggtgaccatctggcccaacgccccagctgtcacaccggctgtgcttggcttccgcagccaggccccaagtgaggccagcccaccttcttacatcgtgctggcgtcggcggaagaaaacgcgtgcagcctccctgtggcgacagcatgcagaccaagcagaaacacccggtcatgcagccagccaattcccgagtgcagattcgattcagatccctgtatccaaaccattgatgagattagacgtcaaatcaggattcgggaagtcaatggtatcaagccatttgcctgtccctgcaaaatggaatgctatatggattctgaagaattcgagaagctggtttcgcttcttaagtccacaaccgaccctctgatccataagattgctcgaatcgccatgggagttcacaacgtgcaccctttcgcccaagagttcatcaatgaggtgggtgtcgtgacgctgattgagtctctacttagctttccgagccctgaaatgcgcaaaaagacagtaattactctgaacccaccctctggtgatgaacgccaaagaaagatcgagctccacgtgaagcatatgtgtaaggaaaccatgagtttccccctgaattccccaggacagcaaagtggactgaaaattttaggccaactcactacagacttcgtacaccactatatcgtggctaattacttcagtgaactattccatctcctctcatccggcaattgtaagacaagaaacttagtcctgaagctgttacttaatatgtccgagaaccctacggcagcaagagacatgatcaacatgaaagctttagccgctctgaaacttatctttaatcagaaagaagccaaggcaaacctggtgtccggggttgccatattcattaatatcaaagagcacatcaggaagggcagtattgtcgtagtagaccacttgtcctataacacactaatggcaattttccgagaagtcaaagagataatcgaaacgatgtag

SEQ ID NO: 53960 - DNA, 1644 bp, Artificial Sequence
  derived and/or modified sequence
atggccggtacaaaaaacaagactcgcgcacaagctaagacagagaagaaggccgcaatccaggctaaggccggagccgagcgcgaggccacaggcgttgtcagacccgtggcaaaaacaagggccaaggccaaggcgaagacgggctccaagaccgatgctgtggccgaaatgaaggcagtgtcaaagaataaagtggtagccgaaaccaaggagggggctctctccgagccaaaaacactagggaaggcaatgggagactttacccctaaggcgggaaacgaaagtacctcatctacgtgtaagaatgaggctggcactgacgcgtggttttgggcaggcgaagaagccacaatcaactcatggttttggaacggagaggaagcaggtaattctttctcaacgaagaacgataaacccgaaataggtgcccaggtgtgtgccgaagagttggagccggcagccggtgccgattgcaaacctaggtcaggtgcggaggaggaggaggaagaaaacgtgatcggaaattggttttgggagggagacgataccagttttgaccctaatccaaaaccagtcagtcgaatcgttaaacctcaaccggtttacgagattaacgaaaaaaaccgacctaaggactggtcagaggtgacaatttggccaaatgccccagccgtcactcctgccgtgctaggcttccgctcccaggccccaagtgaagcgagcccccctagctacatagtactggcaagcgctgaagagaatgcttgttctcttcccgtggccaccgcttgccggcctagccggaatacgcgctcttgctcccagccaattccagagtgtcggttcgattcagacccgtgcatccaaactatcgacgagattcgaaggcaaatcagaatccgcgaagtcaatggcataaaaccgtttgcatgtccctgcaagatggagtgctatatggactctgaggaattcgagaagctcgtctctttactgaagtcaacgaccgatcccctgatccacaaaatagccagaattgccatgggagtgcataatgttcacccattcgcacaggagttcatcaatgaggttggggtagtgaccctgatcgagtccctgttgtctttccccagccctgaaatgcgcaaaaagacagtgataacgctgaatccaccctcgggcgatgaaagacagagaaagatcgagctgcacgtcaagcacatgtgtaaagagactatgagctttccactgaacagccccggacaacagtccggcctgaagattctgggacagctcaccactgatttcgtgcaccattatatagttgccaactactttagcgaactgtttcatctgcttagttcaggcaattgtaaaacacgcaatctggttctcaaactgctgctcaacatgtctgaaaatccaactgcagccagagacatgataaatatgaaagcgctcgctgccctgaaattaatctttaaccagaaggaagccaaggctaatctcgtgtctggggtggctatttttatcaatattaaggaacatatccggaaagggtcaatcgtcgtcgtggaccatttaagctacaacaccttgatggcaatctttagagaggtcaaagaaatcattgagaccatgtag

SEQ ID NO: 53961 - DNA, 1644 bp, Artificial Sequence
  derived and/or modified sequence
atggcaggtacaaagaataagaccagggcccaagccaagaccgaaaagaaagccgcaattcaagcgaaggccggtgccgagcgggaggcaactggagtggtcaggcctgtggctaaaacgcgggctaaggctaaggccaaaacgggctcaaaaacagatgccgtcgccgagatgaaggctgtttcaaaaaacaaagtggtggcggagaccaaggaaggcgctctgagcgagcccaaaaccttaggtaaggccatgggagattttacaccaaaggcaggcaatgagagcaccagctctacatgtaaaaacgaagcaggtaccgatgcttggttttgggccggagaggaagcaacaatcaattcatggttttggaacggggaggaagccggtaacagtttttcaacaaagaacgacaaacctgagattggtgcgcaggtctgtgccgaggagctggaacctgccgctggcgctgattgcaaaccaagatccggggctgaagaggaggaggaggagaacgtgataggcaactggttttgggaaggcgatgacacctcttttgatcctaatcccaagccagtgagtagaatcgtgaagccgcaacccgtgtatgagattaatgagaagaatcgtccaaaagattggtcagaggtcaccatatggccgaatgccccagcagtgactcctgcggtattaggattccgaagccaggctccaagcgaggcaagccctccatcttatatcgttcttgccagcgctgaagagaacgcctgttcattgccagtggctactgcttgtagaccctcaaggaacacaaggagctgttctcagccaatccccgaatgcagatttgactcggatccgtgcattcaaactatagatgaaattcgtagacaaattcgaatcagggaggtcaacggcatcaaaccgttcgcatgtccttgcaagatggaatgttacatggacagcgaggagttcgagaagttggtctcactgctgaagtccacaacagacccactgatacacaagattgcccgaatcgccatgggagtccataacgtgcacccttttgcccaagaattcatcaatgaagtgggagtagtcacactgattgagtcgctcttgtcatttccatcccccgagatgaggaagaagacagtgattaccctgaatcctcctagcggggacgagcgacagaggaaaattgaactgcacgtgaagcacatgtgtaaggaaacgatgagcttccctctcaacagcccgggtcagcagtcaggccttaagatattgggccagttaacaacagattttgtgcaccattacattgtggcgaactacttcagcgaattatttcatctcctgagctctgggaactgtaaaactagaaatctggtgctcaaactgctgttaaacatgtctgagaatcccactgccgctagggacatgatcaacatgaaagccctggccgcacttaaattgatcttcaatcagaaggaggccaaggccaatcttgtatccggtgtggccatattcattaacattaaggaacacatccggaaaggctcaatagttgtggtcgaccatctgtcttataataccctcatggctatatttagggaggtgaaggagatcatagaaactatgtag

SEQ ID NO: 53962 - DNA, 1644 bp, Artificial Sequence
  derived and/or modified sequence
atggccggtacaaaaaataaaacccgggctcaggcaaagacagaaaaaaaggctgccatccaggcgaaggcaggcgcagagcgagaagccactggcgtagtaaggccggtcgctaagactcgcgctaaggccaaagctaagactgggagtaaaaccgatgccgtcgccgaaatgaaggccgtctctaagaataaggtggtggcagagaccaaagaaggcgcactgtcagagccaaagactctgggtaaggccatgggcgattttactcccaaagccggtaacgaatcaacttcctccacatgtaaaaatgaagccggaacagatgcatggttttgggctggcgaggaagccactattaatagttggttctggaatggggaagaggcgggtaattctttctctacaaaaaatgacaaaccggaaatcggcgcacaggtctgtgccgaggagctcgagccggctgccggagcagactgcaaaccacgttccggcgctgaagaggaagaagaagagaacgtcattggaaattggttttgggagggagacgacacgtcgttcgatcccaacccaaaaccagtctcaaggattgtgaaaccccaacctgtctatgagatcaacgagaaaaacagacctaaagactggagtgaagtgaccatttggcctaacgccccagcggtgacccctgccgtcctggggttccgctcgcaggcaccgtccgaagcttctcccccatcttacattgtgctcgccagtgcagaagagaacgcgtgtagtctgcccgttgccactgcatgccgtccttctagaaataccagatcttgttctcagcctatccctgagtgccggttcgacagtgatccgtgcatacaaacaatcgatgagattcgtcgacagattcgcataagggaagtcaacggaatcaaacccttcgcatgtccctgtaagatggagtgttacatggactctgaggagtttgagaagttggtgtcacttctcaagtccactactgatccactgatacacaaaatcgcaaggatcgccatgggcgtccataatgtccaccctttcgcacaggaatttatcaacgaggtaggcgtggtgaccttaattgagtcacttctatctttcccaagcccggagatgcggaaaaaaaccgtgattactcttaaccccccatctggcgatgaacggcagagaaagatcgagctacatgtgaaacacatgtgcaaagagaccatgagcttcccattgaactcacccggtcaacaatcaggactgaaaatcctaggtcagttaaccaccgactttgtccaccactatatcgtggccaattattttagtgagttgtttcacctcttgagcagcggcaactgcaaaacgcgtaatttggtcctgaaactgttactcaatatgtctgagaatcctacggccgctcgcgatatgattaatatgaaggcactggccgctctaaaacttatctttaaccagaaggaagccaaggctaaccttgtctctggcgtcgctatctttattaacatcaaagagcacatccgcaagggttccatcgttgtcgtcgaccatctctcatacaataccctcatggctatctttcgggaggtgaaagagattatcgagacaatgtag

SEQ ID NO: 53963 - DNA, 4031 bp, Artificial Sequence
  derived and/or modified sequence
acaccctcgcggagagagcggttcttgcagcatcctgcgcagcccctgcccagtttggtgcagaggcgtggggggcgggacgcgtctttgccattctgatagcggggaaagcggtgagaatcgaagtgaggagccgccagaggagagctgaggagaggagggggaggtcgacgacctgggccctgggcctctgaaggtctgtttctttctaggttcctgtagagatctgtatgtagctgttcacttggaagttaattaagaaagaacaaaaactattcatttggattcaaggtccatctccactggtggctgtggtggctttggattgttggaagaccatcaccttcagcaggtctgcacttgggaacaatcattctcccccagcccgagcgtgcctctgccctctgtatcattgacagaggctgtatgtttggaaagagaactttgtgactgcagaactgacagttgactctaattcttgctaccaagtttttccccgacccagtgaaagagtgttaagacttcgacctaggacacattgagaaccaaggccaagactggacagggccatataactgggcttcaaccatggctgggactaagaataagacaagagcccaggccaaaactgaaaaaaaggctgctatacaagctaaagctggagcagagagggaggctactggtgttgttaggcctgtagccaagaccagggccaaagcaaaagccaagacagggtctaagacagatgcagtagcagagatgaaggcagtgtctaagaacaaggttgttgctgagacgaaggaaggagctctgtcagagcctaagactctgggcaaagccatgggagatttcactcccaaggctgggaatgagtccaccagctccacatgtaaaaatgaggctggtactgatgcctggttctgggctggggaagaggccactatcaattcctggttctggaatggagaagaggctggtaatagtttcagcactaagaatgataaacctgaaattggtgcccaggtctgtgctgaggagttggaacctgcggctggggccgattgcaaacctaggtcaggggctgaggaggaggaggaagagaatgttattgggaactggttttgggaaggagatgatactagttttgaccctaatcctaaacctgtgagcaggatagttaagcctcagcctgtgtatgaaattaatgaaaaaaataggcccaaggactggtctgaggtaactatctggcccaatgcccctgctgtaactccagctgtgttaggatttagatcccaggcaccatctgaggcaagccctccttcatatattgttctggcctccgctgaagaaaatgcctgttctttgcctgtggcaacagcttgccgcccttctaggaacactcgctcatgctcacagcctatccctgagtgtcgttttgattctgacccctgcatccagaccatagatgagattagacgtcaaatcaggatcagggaggtaaatgggattaagccatttgcttgtccttgcaaaatggaatgctatatggattctgaggaatttgaaaaacttgttagcttacttaagtcaactactgatcctcttattcataaaatagcacggattgcaatgggtgtccataatgttcacccatttgcccaagagtttattaacgaagtaggtgtagtgacacttattgaaagcttgctcagttttccttcccctgaaatgagaaaaaagactgtaattactctgaatcctccttctggggatgaaagacaacgcaaaattgaattacatgttaagcatatgtgtaaagaaaccatgtcatttcctttgaactcaccgggacagcaatctggattaaagatactaggacaactgactactgattttgtccatcactacattgttgccaattacttttcagagcttttccatttgctgtcctcaggaaattgcaaaaccagaaatcttgttttgaaactacttttaaatatgtctgaaaatccaactgcagccagagacatgatcaatatgaaggcattggcagcattaaaactcatctttaaccagaaagaggcaaaagccaatcttgttagtggtgtggccatatttattaacataaaggagcatatcagaaaaggctcaattgtagttgttgatcacttgagttataatacactcatggccattttcagggaagttaaagagattattgaaacaatgtaaaatgagccagagatagaacattttaagccatcttcaaactctagcaggctgtacattacagtgtacacattatacactgcatctttaacacagagtcacctgtgacaggctctaggtttgagctagactattttgggggtatcaaatgaatattataccttgggctgaaaatgtttgatttttatcttgtctagattggcatatttttaacattttacttaagatagcaaaccagttcgttttaagtaagctaacttgttcattagtatctgtggcttaaaatggcaaaaaagaaaatatccttgagtttgtaatctagttacagaagtaaggcatacacacacacaaagataacagtacctagagagagagtgtgtgtgagtgtgcgtgtctctgtgtgtgcacgtgcacgctcatggccaaatgtgcgcactctacataaaggaggcaggagttcctataggctatttaatgtaagagaaactatttttctcctgttccagctgtatcagatactcgttccgcaacacagaaatgactcagaatctcagacaaaatgtattatttgttcaattttaattttgctactacattcataactcttaaattgttaggctgtttcatttacatcaaagttatctcacaaaagagaaggcaggaaacgttttgtgagtgcctattctatgtcaaacactgtgttggcaccatattttacaagtttttttcctcttctcacagtgatcttgtgagttagttacttatatttttattagaactcattattctgggtaccctccaatgagaattagagaggttaaataccttttcctagattcccacagcaggaaggtggcatagctgttttgtctgacaccagaacccatctcaccacactgctttacagtcttcctgaaggacattttgaggtgggggggccttcaaagctcagagactggtttgaatggtttaattttgcaatggatcatgtccatgccaggtgttacaattcttaacttcctccaaattcgtgtgtccattagacatttggctacatctggctggaggtcaggagaaaattctgaggtaaatagatggattttatctggcagtgtcgaaaatagtaggagcctaaaactttgttcaatgagtaagatgtagatttggagtcatcagcaggggaaacttgttagatgtcctttgtatctttttctatccatttgtattttttctttcccaaagagctgaaatcattttataccctgaatttaaaaggtaattgcttttttcctccttgcgaaatcataccttaattttttttttttttttttttaccatttatgatttattctcctatgtgtcatatgaaaggccaaggggctttatcttttactagtaggcaagcctgggcatttctgcatttgtgccagctaacactacaaaatagacttaattagagaaatttagacccagaattgcagcttcaacaacacaaaacaggaaagctagaagaggttgctgtgtcaacctacaagatagtgattcttggaagttggtatggaccagaaagcattcccaggacatttaggctatggctgagttctctaagactcagggtgggaattataatccctggtctaagctgatatgaaagtttctatgtgtgaaaatatggagttatatgctttgagattttctgccagttaaactaaaacaagatcatactgtaaatgtttgtaacttgcttccccccactgtatactgtaaacatctttgcatgtcaataaatatgcctctacaac

SEQ ID NO: 53964 - DNA, 3936 bp, Artificial Sequence
  derived and/or modified sequence
acaccctcgcggagagagcggttcttgcagcatcctgcgcagcccctgcccagtttggtgcagaggcgtggggggcgggacgcgtctttgccattctgatagcggggaaagcggtgagaatcgaagtgaggagccgccagaggagagctgaggagaggagggggaggtcgacgacctgggccctgggcctctgaaggtccatctccactggtggctgtggtggctttggattgttggaagaccatcaccttcagcaggtctgcacttgggaacaatcattctcccccagcccgagcgtgcctctgccctctgtatcattgacagaggctgtatgtttggaaagagaactttgtgactgcagaactgacagttgactctaattcttgctaccaagtttttccccgacccagtgaaagagtgttaagacttcgacctaggacacattgagaaccaaggccaagactggacagggccatataactgggcttcaaccatggctgggactaagaataagacaagagcccaggccaaaactgaaaaaaaggctgctatacaagctaaagctggagcagagagggaggctactggtgttgttaggcctgtagccaagaccagggccaaagcaaaagccaagacagggtctaagacagatgcagtagcagagatgaaggcagtgtctaagaacaaggttgttgctgagacgaaggaaggagctctgtcagagcctaagactctgggcaaagccatgggagatttcactcccaaggctgggaatgagtccaccagctccacatgtaaaaatgaggctggtactgatgcctggttctgggctggggaagaggccactatcaattcctggttctggaatggagaagaggctggtaatagtttcagcactaagaatgataaacctgaaattggtgcccaggtctgtgctgaggagttggaacctgcggctggggccgattgcaaacctaggtcaggggctgaggaggaggaggaagagaatgttattgggaactggttttgggaaggagatgatactagttttgaccctaatcctaaacctgtgagcaggatagttaagcctcagcctgtgtatgaaattaatgaaaaaaataggcccaaggactggtctgaggtaactatctggcccaatgcccctgctgtaactccagctgtgttaggatttagatcccaggcaccatctgaggcaagccctccttcatatattgttctggcctccgctgaagaaaatgcctgttctttgcctgtggcaacagcttgccgcccttctaggaacactcgctcatgctcacagcctatccctgagtgtcgttttgattctgacccctgcatccagaccatagatgagattagacgtcaaatcaggatcagggaggtaaatgggattaagccatttgcttgtccttgcaaaatggaatgctatatggattctgaggaatttgaaaaacttgttagcttacttaagtcaactactgatcctcttattcataaaatagcacggattgcaatgggtgtccataatgttcacccatttgcccaagagtttattaacgaagtaggtgtagtgacacttattgaaagcttgctcagttttccttcccctgaaatgagaaaaaagactgtaattactctgaatcctccttctggggatgaaagacaacgcaaaattgaattacatgttaagcatatgtgtaaagaaaccatgtcatttcctttgaactcaccgggacagcaatctggattaaagatactaggacaactgactactgattttgtccatcactacattgttgccaattacttttcagagcttttccatttgctgtcctcaggaaattgcaaaaccagaaatcttgttttgaaactacttttaaatatgtctgaaaatccaactgcagccagagacatgatcaatatgaaggcattggcagcattaaaactcatctttaaccagaaagaggcaaaagccaatcttgttagtggtgtggccatatttattaacataaaggagcatatcagaaaaggctcaattgtagttgttgatcacttgagttataatacactcatggccattttcagggaagttaaagagattattgaaacaatgtaaaatgagccagagatagaacattttaagccatcttcaaactctagcaggctgtacattacagtgtacacattatacactgcatctttaacacagagtcacctgtgacaggctctaggtttgagctagactattttgggggtatcaaatgaatattataccttgggctgaaaatgtttgatttttatcttgtctagattggcatatttttaacattttacttaagatagcaaaccagttcgttttaagtaagctaacttgttcattagtatctgtggcttaaaatggcaaaaaagaaaatatccttgagtttgtaatctagttacagaagtaaggcatacacacacacaaagataacagtacctagagagagagtgtgtgtgagtgtgcgtgtctctgtgtgtgcacgtgcacgctcatggccaaatgtgcgcactctacataaaggaggcaggagttcctataggctatttaatgtaagagaaactatttttctcctgttccagctgtatcagatactcgttccgcaacacagaaatgactcagaatctcagacaaaatgtattatttgttcaattttaattttgctactacattcataactcttaaattgttaggctgtttcatttacatcaaagttatctcacaaaagagaaggcaggaaacgttttgtgagtgcctattctatgtcaaacactgtgttggcaccatattttacaagtttttttcctcttctcacagtgatcttgtgagttagttacttatatttttattagaactcattattctgggtaccctccaatgagaattagagaggttaaataccttttcctagattcccacagcaggaaggtggcatagctgttttgtctgacaccagaacccatctcaccacactgctttacagtcttcctgaaggacattttgaggtgggggggccttcaaagctcagagactggtttgaatggtttaattttgcaatggatcatgtccatgccaggtgttacaattcttaacttcctccaaattcgtgtgtccattagacatttggctacatctggctggaggtcaggagaaaattctgaggtaaatagatggattttatctggcagtgtcgaaaatagtaggagcctaaaactttgttcaatgagtaagatgtagatttggagtcatcagcaggggaaacttgttagatgtcctttgtatctttttctatccatttgtattttttctttcccaaagagctgaaatcattttataccctgaatttaaaaggtaattgcttttttcctccttgcgaaatcataccttaattttttttttttttttttttaccatttatgatttattctcctatgtgtcatatgaaaggccaaggggctttatcttttactagtaggcaagcctgggcatttctgcatttgtgccagctaacactacaaaatagacttaattagagaaatttagacccagaattgcagcttcaacaacacaaaacaggaaagctagaagaggttgctgtgtcaacctacaagatagtgattcttggaagttggtatggaccagaaagcattcccaggacatttaggctatggctgagttctctaagactcagggtgggaattataatccctggtctaagctgatatgaaagtttctatgtgtgaaaatatggagttatatgctttgagattttctgccagttaaactaaaacaagatcatactgtaaatgtttgtaacttgcttccccccactgtatactgtaaacatctttgcatgtcaataaatatgcctctacaac

SEQ ID NO: 53965 - DNA, 4082 bp, Artificial Sequence
  derived and/or modified sequence
attaggcctgccgagaggagtgttttcttgcatccagaaaagacctgagaggcggacgacacctgtgctccgcagagcagaacgtgggaggaacggcgggatgttaaggtaggagctcaagaagcagagagtctacctgcccgacgcgttcgtggagaggagcagcggttgctgttggaggaggtgggtgcaaggacggcagatggcatccctgagaggtggtgactgagactagatgcgggtgcaggtctgtttctttctaggttcctgtagagatctgtatgtagctgttcacttggaagttaattaagaaagaacaaaaactattcatttggattcaaggtccatctccactggtggctgtggtggctttggattgttggaagaccatcaccttcagcaggtctgcacttgggaacaatcattctcccccagcccgagcgtgcctctgccctctgtatcattgacagaggctgtatgtttggaaagagaactttgtgactgcagaactgacagttgactctaattcttgctaccaagtttttccccgacccagtgaaagagtgttaagacttcgacctaggacacattgagaaccaaggccaagactggacagggccatataactgggcttcaaccatggctgggactaagaataagacaagagcccaggccaaaactgaaaaaaaggctgctatacaagctaaagctggagcagagagggaggctactggtgttgttaggcctgtagccaagaccagggccaaagcaaaagccaagacagggtctaagacagatgcagtagcagagatgaaggcagtgtctaagaacaaggttgttgctgagacgaaggaaggagctctgtcagagcctaagactctgggcaaagccatgggagatttcactcccaaggctgggaatgagtccaccagctccacatgtaaaaatgaggctggtactgatgcctggttctgggctggggaagaggccactatcaattcctggttctggaatggagaagaggctggtaatagtttcagcactaagaatgataaacctgaaattggtgcccaggtctgtgctgaggagttggaacctgcggctggggccgattgcaaacctaggtcaggggctgaggaggaggaggaagagaatgttattgggaactggttttgggaaggagatgatactagttttgaccctaatcctaaacctgtgagcaggatagttaagcctcagcctgtgtatgaaattaatgaaaaaaataggcccaaggactggtctgaggtaactatctggcccaatgcccctgctgtaactccagctgtgttaggatttagatcccaggcaccatctgaggcaagccctccttcatatattgttctggcctccgctgaagaaaatgcctgttctttgcctgtggcaacagcttgccgcccttctaggaacactcgctcatgctcacagcctatccctgagtgtcgttttgattctgacccctgcatccagaccatagatgagattagacgtcaaatcaggatcagggaggtaaatgggattaagccatttgcttgtccttgcaaaatggaatgctatatggattctgaggaatttgaaaaacttgttagcttacttaagtcaactactgatcctcttattcataaaatagcacggattgcaatgggtgtccataatgttcacccatttgcccaagagtttattaacgaagtaggtgtagtgacacttattgaaagcttgctcagttttccttcccctgaaatgagaaaaaagactgtaattactctgaatcctccttctggggatgaaagacaacgcaaaattgaattacatgttaagcatatgtgtaaagaaaccatgtcatttcctttgaactcaccgggacagcaatctggattaaagatactaggacaactgactactgattttgtccatcactacattgttgccaattacttttcagagcttttccatttgctgtcctcaggaaattgcaaaaccagaaatcttgttttgaaactacttttaaatatgtctgaaaatccaactgcagccagagacatgatcaatatgaaggcattggcagcattaaaactcatctttaaccagaaagaggcaaaagccaatcttgttagtggtgtggccatatttattaacataaaggagcatatcagaaaaggctcaattgtagttgttgatcacttgagttataatacactcatggccattttcagggaagttaaagagattattgaaacaatgtaaaatgagccagagatagaacattttaagccatcttcaaactctagcaggctgtacattacagtgtacacattatacactgcatctttaacacagagtcacctgtgacaggctctaggtttgagctagactattttgggggtatcaaatgaatattataccttgggctgaaaatgtttgatttttatcttgtctagattggcatatttttaacattttacttaagatagcaaaccagttcgttttaagtaagctaacttgttcattagtatctgtggcttaaaatggcaaaaaagaaaatatccttgagtttgtaatctagttacagaagtaaggcatacacacacacaaagataacagtacctagagagagagtgtgtgtgagtgtgcgtgtctctgtgtgtgcacgtgcacgctcatggccaaatgtgcgcactctacataaaggaggcaggagttcctataggctatttaatgtaagagaaactatttttctcctgttccagctgtatcagatactcgttccgcaacacagaaatgactcagaatctcagacaaaatgtattatttgttcaattttaattttgctactacattcataactcttaaattgttaggctgtttcatttacatcaaagttatctcacaaaagagaaggcaggaaacgttttgtgagtgcctattctatgtcaaacactgtgttggcaccatattttacaagtttttttcctcttctcacagtgatcttgtgagttagttacttatatttttattagaactcattattctgggtaccctccaatgagaattagagaggttaaataccttttcctagattcccacagcaggaaggtggcatagctgttttgtctgacaccagaacccatctcaccacactgctttacagtcttcctgaaggacattttgaggtgggggggccttcaaagctcagagactggtttgaatggtttaattttgcaatggatcatgtccatgccaggtgttacaattcttaacttcctccaaattcgtgtgtccattagacatttggctacatctggctggaggtcaggagaaaattctgaggtaaatagatggattttatctggcagtgtcgaaaatagtaggagcctaaaactttgttcaatgagtaagatgtagatttggagtcatcagcaggggaaacttgttagatgtcctttgtatctttttctatccatttgtattttttctttcccaaagagctgaaatcattttataccctgaatttaaaaggtaattgcttttttcctccttgcgaaatcataccttaattttttttttttttttttttaccatttatgatttattctcctatgtgtcatatgaaaggccaaggggctttatcttttactagtaggcaagcctgggcatttctgcatttgtgccagctaacactacaaaatagacttaattagagaaatttagacccagaattgcagcttcaacaacacaaaacaggaaagctagaagaggttgctgtgtcaacctacaagatagtgattcttggaagttggtatggaccagaaagcattcccaggacatttaggctatggctgagttctctaagactcagggtgggaattataatccctggtctaagctgatatgaaagtttctatgtgtgaaaatatggagttatatgctttgagattttctgccagttaaactaaaacaagatcatactgtaaatgtttgtaacttgcttccccccactgtatactgtaaacatctttgcatgtcaataaatatgcctctacaac

SEQ ID NO: 53966 - protein, 643 aa, Artificial Sequence
  derived and/or modified sequence
MPLLFLERFPWPSLRTYTGLSGLALLGTIISAYRALSQPEAGPGEPDQLTASLQPEPPAPARPSAGGPRARDVAQYLLSDSLFVWVLVNTACCVLMLVAKLIQCIVFGPLRVSERQHLKDKFWNFIFYKFIFIFGVLNVQTVEEVVMWCLWFAGLVFLHLMVQLCKDRFEYLSFSPTTPMSSHGRVLSLLVAMLLSCCGLAAVCSITGYTHGMHTLAFMAAESLLVTVRTAHVILRYVIHLWDLNHEGTWEGKGTYVYYTDFVMELTLLSLDLMHHIHMLLFGNIWLSMASLVIFMQLRYLFHEVQRRIRRHKNYLRVVGNMEARFAVATPEELAVNNDDCAICWDSMQAARKLPCGHLFHNSCLRSWLEQDTSCPTCRMSLNIADNNRVREEHQGENLDENLVPVAAAEGRPRLNQHNHFFHFDGSRIASWLPSFSVEVMHTTNILGITQASNSQLNAMAHQIQEMFPQVPYHLVLQDLQLTRSVEITTDNILEGRIQVPFPTQRSDSIRPALNSPVERPSSDQEEGETSAQTERVPLDLSPRLEETLDFGEVEVEPSEVEDFEARGSRFSKSADERQRMLVQRKDELLQQARKRFLNKSSEDDAASESFLPSEGASSDPVTLRRRMLAAAAERRLQKQQTS

SEQ ID NO: 53967 - protein, 702 aa, Artificial Sequence
  derived and/or modified sequence
MTERCSLWSALSAAACCFYRGSFVQVQFSKEKYILDSSPEKLHKELEEELKLSSTDLRSHAWYHGRIPREVSETLVQRNGDFLIRDSLTSLGDYVLTCRWRNQALHFKINKVVVKAGESYTHIQYLFEQESFDHVPALVRYHVGSRKAVSEQSGAIIYCPVNRTFPLRYLEASYGLGQGSSKPASPVSPSGPKGSHMKRRSVTMTDGLTADKVTRSDGCPTSTSLPRPRDSIRSCALSMDQIPDLHSPMSPISESPSSPAYSTVTRVHAAPAAPSATALPASPVARRSSEPQLCPGSAPKTHGESDKGPHTSPSHTLGKASPSPSLSSYSDPDSGHYCQLQPPVRGSREWAATETSSQQARSYGERLKELSENGAPEGDWGKTFTVPIVEVTSSFNPATFQSLLIPRDNRPLEVGLLRKVKELLAEVDARTLARHVTKVDCLVARILGVTKEMQTLMGVRWGMELLTLPHGRQLRLDLLERFHTMSIMLAVDILGCTGSAEERAALLHKTIQLAAELRGTMGNMFSFAAVMGALDMAQISRLEQTWVTLRQRHTEGAILYEKKLKPFLKSLNEGKEGPPLSNTTFPHVLPLITLLECDSAPPEGPEPWGSTEHGVEVVLAHLEAARTVAHHGGLYHTNAEVKLQGFQARPELLEVFSTEFQMRLLWGSQGASSSQARRYEKFDKVLTALSHKLEPAVRSSEL

SEQ ID NO: 53968 - DNA, 2109 bp, Artificial Sequence
  derived and/or modified sequence
atgaccgagagatgcagcctgtggagcgccctgagcgccgccgcctgctgcttctacagaggcagcttcgtgcaggtgcagttcagcaaggagaagtacatcctggacagcagccccgagaagctgcacaaggagctggaggaggagctgaagctgagcagcaccgacctgagaagccacgcctggtaccacggcagaatccccagagaggtgagcgagaccctggtgcagagaaacggcgacttcctgatcagagacagcctgaccagcctgggcgactacgtgctgacctgcagatggagaaaccaggccctgcacttcaagatcaacaaggtggtggtgaaggccggcgagagctacacccacatccagtacctgttcgagcaggagagcttcgaccacgtgcccgccctggtgagataccacgtgggcagcagaaaggccgtgagcgagcagagcggcgccatcatctactgccccgtgaacagaaccttccccctgagatacctggaggccagctacggcctgggccagggcagcagcaagcccgccagccccgtgagccccagcggccccaagggcagccacatgaagagaagaagcgtgaccatgaccgacggcctgaccgccgacaaggtgaccagaagcgacggctgccccaccagcaccagcctgcccagacccagagacagcatcagaagctgcgccctgagcatggaccagatccccgacctgcacagccccatgagccccatcagcgagagccccagcagccccgcctacagcaccgtgaccagagtgcacgccgcccccgccgcccccagcgccaccgccctgcccgccagccccgtggccagaagaagcagcgagccccagctgtgccccggcagcgcccccaagacccacggcgagagcgacaagggcccccacaccagccccagccacaccctgggcaaggccagccccagccccagcctgagcagctacagcgaccccgacagcggccactactgccagctgcagccccccgtgagaggcagcagagagtgggccgccaccgagaccagcagccagcaggccagaagctacggcgagagactgaaggagctgagcgagaacggcgcccccgagggcgactggggcaagaccttcaccgtgcccatcgtggaggtgaccagcagcttcaaccccgccaccttccagagcctgctgatccccagagacaacagacccctggaggtgggcctgctgagaaaggtgaaggagctgctggccgaggtggacgccagaaccctggccagacacgtgaccaaggtggactgcctggtggccagaatcctgggcgtgaccaaggagatgcagaccctgatgggcgtgagatggggcatggagctgctgaccctgccccacggcagacagctgagactggacctgctggagagattccacaccatgagcatcatgctggccgtggacatcctgggctgcaccggcagcgccgaggagagagccgccctgctgcacaagaccatccagctggccgccgagctgagaggcaccatgggcaacatgttcagcttcgccgccgtgatgggcgccctggacatggcccagatcagcagactggagcagacctgggtgaccctgagacagagacacaccgagggcgccatcctgtacgagaagaagctgaagcccttcctgaagagcctgaacgagggcaaggagggcccccccctgagcaacaccaccttcccccacgtgctgcccctgatcaccctgctggagtgcgacagcgccccccccgagggccccgagccctggggcagcaccgagcacggcgtggaggtggtgctggcccacctggaggccgccagaaccgtggcccaccacggcggcctgtaccacaccaacgccgaggtgaagctgcagggcttccaggccagacccgagctgctggaggtgttcagcaccgagttccagatgagactgctgtggggcagccagggcgccagcagcagccaggccagaagatacgagaagttcgacaaggtgctgaccgccctgagccacaagctggagcccgccgtgagaagcagcgagctgtag

SEQ ID NO: 53969 - DNA, 2109 bp, Artificial Sequence
  derived and/or modified sequence
atgaccgagagatgctctctgtggagcgctctgagcgctgcggcctgttgtttttacagaggcagtttcgtacaggtccaattctcgaaagaaaagtacatcctggacagctcacctgagaagctacataaagaactggaagaggagttgaaactgtcctctactgatttacgaagccacgcatggtaccatggaagaattccaagagaagtgagcgagacgttggtgcagagaaatggcgatttcctcatcagggacagcctcactagtctgggtgactacgttcttacctgtaggtggcgcaatcaggcccttcacttcaaaatcaacaaagtggtggtgaaagcaggggagtcatacacacatatacaatacctcttcgaacaggagtcattcgatcacgtgcccgcgctggtgaggtatcatgtcggctctcgcaaagctgtctccgagcagagcggggccattatttactgccctgtgaacaggaccttccccttgaggtacctcgaagcctcctatggtttgggacaaggctcgagtaagccggccagtccagtctctcctagcggacccaagggcagccatatgaaacgccggtctgtcacaatgactgatgggctgacagccgacaaagtgaccaggagtgatggctgtcccactagcacatccctgccccggcccagggatagcattcgctcttgcgcactgtctatggaccagatacccgatcttcactctcccatgtctccgatctcggaaagtcctagctctccagcatacagtaccgtaacacgggtacatgcagcgcctgctgccccctcggcaacagctctgcccgccagccctgtagctaggcgttcctcggagccacaactctgtcccggcagcgctcccaaaacgcacggcgagagtgataagggcccccatacatctccatcacatactttagggaaagcctctcccagtcccagtctgagctcctactctgatcctgactcggggcactactgccagttacagcccccagtgcgcggatcccgcgaatgggcagcaacggagacttcgtctcagcaggccaggtcctacggagagaggttgaaggaactttccgagaacggggccccggaaggcgactggggaaagacctttacagtaccgatagtcgaggtcacctcaagtttcaaccccgccaccttccaaagtctcctgataccgcgagacaaccgcccgttagaggtcggtctgttgcgcaaagtgaaagaactacttgcagaagtcgacgcgaggaccctagccaggcacgtgacgaaagtcgactgcttggtggctagaatcctgggagtgaccaaggagatgcaaactttaatgggggtacggtggggaatggaacttctcaccctcccacatggccgccagctgcgactggatctgttggagcgctttcatacaatgtccatcatgctagctgtggacattctggggtgcactgggagcgcggaagagcgcgccgcgctcttacataagacaattcaactagctgccgaactcagaggtaccatggggaatatgtttagctttgctgctgtcatgggcgcactggacatggctcagatctctaggctggaacaaacctgggtgactcttagacagagacacactgagggggcaatcctgtacgagaagaaactcaaaccattcctgaagtcactgaacgagggtaaggaggggcctccactgtcaaacacaacattcccccacgtcttgcccctgatcactttgctggaatgtgattctgccccacccgaggggccggagccatggggcagcactgagcacggcgtggaggtagtccttgcccacctggaggccgccaggacagtggcccaccacggcggactgtaccatactaatgccgaggtgaagctgcagggattccaggcacggcctgagttactcgaggtgttttcaacggaattccaaatgagactgctgtggggaagccaaggcgcttcctcctcgcaagctaggagatacgaaaaattcgataaagttttaacggccctgtcacataagttggagcctgccgtccgaagctcggaattgtag

SEQ ID NO: 53970 - DNA, 2109 bp, Artificial Sequence
  derived and/or modified sequence
atgacagagcgctgcagcctgtggagcgccctgtctgctgctgcctgctgcttctaccggggcagctttgtgcaggtgcagttcagcaaggagaagtacatcctggacagcagccctgagaagctgcacaaggagctggaggaggagctgaagctgagcagcacagacctgcggagccacgcctggtaccacggccgcatcccccgggaggtgtctgagaccctggtgcagagaaatggagacttcctgatccgggacagcctgaccagcctgggggactatgtgctgacctgccgctggaggaaccaggccctgcacttcaagatcaacaaggtggtggtgaaggccggggagagctacacccacatccagtacctgtttgagcaggagagctttgaccacgtgcctgccctggtgcgctaccacgtgggcagcaggaaggctgtgtctgagcagagcggggccatcatctactgccctgtgaacagaaccttccccctgcgctacctggaggccagctatggcctgggccagggcagcagcaagccagccagccctgtgagccccagcggccccaagggcagccacatgaagagaagatctgtgaccatgacagatggcctgacagctgacaaggtgaccaggagtgatggctgccccaccagcaccagcctgccccggccccgggacagcatccgcagctgtgccctgtccatggaccagatcccagacctgcacagccccatgagccccatcagcgagagccccagcagccctgcctacagcacagtgaccagggtgcatgctgccccagctgcccccagcgccacagccctgcctgccagccctgtggcccggcgcagcagcgagccccagctgtgccccggcagcgcccccaagacccacggggagagtgacaagggcccccacaccagccccagccacaccctgggcaaggccagccccagccccagcctgagcagctacagcgaccctgacagcggccactactgccagctgcagccccctgtgcggggcagccgggagtgggccgccacagagaccagcagccagcaggcccggagctatggagagcggctgaaggagctgtctgaaaatggagcccctgagggggactggggcaagaccttcaccgtgcccatcgtggaggtgaccagcagcttcaacccagccaccttccagagcctgctgatcccccgggacaaccggcccctggaggtgggcctgctgaggaaggtgaaggagctgctggccgaggtggatgcccggaccctggcccggcacgtgaccaaggtggactgcctggtggcccgcatcctgggcgtgaccaaggagatgcagaccctgatgggcgtgcgctggggcatggagctgctgaccctgccccacggccggcagctgcggctggacctgctggagcgcttccacaccatgagcatcatgctggccgtggacatcctgggctgcaccggcagcgctgaggagcgggccgccctgctgcacaagaccatccagctggccgctgagctgcggggcaccatgggcaacatgttctcctttgctgctgtgatgggcgccctggacatggcccagatcagccggctggagcagacctgggtgaccctgcggcagaggcacacagagggcgccatcctgtatgagaagaagctgaagcccttcctgaagagcctgaatgaaggcaaggagggcccccccctgagcaacaccaccttcccccacgtgctgcccctcatcaccctgctggagtgtgacagcgcccctcctgagggccctgagccctggggcagcacagaacatggagtggaggtggtgctggcccacctggaggccgccaggacagtggcccaccacggcggcctgtaccacaccaatgctgaggtgaagctgcagggcttccaggcccggcctgagctgctggaggtgttcagcacagagttccagatgaggctgctgtggggcagccagggcgccagcagcagccaggccaggagatatgagaagtttgacaaggtgctgacagccctgagccacaagctggagcctgctgtgcgcagcagcgagctgtag

SEQ ID NO: 53971 - DNA, 2109 bp, Artificial Sequence
  derived and/or modified sequence
atgaccgagcggtgcagcctgtggagcgccctgagcgccgccgcctgctgcttctatcgcgggtctttcgtccaggttcagttttcaaaggagaaatacatcctggattcctcacctgaaaaattacataaggagctcgaggaagagcttaaactgagcagcacggatttgcgttcccatgcctggtatcatggtcgaattcctcgagaagtgagcgaaaccttggttcaaagaaatggggattttctgattcgggatagtctgacctccttaggtgattacgtgcttacctgccgctggagaaaccaggcacttcattttaaaatcaacaaagttgttgtgaaggcaggggagtcttacactcacatccagtatcttttcgagcaggagagtttcgaccacgtgcctgccctcgttcgctatcatgtggggtcccggaaggccgtgtccgaacagtccggggctattatatattgtccagttaataggacatttcctctccgataccttgaagctagctacggccttggccagggcagcagcaaaccagcctccccggtctcacctagcggacctaagggctcacatatgaagcgacgctctgttactatgaccgacggactgacagcagataaggtaacccgcagtgatggctgccccacctcgacaagccttccaagaccacgcgactccatcaggagctgcgcactctctatggaccaaatccctgacctgcactctccgatgtcacctatttccgaatcgccttctagcccggcctattctactgtcaccagagtgcacgcagctccagccgcgccaagtgctaccgctcttccagcgtccccagtagccaggcggagttctgagccccagctgtgccccgggtcagccccgaaaactcatggcgagtccgacaagggcccgcatacgagcccaagtcatacactaggcaaagctagtccaagcccgtcactctctagctactccgacccagattccgggcattattgtcagctgcagccacctgtaagaggatcacgggagtgggccgcaaccgagacaagctcccaacaggcgagatcctatggcgagcgcctgaaagaactttctgaaaacggcgcacctgaaggagactggggcaagaccttcaccgtcccaattgtagaagtcaccagctcgtttaatcctgccacatttcagtccctcttgattcctcgcgacaatagacctctcgaggtaggactgttgcggaaggtgaaggaactgctcgcggaggtcgatgctcgcaccttggctcgccatgtcaccaaggtagactgcctggtggcccggattctcggagtgaccaaggaaatgcagacactcatgggtgtgaggtggggtatggagttactgacgcttccccacggccgtcagctgaggctggacctcctcgagcggttccatacaatgtccattatgttagctgttgatatcctaggctgcacaggttcggccgaggagagggcagcactgctgcataaaaccatccagctcgcggcagagctgagaggcactatgggcaatatgttttcgttcgctgccgtgatgggagccttggatatggcgcaaataagcaggcttgagcagacatgggtgactctccgacaacgacacaccgagggagcaatactctacgaaaaaaagctgaagccattcctaaagagtttgaacgaaggcaaggagggaccaccgctgtccaacacaacgtttccacatgtgctgccactgattactctgttggagtgtgactcggccccacccgagggacctgagccctggggttccaccgagcacggtgtcgaagtcgtgttggcacacttagaagccgcccgcaccgtggctcaccacggcggcctatatcataccaacgctgaagtgaagcttcagggcttccaagcccgtcctgaactcttagaggtgttttccaccgagttccaaatgcgactgttgtggggaagccaaggtgcatcgagttctcaagctcggcgctatgagaaattcgataaggttctgaccgctctgtctcacaaactagagccagccgtcagatcatcagagctttag

SEQ ID NO: 53972 - DNA, 2682 bp, Artificial Sequence
  derived and/or modified sequence
cccgctcctcccccgacaaggcgatgaggtaatcgcgccgctgagaggcacgcgcagccggtgcctagccggttggtccctgcgcccctgccccgccggccaccgcccccccacaccgtcccggccccggcagcctggccccaccatgaccgagcggtgcagcctgtggagtgccctgtcggccgccgcctgctgcttctaccgcggctccttcgtgcaggtgcagttctccaaggagaagtacatcctggactcatcgccagagaaactccacaaggaattggaggaggagctcaaactcagcagcacggatctccgcagccatgcctggtaccatggccgcatcccccgagaggtctcggagaccttggtacaacgcaacggcgacttcctcatccgggactcactcaccagcctgggcgactatgtgctcacgtgccgctggcgcaaccaggccttgcacttcaagatcaacaaggtggtggtgaaggcaggcgagagctacacacacatccagtacctgtttgagcaggagagctttgaccacgtgcccgccctcgtgcgctatcatgtgggcagccgcaaggctgtgtcagagcagagtggtgccatcatctactgcccggtgaaccgcaccttcccactgcgctacctcgaggccagctatggcctgggacaggggagtagcaagcctgctagccccgtcagcccctcaggccccaagggcagccacatgaagcggcgcagcgtcaccatgaccgatgggctcactgctgacaaggtcacccgcagcgatggctgccccaccagtacgtcgctgccccgccctcgggactccatccgcagctgtgccctcagcatggaccagatcccagacctgcactcacccatgtcgcccatctccgagagccctagctcccctgcctacagcactgtaacccgtgtccatgccgcccctgcagccccttctgccacagcattgcctgcctcccctgtcgcccgccgttccagtgagccccagctgtgtcccggaagtgccccaaagacccatggggagtcagacaagggcccccacaccagcccctcccacacccttggcaaggcctccccgtcaccatcactcagcagctacagtgacccggactctggccactactgccagctccagcctcccgtgcgtggcagccgagagtgggcagcgactgagacctccagccagcaggccaggagctatggggagaggctaaaggaactgtcagaaaatggggcccctgaaggggactggggcaagaccttcacagtccccatcgtggaagtcacttcttccttcaacccggccaccttccagtcactactgatccccagggataaccggccactggaggtgggccttctgcgcaaggtcaaggagctgctggcagaagtggatgcccggacgctggcccggcatgtcaccaaggtggactgcctggttgctaggatactgggcgttaccaaggagatgcagaccctaatgggagtccgctggggcatggaactgctcaccctcccccatggccggcagctacgcctagacctgctggaaaggttccacaccatgtccatcatgctggccgtggacatcctgggctgcaccggctctgcggaggagcgggcagcgctgctgcacaagaccattcagctggcggccgagctgcgggggactatgggcaacatgttcagcttcgcggcggtcatgggtgccctggacatggcccagatttctcggctggagcagacatgggtgaccctgcggcagcgacacacagagggtgccatcctgtacgagaagaagctcaagccttttctcaagagcctcaacgagggcaaagaaggcccgccgctgagcaacaccacgtttcctcatgtgctgcccctcatcaccctgctggagtgtgactcggccccaccagagggccctgagccctggggcagcacggagcacggcgtggaggtggtgctggctcacctggaggccgcccgcacagtggcacaccacggaggcctgtaccacaccaatgctgaagtcaagctgcaggggttccaggcccggccggagctcctggaggtgttcagcacggagttccagatgcgccttctctggggcagtcagggtgccagcagcagccaggcccggcgctatgagaagttcgacaaggtcctcactgccctgtcccacaagctggaacctgctgtccgctccagcgagctgtgaccccagggacatttcccctctgcagctgcggacagcgtcaggggcagaggggcacacaactttccccagagcaccccaaggacactgtgatcaacccgagaatgttctgggttcaactcaagcatctcccttgcacctccagggtcctgcgtggactctgggttccatcccacctgctacatgctcaccaggtctccattgaggaagaacaggaacgccggttcccccaccagcttttgctgctccccttcctgctggggttccctgttttcgagccatgggaggcaggctgctcacgcctcctcactctctgtctgtccctcaccaacaccaaggcctccatctcactgtaaataagtctctgttctgtaaatagatgtacagaagccatgttatttctttcatataataaacttttatgactcttt

SEQ ID NO: 53973 - DNA, 2109 bp, Artificial Sequence
  derived and/or modified sequence
atgactgagagatgcagcctgtggtctgcactgtctgccgcagcctgttgcttctaccgcggttctttcgtgcaggtgcagtttagtaaggagaagtatattctcgactctagcccggagaaactccacaaggagctggaagaggaactgaagctcagcagcacagacctccggtcccatgcctggtatcatggccgtattcccagagaagtgtccgaaaccttagtgcagaggaacggcgacttcctgatcagagactccttgacatccctcggtgattacgttctcacatgtaggtggcggaatcaggctctgcattttaagatcaacaaagttgtggtaaaggccggagaatcctacactcatatacagtacctcttcgaacaagaatcctttgaccacgtcccggctctcgtcagatatcatgtgggcagtagaaaagctgtgtctgagcagtcaggggctataatctactgcccagtgaacagaacttttcccctgagatacctggaggcctcttatggattgggacaagggtcatcaaagcccgcttcccctgtaagtccaagtggacctaaaggctctcacatgaaaaggcgctccgtgacaatgaccgatgggctgaccgctgacaaggttacgcgcagcgatggatgtccaacaagtactagcttacccaggccgagagattccatccgatcatgcgccctgagcatggatcagattccagacttgcactcccccatgtcgcctatctccgagtccccctcatcgcccgcatatagcacagttacccgcgttcatgctgcacctgccgctcccagcgccacagctctgcccgcaagtcccgtcgcacgtagaagcagcgagcctcaactgtgccctggaagcgctccaaagacccatggagaatctgacaagggaccacacacttccccctcccacaccctgggcaaagcctcccccagccctagcctgtcatcgtatagtgatcctgatagcggacactactgccaacttcagcctcctgtccggggatcgcgcgagtgggcagccactgaaacaagcagtcagcaggcgagatcatacggagaacgactgaaggaactatctgaaaatggcgcaccggagggagattggggtaaaacttttaccgtacctatcgttgaagttaccagttcatttaaccccgctacattccagtctctgctgattccacgcgacaatcgaccgctcgaggtgggtttgctacgcaaagtgaaagaactcctggcagaggtggacgcaagaacactggcacgccatgtcactaaagtggactgtctggtggcacggattttgggagttaccaaagagatgcagactctaatgggagtacgctggggaatggagttgctgacactgcctcatgggaggcagctgaggcttgacctgctggagcgttttcatacaatgagcatcatgttagctgtggacattctgggatgtacgggctcagctgaagaacgagccgcactgctgcataagaccatacaactagccgctgagcttcggggaaccatggggaatatgttttcatttgctgccgtaatgggagcccttgatatggctcagatttcccgactggagcagacatgggtcacactgcggcagagacatacagagggcgctattctgtatgagaagaagcttaaaccgttccttaagtctcttaatgagggtaaggaaggccctcccctgtccaatacaactttcccgcacgtcctgccccttatcaccctgcttgagtgtgacagtgcgcctccggagggtcccgagccatggggatcgacggagcacggggtcgaagtggtgctcgctcatttagaggctgctaggacggttgctcaccatggaggactctaccatactaacgcagaagtgaaactgcagggatttcaggcccgacctgagttgttggaggtcttctcaactgaatttcagatgcggttgctttggggtagccagggagcttcgagctcccaggcacggcgttacgagaaattcgacaaggtgttaaccgccctttctcacaagcttgaacctgctgtccgctccagtgagctgtag

SEQ ID NO: 53974 - protein, 700 aa, Artificial Sequence
  derived and/or modified sequence
MTERCSLWSALSAAACCFYRGSFVQFSKEKYILDSSPEKLHKELEEELKLSSTDLRSHAWYHGRIPREVSETLVQRNGDFLIRDSLTSLGDYVLTCRWRNQALHFKINKVVVKAGESYTHIQYLFEQESFDHVPALVRYHVGSRKAVSEQSGAIIYCPVNRTFPLRYLEASYGLGQGSSKPASPVSPSGPKGSHMKRRSVTMTDGLTADKVTRSDGCPTSTSLPRPRDSIRSCALSMDQIPDLHSPMSPISESPSSPAYSTVTRVHAAPAAPSATALPASPVARRSSEPQLCPGSAPKTHGESDKGPHTSPSHTLGKASPSPSLSSYSDPDSGHYCQLQPPVRGSREWAATETSSQQARSYGERLKELSENGAPEGDWGKTFTVPIVEVTSSFNPATFQSLLIPRDNRPLEVGLLRKVKELLAEVDARTLARHVTKVDCLVARILGVTKEMQTLMGVRWGMELLTLPHGRQLRLDLLERFHTMSIMLAVDILGCTGSAEERAALLHKTIQLAAELRGTMGNMFSFAAVMGALDMAQISRLEQTWVTLRQRHTEGAILYEKKLKPFLKSLNEGKEGPPLSNTTFPHVLPLITLLECDSAPPEGPEPWGSTEHGVEVVLAHLEAARTVAHHGGLYHTNAEVKLQGFQARPELLEVFSTEFQMRLLWGSQGASSSQARRYEKFDKVLTALSHKLEPAVRSSEL

SEQ ID NO: 53975 - DNA, 2103 bp, Artificial Sequence
  derived and/or modified sequence
atgaccgagagatgcagcctgtggagcgccctgagcgccgccgcctgctgcttctacagaggcagcttcgtgcagttcagcaaggagaagtacatcctggacagcagccccgagaagctgcacaaggagctggaggaggagctgaagctgagcagcaccgacctgagaagccacgcctggtaccacggcagaatccccagagaggtgagcgagaccctggtgcagagaaacggcgacttcctgatcagagacagcctgaccagcctgggcgactacgtgctgacctgcagatggagaaaccaggccctgcacttcaagatcaacaaggtggtggtgaaggccggcgagagctacacccacatccagtacctgttcgagcaggagagcttcgaccacgtgcccgccctggtgagataccacgtgggcagcagaaaggccgtgagcgagcagagcggcgccatcatctactgccccgtgaacagaaccttccccctgagatacctggaggccagctacggcctgggccagggcagcagcaagcccgccagccccgtgagccccagcggccccaagggcagccacatgaagagaagaagcgtgaccatgaccgacggcctgaccgccgacaaggtgaccagaagcgacggctgccccaccagcaccagcctgcccagacccagagacagcatcagaagctgcgccctgagcatggaccagatccccgacctgcacagccccatgagccccatcagcgagagccccagcagccccgcctacagcaccgtgaccagagtgcacgccgcccccgccgcccccagcgccaccgccctgcccgccagccccgtggccagaagaagcagcgagccccagctgtgccccggcagcgcccccaagacccacggcgagagcgacaagggcccccacaccagccccagccacaccctgggcaaggccagccccagccccagcctgagcagctacagcgaccccgacagcggccactactgccagctgcagccccccgtgagaggcagcagagagtgggccgccaccgagaccagcagccagcaggccagaagctacggcgagagactgaaggagctgagcgagaacggcgcccccgagggcgactggggcaagaccttcaccgtgcccatcgtggaggtgaccagcagcttcaaccccgccaccttccagagcctgctgatccccagagacaacagacccctggaggtgggcctgctgagaaaggtgaaggagctgctggccgaggtggacgccagaaccctggccagacacgtgaccaaggtggactgcctggtggccagaatcctgggcgtgaccaaggagatgcagaccctgatgggcgtgagatggggcatggagctgctgaccctgccccacggcagacagctgagactggacctgctggagagattccacaccatgagcatcatgctggccgtggacatcctgggctgcaccggcagcgccgaggagagagccgccctgctgcacaagaccatccagctggccgccgagctgagaggcaccatgggcaacatgttcagcttcgccgccgtgatgggcgccctggacatggcccagatcagcagactggagcagacctgggtgaccctgagacagagacacaccgagggcgccatcctgtacgagaagaagctgaagcccttcctgaagagcctgaacgagggcaaggagggcccccccctgagcaacaccaccttcccccacgtgctgcccctgatcaccctgctggagtgcgacagcgccccccccgagggccccgagccctggggcagcaccgagcacggcgtggaggtggtgctggcccacctggaggccgccagaaccgtggcccaccacggcggcctgtaccacaccaacgccgaggtgaagctgcagggcttccaggccagacccgagctgctggaggtgttcagcaccgagttccagatgagactgctgtggggcagccagggcgccagcagcagccaggccagaagatacgagaagttcgacaaggtgctgaccgccctgagccacaagctggagcccgccgtgagaagcagcgagctgtag

SEQ ID NO: 53976 - DNA, 591 bp, Artificial Sequence
  derived and/or modified sequence
atgcccttcagcaaggagaagtacatcctggacagcagccccgagaagctgcacaaggagctggaggaggagctgaagctgagcagcaccgacctgagaagccacgcctggtaccacggcagaatccccagagaggtgagcgagaccctggtgcagagaaacggcgacttcctgatcagagacagcctgaccagcctgggcgactacgtgctgacctgcagatggagaaaccaggccctgcacttcaagatcaacaaggtggtggtgaaggccggcgagagctacacccacatccagtacctgttcgagcaggagagcttcgaccacgtgcccgccctggtgagataccacgtgggcagcagaaaggccgtgagcgagcagagcggcgccatcatctactgccccgtgaacagaaccttccccctgagatacctggaggccagctacggcctgggccagggcagcagcaagcccgccagccccgtgagccccagcggccccaagggcagccacatgaagagaagaagcgtgaccatgaccgacggcctgaccgccgacaaggtgaccagaagcgacggctgccccacctag

SEQ ID NO: 53977 - DNA, 2103 bp, Artificial Sequence
  derived and/or modified sequence
atgaccgagcgatgttccctctggtcagctctctccgccgccgcatgttgcttctacagaggatccttcgtgcaattcagtaaagagaagtacatcctggatagttcccctgaaaaactccacaaggaattggaagaggaactcaaactctccagtaccgacctcaggtcccatgcatggtatcacggtaggatcccacgagaagtatccgaaacactggtccagcgcaatggtgacttcctgatacgcgattccctgaccagcctgggagactacgtcctgacatgccgctggcgaaaccaagccttgcactttaaaatcaacaaagtggtcgtgaaggcaggtgaaagctatactcacattcagtatttatttgagcaggaatcattcgatcacgtacctgcgctcgtccggtaccacgttggctctaggaaagctgtgtcagagcagtcgggggctatcatttactgtcccgtaaaccgaactttccccctccgctaccttgaagctagctatggcctcgggcagggctcatccaagccggcttccccagtgtcccccagcggcccgaaaggatctcatatgaaaagaaggtctgttacaatgactgatggcttaaccgctgacaaggtgacacggagcgatggatgcccgacttccacatcgctgccccggcctcgggatagcatccgatcctgcgcgcttagtatggaccaaatccccgatctccatagccccatgagtcccatctcagagtcaccatctagcccagcatattcgacggtgactcgagtccatgcagcaccggccgccccatccgccaccgccttgccagcatcaccagttgcccggaggagcagtgaaccccagctctgtcctggctctgcccccaagactcatggagagtctgacaagggcccccacacttcgcccagccacactctgggcaaggccagcccaagcccatccctgagctcctattctgaccctgactccgggcactattgccaacttcaacctccagtgagaggcagtagggaatgggccgccactgagacttcgagccagcaggcccgttcttacggagagcgcctgaaggagctgtcagagaatggcgctcccgaaggcgattgggggaagacctttaccgtccctatcgtagaggtgacaagcagctttaatccagccacatttcaatccctcctgataccacgcgacaatagacctctggaggtggggctcctccggaaggtgaaggagttattagcggaggtcgacgcccggactctggctcgccatgtgacaaaggtggattgccttgttgctaggatcctgggagtgacaaaagagatgcagaccctgatgggcgtccgctggggtatggagctgctgaccctccctcatggacgacagctgcggctagatctgctggagcgctttcacactatgtccattatgctggccgttgatattctcggttgcactggctccgccgaggaacgcgctgcgcttcttcataaaacaatccagttggcagcggaactccggggtacgatgggtaatatgttttctttcgccgcagtaatgggcgccctggacatggcacagatctccagactggagcagacctgggtgaccctaagacagcgtcataccgaaggtgccatactgtacgaaaagaagttgaagccgttcctcaagtcactcaacgagggaaaggaggggccacctttgtcgaacaccacgtttcctcacgtgttacccctgatcactctcctcgaatgtgattccgcgcctcccgaagggcctgaaccatggggaagcacagagcatggcgttgaagtcgtcttggcccacctcgaagcggcaagaacagtggcccaccacggaggcttgtatcacactaacgccgaagtgaagctgcaaggctttcaggctagaccagagcttcttgaagtgtttagtaccgagttccagatgaggctcctctggggttcccagggagcctcctcctctcaagcaagacgctatgagaaatttgataaagtgctcacagccttaagccataaacttgagcccgccgtaagaagtagtgagctctag

SEQ ID NO: 53978 - DNA, 591 bp, Artificial Sequence
  derived and/or modified sequence
atgcccttttctaaagagaagtacatcctggacagtagcccagagaagttgcacaaagagttggaggaggagctgaagctgtctagcacagatctacggtcacacgcatggtaccacgggcgaatcccccgagaagtgtctgagacgctggtccaaagaaatggcgacttcttgataagggactcactgactagcctcggggactatgttctcacttgtcgatggagaaaccaggcactgcattttaagataaacaaggtggtggtgaaggcgggagaatcatacacacatattcagtacctgtttgagcaggagtctttcgatcatgtgcccgctctcgtgaggtaccacgtcggctcaaggaaggcagtgagtgaacagtcaggagccatcatatactgccctgtcaaccggacattccctctccggtatttggaagcctcctatggattaggccagggctctagcaaaccagccagtcctgtatccccaagtggccccaagggtagtcatatgaagagacgaagcgttacaatgacggacggcctgacagccgacaaagtcacaaggagcgacggttgtcctacttag

SEQ ID NO: 53979 - DNA, 2654 bp, Artificial Sequence
  derived and/or modified sequence
gatgaggtaatcgcgccgctgagaggcacgcgcagccggtgcctagccggttggtccctgcgcccctgccccgccggccaccgcccccccacaccgtcccggccccggcagcctggccccaccatgaccgagcggtgcagcctgtggagtgccctgtcggccgccgcctgctgcttctaccgcggctccttcgtgcagttctccaaggagaagtacatcctggactcatcgccagagaaactccacaaggaattggaggaggagctcaaactcagcagcacggatctccgcagccatgcctggtaccatggccgcatcccccgagaggtctcggagaccttggtacaacgcaacggcgacttcctcatccgggactcactcaccagcctgggcgactatgtgctcacgtgccgctggcgcaaccaggccttgcacttcaagatcaacaaggtggtggtgaaggcaggcgagagctacacacacatccagtacctgtttgagcaggagagctttgaccacgtgcccgccctcgtgcgctatcatgtgggcagccgcaaggctgtgtcagagcagagtggtgccatcatctactgcccggtgaaccgcaccttcccactgcgctacctcgaggccagctatggcctgggacaggggagtagcaagcctgctagccccgtcagcccctcaggccccaagggcagccacatgaagcggcgcagcgtcaccatgaccgatgggctcactgctgacaaggtcacccgcagcgatggctgccccaccagtacgtcgctgccccgccctcgggactccatccgcagctgtgccctcagcatggaccagatcccagacctgcactcacccatgtcgcccatctccgagagccctagctcccctgcctacagcactgtaacccgtgtccatgccgcccctgcagccccttctgccacagcattgcctgcctcccctgtcgcccgccgttccagtgagccccagctgtgtcccggaagtgccccaaagacccatggggagtcagacaagggcccccacaccagcccctcccacacccttggcaaggcctccccgtcaccatcactcagcagctacagtgacccggactctggccactactgccagctccagcctcccgtgcgtggcagccgagagtgggcagcgactgagacctccagccagcaggccaggagctatggggagaggctaaaggaactgtcagaaaatggggcccctgaaggggactggggcaagaccttcacagtccccatcgtggaagtcacttcttccttcaacccggccaccttccagtcactactgatccccagggataaccggccactggaggtgggccttctgcgcaaggtcaaggagctgctggcagaagtggatgcccggacgctggcccggcatgtcaccaaggtggactgcctggttgctaggatactgggcgttaccaaggagatgcagaccctaatgggagtccgctggggcatggaactgctcaccctcccccatggccggcagctacgcctagacctgctggaaaggttccacaccatgtccatcatgctggccgtggacatcctgggctgcaccggctctgcggaggagcgggcagcgctgctgcacaagaccattcagctggcggccgagctgcgggggactatgggcaacatgttcagcttcgcggcggtcatgggtgccctggacatggcccagatttctcggctggagcagacatgggtgaccctgcggcagcgacacacagagggtgccatcctgtacgagaagaagctcaagccttttctcaagagcctcaacgagggcaaagaaggcccgccgctgagcaacaccacgtttcctcatgtgctgcccctcatcaccctgctggagtgtgactcggccccaccagagggccctgagccctggggcagcacggagcacggcgtggaggtggtgctggctcacctggaggccgcccgcacagtggcacaccacggaggcctgtaccacaccaatgctgaagtcaagctgcaggggttccaggcccggccggagctcctggaggtgttcagcacggagttccagatgcgccttctctggggcagtcagggtgccagcagcagccaggcccggcgctatgagaagttcgacaaggtcctcactgccctgtcccacaagctggaacctgctgtccgctccagcgagctgtgaccccagggacatttcccctctgcagctgcggacagcgtcaggggcagaggggcacacaactttccccagagcaccccaaggacactgtgatcaacccgagaatgttctgggttcaactcaagcatctcccttgcacctccagggtcctgcgtggactctgggttccatcccacctgctacatgctcaccaggtctccattgaggaagaacaggaacgccggttcccccaccagcttttgctgctccccttcctgctggggttccctgttttcgagccatgggaggcaggctgctcacgcctcctcactctctgtctgtccctcaccaacaccaaggcctccatctcactgtaaataagtctctgttctgtaaatagatgtacagaagccatgttatttctttcatataataaacttttatgactcttt

SEQ ID NO: 53980 - DNA, 2103 bp, Artificial Sequence
  derived and/or modified sequence
atgacagagcgctgcagcctgtggagcgccctgtctgctgctgcctgctgcttctaccggggcagctttgtgcagttcagcaaggagaagtacatcctggacagcagccctgagaagctgcacaaggagctggaggaggagctgaagctgagcagcacagacctgcggagccacgcctggtaccacggccgcatcccccgggaggtgtctgagaccctggtgcagagaaatggagacttcctgatccgggacagcctgaccagcctgggggactatgtgctgacctgccgctggaggaaccaggccctgcacttcaagatcaacaaggtggtggtgaaggccggggagagctacacccacatccagtacctgtttgagcaggagagctttgaccacgtgcctgccctggtgcgctaccacgtgggcagcaggaaggctgtgtctgagcagagcggggccatcatctactgccctgtgaacagaaccttccccctgcgctacctggaggccagctatggcctgggccagggcagcagcaagccagccagccctgtgagccccagcggccccaagggcagccacatgaagagaagatctgtgaccatgacagatggcctgacagctgacaaggtgaccaggagtgatggctgccccaccagcaccagcctgccccggccccgggacagcatccgcagctgtgccctgtccatggaccagatcccagacctgcacagccccatgagccccatcagcgagagccccagcagccctgcctacagcacagtgaccagggtgcatgctgccccagctgcccccagcgccacagccctgcctgccagccctgtggcccggcgcagcagcgagccccagctgtgccccggcagcgcccccaagacccacggggagagtgacaagggcccccacaccagccccagccacaccctgggcaaggccagccccagccccagcctgagcagctacagcgaccctgacagcggccactactgccagctgcagccccctgtgcggggcagccgggagtgggccgccacagagaccagcagccagcaggcccggagctatggagagcggctgaaggagctgtctgaaaatggagcccctgagggggactggggcaagaccttcaccgtgcccatcgtggaggtgaccagcagcttcaacccagccaccttccagagcctgctgatcccccgggacaaccggcccctggaggtgggcctgctgaggaaggtgaaggagctgctggccgaggtggatgcccggaccctggcccggcacgtgaccaaggtggactgcctggtggcccgcatcctgggcgtgaccaaggagatgcagaccctgatgggcgtgcgctggggcatggagctgctgaccctgccccacggccggcagctgcggctggacctgctggagcgcttccacaccatgagcatcatgctggccgtggacatcctgggctgcaccggcagcgctgaggagcgggccgccctgctgcacaagaccatccagctggccgctgagctgcggggcaccatgggcaacatgttctcctttgctgctgtgatgggcgccctggacatggcccagatcagccggctggagcagacctgggtgaccctgcggcagaggcacacagagggcgccatcctgtatgagaagaagctgaagcccttcctgaagagcctgaatgaaggcaaggagggcccccccctgagcaacaccaccttcccccacgtgctgcccctcatcaccctgctggagtgtgacagcgcccctcctgagggccctgagccctggggcagcacagaacatggagtggaggtggtgctggcccacctggaggccgccaggacagtggcccaccacggcggcctgtaccacaccaatgctgaggtgaagctgcagggcttccaggcccggcctgagctgctggaggtgttcagcacagagttccagatgaggctgctgtggggcagccagggcgccagcagcagccaggccaggagatatgagaagtttgacaaggtgctgacagccctgagccacaagctggagcctgctgtgcgcagcagcgagctgtag

SEQ ID NO: 53981 - DNA, 591 bp, Artificial Sequence
  derived and/or modified sequence
atgcccttcagcaaggagaagtacatcctggacagcagccctgagaagctgcacaaggagctggaggaggagctgaagctgagcagcacagacctgcggagccacgcctggtaccacggccgcatcccccgggaggtgtctgagaccctggtgcagagaaatggagacttcctgatccgggacagcctgaccagcctgggggactatgtgctgacctgccgctggaggaaccaggccctgcacttcaagatcaacaaggtggtggtgaaggccggggagagctacacccacatccagtacctgtttgagcaggagagctttgaccacgtgcctgccctggtgcgctaccacgtgggcagcaggaaggctgtgtctgagcagagcggggccatcatctactgccctgtgaacagaaccttccccctgcgctacctggaggccagctatggcctgggccagggcagcagcaagccagccagccctgtgagccccagcggccccaagggcagccacatgaagagaagatctgtgaccatgacagatggcctgacagctgacaaggtgaccaggagtgatggctgccccacctag

SEQ ID NO: 53982 - DNA, 2103 bp, Artificial Sequence
  derived and/or modified sequence
atgaccgagcggtgcagcctgtggagcgccctgagcgccgccgcctgttgtttctataggggctcgtttgtacagttttccaaggagaagtacatcctcgacagtagtccagagaaactgcacaaggagctcgaggaggagctcaagctctcgagtaccgatttgcgctcacatgcctggtaccacggccggatacctagggaggtgagtgagacccttgttcagcgcaacggcgattttcttatcagggattcacttacaagtttgggcgactatgtgctgacatgcaggtggagaaaccaagctctgcactttaaaatcaacaaagtggtggttaaggccggggaaagttatacacatattcagtacctgttcgagcaggagagctttgaccatgtacccgccctggtgagataccacgtcggctctcggaaggcagtttctgagcagagtggcgccatcatctattgcccagtgaatcgtaccttcccactgcgctatcttgaggcctcctacgggctagggcagggatcctccaaacctgccagccccgtttctccgtctggtcccaaggggtcccatatgaaaagacggtccgtaactatgacggatggcctgaccgctgacaaagttactcgctctgatggctgccctacgtcaacatctctcccacgcccccgcgactcaatcaggagttgcgccttgtcgatggatcagatacccgaccttcattccccgatgagtccgatctctgaaagcccatctagcccagcttattcaaccgtgacacgggtccatgccgctccagccgcccctagtgccactgccctacccgcatcgcctgtcgcacgaaggtcgtcggaacctcaattatgtccgggtagcgctcccaagactcatggtgagagtgataaggggccacacacatccccctcacacacactggggaaagccagcccatcacctagcctcagtagctacagtgatccagattcaggacattactgtcaactgcagccaccagtgaggggatctagggagtgggccgctaccgagacatcctctcagcaggcaaggtcgtatggcgagagactcaaggaactgagcgaaaatggtgcgccagaaggagattggggcaagacctttaccgtgcctatcgttgaagtgacatcttcctttaacccagcaacatttcagagccttttaatcccccgcgacaatcgaccgctggaagtcggcctattacggaaagtgaaggagttgttagccgaagtggatgcccggactctggctagacatgtgacaaaggtagactgtctggtcgcacggatcctgggcgtaaccaaagagatgcagacattaatgggagtgagatgggggatggaactgttgacgctaccacacggacgacagttaaggctcgaccttctggagaggttccacaccatgagcataatgctggcagtggacatactgggatgcaccggctctgccgaggaacgcgccgccctgctccacaagactatccagcttgcagcagagctcaggggaacaatgggcaacatgtttagcttcgcagcagtcatgggagccctcgacatggcacagatttctagactcgaacaaacatgggtcacacttaggcagcggcacactgaaggcgccatcctctacgagaagaaactgaaacccttcctgaaatccctgaacgaaggaaaagagggaccacctcttagcaatactaccttcccccatgtgctgccgctgatcaccctcctggaatgtgactccgctcccccggaaggcccagaaccgtggggtagcaccgagcacggcgtggaggtggttctcgcccacttggaggccgccaggaccgtagcacatcacggaggcctgtatcatactaatgccgaggttaagctgcaggggttccaggcacgtcctgagcttcttgaggtgtttagtaccgaatttcagatgcggctgctgtggggtagccaaggcgcctctagctctcaagctagaagatatgagaaattcgacaaggtcttgacagccctgagccacaaattggagcccgccgttcgatctagcgaattgtag

SEQ ID NO: 53983 - DNA, 591 bp, Artificial Sequence
  derived and/or modified sequence
atgcccttcagcaaggagaagtacatcctggacagcagccccgagaagctgcacaaagaactggaggaagaactcaaactgagctctaccgacctccggagtcatgcctggtaccatggtcggatcccacgggaagtgtccgaaacactggtgcagcggaatggcgacttcttgatccgggatagcctcacctccctaggcgactacgtactaacctgccggtggcggaatcaagcgctgcacttcaagattaataaggttgtcgtgaaggcaggtgaatcctacactcatatccaatacctattcgaacaggagagctttgatcacgtccctgcactggtgcgctaccacgtcggaagtcgcaaggcggtatccgaacagagcggggcgatcatatactgcccggtgaacaggaccttccctctgagatatctcgaggcctcctacggactggggcaaggatcctcaaaaccagcctccccagtttccccttctggacctaagggcagccacatgaaacgtcgtagtgtcaccatgactgacgggctaaccgccgataaggtcactcgaagtgatgggtgtcccacctag

SEQ ID NO: 53984 - DNA, 2103 bp, Artificial Sequence
  derived and/or modified sequence
atgactgagagatgctcactctggtccgcgttgtccgctgccgcttgctgtttctatcgaggctctttcgttcagttctcgaaggaaaaatatattttggactcatctcctgagaaacttcataaagagctcgaggaggaactcaagctctccagtacagacctgcgctcgcacgcatggtatcatgggcgtataccaagggaagtgagtgaaactcttgtgcagaggaacggagattttttgatccgagattctcttacatctctgggcgactacgttctaacttgccgctggcggaatcaagcccttcattttaagatcaataaagtcgtcgtcaaagcgggagagagttatacccacatccaatatttgtttgaacaagagagtttcgaccatgttccagctttggtgcgctaccacgtggggtctagaaaggccgtctctgaacaatcgggagccatcatctactgcccagtgaatcggacatttccgctgagatacctggaagccagctacggattaggtcaaggctcttccaaacctgcgtctccggtgtcccccagcggacccaaaggcagccatatgaagcggaggtcggtgactatgacggatggactcacggccgacaaggttacgaggagcgacggttgtccgacatcgacatcactacccaggcctcgtgattccatacgcagttgtgctctttcaatggatcagattccggatcttcactctccaatgtcccccatctccgagagtccctcgagtccagcgtactcaaccgtcacgagagttcacgccgcacctgccgctccctcggccaccgccctccctgcatcacctgtcgccaggcgctcgtccgagcctcaactgtgtcccggtagcgctcctaagactcatggagagagcgataaaggccctcacacatcaccatctcacacgctcggcaaggcttcaccctcaccatctctgtcaagttatagtgatccagattccgggcattattgtcagttgcagccccctgtgcgcggaagcagggagtgggccgcaaccgagacatcctcccagcaagctaggtcgtacggagagcgccttaaggagctgagcgagaatggcgcaccagagggtgactggggaaaaaccttcactgtgccaatcgtagaggtgacaagttcattcaatcccgcaacattccagtcattacttataccccgagataaccgcccactagaagtaggccttctgaggaaagtaaaggagctgctcgctgaggtcgatgctagaaccctcgccagacacgtgaccaaggtcgactgtctagttgcgagaattctgggagtgacaaaagaaatgcagacactgatgggcgttagatgggggatggagctcctaactctgcctcacggaagacagctgaggctagacttacttgaacgcttccatactatgagcatcatgctggccgtggatatcttgggctgcactgggagcgcggaggaacgcgcagccttactccataagaccatacaactggcggctgaacttcggggaaccatgggcaatatgttttcttttgcagcggtcatgggtgccttggacatggctcaaatcagccgactggaacagacatgggtgaccctgcgccagagacacacagagggagccatactgtatgagaaaaagctaaagcccttcttgaagagcctgaacgaagggaaggaggggcctcccctgtcaaatacaaccttcccacacgtactacccctgattacactgctggaatgtgactccgccccaccagaagggccagagccctggggctctacagaacatggggttgaagtggtgctggctcacctcgaggccgctcgcaccgtggcacaccatgggggactttaccatacgaatgctgaggtgaagctgcagggcttccaagccagacccgagctcttagaagtattttccacagaattccagatgcgcctcctctggggaagtcagggcgctagctcctcacaggcccgtcgatatgagaagttcgacaaggtgctgactgctctttcacacaagttggagcctgccgttagaagctcagagctttag

SEQ ID NO: 53985 - DNA, 591 bp, Artificial Sequence
  derived and/or modified sequence
atgccattctctaaagagaagtatattctggatagcagtcccgaaaagcttcacaaagaactcgaggaggaactcaaacttagcagcacagacctgcggtcccatgcctggtaccacggcaggatccctcgtgaggtatctgagacattggtgcaacggaacggtgactttcttattagggactcactgacctcactgggcgactacgttctcacatgcagatggcgcaaccaggctctccatttcaaaattaacaaggtggttgttaaggcgggtgagtcatacacccacatccagtacctgttcgaacaggaatcatttgatcacgtgccggcactcgtacgttaccacgttggatctcgtaaggccgtatccgaacagagtggagctatcatttattgccccgttaacaggacgtttcccctcagatatttggaggccagctatggcctcggccagggcagtagcaagcccgcatcacccgtgtcaccctcagggcctaaaggctcacatatgaagaggagaagtgtgacgatgacggacggcctaacagccgataaggtaacaagatccgatggctgtcccacttag

SEQ ID NO: 53986 - protein, 337 aa, Artificial Sequence
  derived and/or modified sequence
MSQPSGGRAPGTRIYSWSCPTVMSPGEKLDPIPDSFILQPPVFHPVVPYVTTIFGGLHAGKMVMLQGVVPLDAHSRFQVDFQCGCSLCPRPDIAFHFNPRFHTTKPHVICNTLHGGRWQREARWPHLALRRGSSFLILFLFGNEEVKVSVNGQHFLHFRYRLPLSHVDTLGIFGDILVEAVGFLNINPFVEGSREYPAGHPFLLMSPRLEVPCSHALPQGLSPGQVIIVRGLVLQEPKHFTVSLRDQAAHAPVTLRASFADRTLAWISRWGQKKLISAPFLFYPQRFFEVLLLFQEGGLKLALNGQGLGATSMNQQALEQLRELRISGSVQLYCVHS

SEQ ID NO: 53987 - DNA, 1014 bp, Artificial Sequence
  derived and/or modified sequence
atgtctcaaccgagtggcgggagggcccccggcacacgcatttactcctggtcttgtccaactgtgatgagccctggggagaagctggaccctatcccagattccttcatactccagccgccagtgttccatcctgtggtaccatacgtcactacaatctttggaggcctgcacgctggcaaaatggtgatgctacagggcgtggtgccgttggatgcccatagcaggtttcaagtggattttcaatgtggctgcagcctgtgtccacgcccagatattgcgttccatttcaacccgaggtttcacactacaaagccccacgtgatctgtaatactctgcacggtgggcgatggcagcgcgaggcaaggtggccacatttggcattgaggcggggctcttcttttttgattctttttctcttcggtaatgaagaggttaaggtgagcgtgaacgggcagcattttctccactttcgataccgtctccctctgtcacacgtagataccctgggtatcttcggagacatcttggtcgaagctgtcggcttcctcaacattaatccgtttgtagaagggtctcgggagtaccccgccggtcacccctttcttcttatgtcccccaggctggaggtgccatgttctcatgccctgccccagggactcagcccagggcaagtgatcatcgttcgagggctggttcttcaagaaccgaagcactttacagtatcattacgcgatcaggcagcacatgcgcctgtgacattgagggcctcctttgctgatagaacattggcctggatatccagatggggacagaagaagttaatatctgcccctttccttttttacccacagaggttctttgaggtcctcttgctgtttcaggaagggggcctaaagcttgcacttaatggtcaagggctgggcgccacctctatgaatcaacaggcgctggagcagctccgggaactgaggattagcgggagtgtgcagttgtattgtgtgcactcttag

SEQ ID NO: 53988 - DNA, 1014 bp, Artificial Sequence
  derived and/or modified sequence
atgagccagcccagcggcggccgggcccctggcacccgcatctacagctggagctgccccaccgtgatgagccctggagagaagctggaccccatcccagacagcttcatcctgcagccccctgtgttccaccctgtggtgccctacgtgaccaccatctttggaggcctgcatgctgggaagatggtgatgctgcagggcgtggtgcccctggatgcccacagccgcttccaggtggacttccagtgtggctgcagcctgtgccccaggccagacatcgccttccacttcaacccccgcttccacaccaccaagccccacgtgatctgcaacaccctgcacggcggccgctggcagcgggaggcccgctggccccacctggccctgcggcggggcagcagcttcctgatcctcttcctgtttggaaatgaggaggtgaaggtgtctgtgaatggccagcacttcctgcacttccgctaccgcctgcccctgagccacgtggacaccctgggcatctttggagacatcctggtggaggccgtgggcttcctgaacatcaacccctttgtggagggcagccgggagtacccagctggccaccccttcctgctgatgagcccccggctggaggtgccctgcagccacgccctgccccagggcctgagccctggccaggtgatcatcgtgcggggcctggtgctgcaggagcccaagcacttcaccgtgtccctgcgggaccaggccgcccacgcccctgtgaccctgcgggccagctttgctgacaggaccctggcctggatcagccgctggggccagaagaagctgatcagcgcccccttcctgttctacccccagcgcttctttgaggtgctgctgctcttccaggagggcggcctgaagctggccctgaatggccagggcctgggcgccacctccatgaaccagcaggccctggagcagctgcgggagctgcgcatcagcggctctgtgcagctgtactgtgtgcacagctag

SEQ ID NO: 53989 - DNA, 1425 bp, Artificial Sequence
  derived and/or modified sequence
tccaggcatttaggaccctgactggggcagatgagtcagcccagtgggggcagggctcctggaacgaggatctacagttggagttgccccactgtcatgtcacctggagaaaaactggacccaattcctgacagcttcattctgcaaccaccagtcttccacccggtggttccttatgtcacgacgatttttggaggcctgcatgcaggcaagatggtcatgctgcaaggagtggtccctctagatgcacacagtaggtttcaggtggacttccagtgtggctgcagcctgtgtccccggccagatatcgccttccacttcaaccctcgcttccataccaccaagccccatgtcatctgcaacaccctgcatggtggacgctggcaaagggaggcccggtggccccacctggccctgcgaagaggctccagcttcctcatcctctttctcttcgggaatgaggaagtgaaggtgagtgtgaatggacagcactttctccacttccgctaccggctcccactgtctcatgtggacacgctgggtatatttggtgacatcctggtagaggctgttggattcctgaacatcaatccatttgtggagggcagcagagagtacccagctggacatcctttcctgctgatgagccccaggctggaggtgccctgctcacatgctcttccccagggtctctcgcctgggcaggtcatcatagtacggggactggtcttgcaagagccgaagcattttactgtgagcctgagggaccaggctgcccatgctcctgtgacactcagggcctccttcgcagacagaactctggcctggatctcccgctgggggcagaagaaactgatctcagcccccttcctcttttacccccagagattctttgaggtgctgctcctgttccaggagggagggctgaagctggcgctcaatgggcaggggctgggggccaccagcatgaaccagcaggccctggagcagctgcgggagctccggatcagtggaagtgtccagctctactgtgtccactcctgaggatggttccagggaaataccgccagaaaacaagaaggtcagcccactcccagggccccactctcctcccctcattaaaccatccacctgacaccagcacatcaggcctggttcacctctggggtcacgagactgagtctacaggagctttgggcctgagggaaggcacaagagtgcaaaggttcctcgaactctgcaccttcctccaccaggagcctgggatatggctccatctgccttcagggcctggactgcactcacagaggcaagtgttgtagactaacaaagatactccaaaatacaatggcttaaagaatgtggtcatttattctttattatttatttatttgtggtcaaataaataaataaggttatttattt

SEQ ID NO: 53990 - DNA, 1014 bp, Artificial Sequence
  derived and/or modified sequence
atgagccagcccagcggcggccgggcccccggcacccggatctacagctggtcatgcccgacagtgatgtctcccggggagaaactggatcctatccctgatagcttcattctccagccccccgtctttcaccccgttgtgccctacgttaccaccatcttcggcggcctgcacgccggcaaaatggtgatgctccagggcgtagttcctctagatgctcattcacggttccaggtagacttccagtgtgggtgttctctgtgtccccgaccagatatcgccttccactttaatcccaggtttcatacaacaaaaccacacgttatttgcaatactcttcacggtgggcggtggcagagagaggcccgctggccccatctcgcactccgtagaggctctagttttctcatcctcttcttgtttggcaacgaggaggtaaaggtgtcagtcaacggacagcacttcttgcacttccggtaccgcctgccactctctcacgtcgacaccctgggaattttcggagacatcctcgttgaggccgtaggattcctcaacattaacccttttgtggagggcagccgcgaatatcctgccggacatccatttctgcttatgagtcctagactggaggtgccttgtagccatgccttaccgcaaggattgtctcccgggcaagttataatcgtccggggcttagtgctgcaggagcctaaacacttcaccgtttcacttcgtgaccaggccgctcacgctcccgtgactctcagggcctccttcgccgaccggactcttgcctggatctctcggtgggggcagaagaagttgataagcgcccctttcttgttttatccgcagcgcttttttgaggtgctcttgttattccaggaagggggtctgaagcttgccctaaatggccagggactgggggctacgtcaatgaaccagcaggcacttgagcaattaagagaactccggataagtggtagcgtgcaactgtactgcgtccacagctag

SEQ ID NO: 53991 - DNA, 1014 bp, Artificial Sequence
  derived and/or modified sequence
atgtcccagccttctggcggaagggctccaggtaccaggatctactcctggtcctgcccaaccgttatgtctccaggggagaagctggaccccatccccgactccttcattctgcagcctccagtgtttcatcctgttgtgccctacgtgacaacaattttcgggggattgcacgccggaaagatggtgatgttgcaaggtgtggtgcctctggatgctcacagtcgttttcaggtggacttccagtgcggctgttccttgtgtccaaggcccgatatcgctttccacttcaatcctcgcttccataccacaaagccccatgtgatctgtaataccctgcacggtgggcgatggcagcgcgaagctcggtggcctcatctggccctgagaaggggctcaagttttcttatcctgtttctgttcgggaacgaagaggtgaaggtaagtgtgaatgggcagcatttcctccactttaggtaccgcctcccactcagtcacgtcgacactctaggcatcttcggcgatatacttgtcgaagctgtgggcttcttaaacataaatcccttcgtggaaggcagcagagaatatcccgctggccacccctttcttctgatgtctccacgactagaggtgccctgttcccatgccctgcctcaggggctctcaccgggtcaagtaatcatcgtccgtgggttggttcttcaggagccgaagcactttaccgtttcattgcgagatcaggcggctcatgctcccgttacgctccgggcatcttttgctgatcgcacgctggcatggatctctcgttggggtcaaaagaagttaatctctgcacccttccttttttatcctcaaaggttcttcgaagtgttgcttctgtttcaggagggtggattgaaactggccctcaatggccaggggctcggggctacgagcatgaaccagcaggccctggagcagcttcgagaactgagaatctcgggaagtgttcagttgtattgcgtccactcctag

SEQ ID NO: 53992 - DNA, 1014 bp, Artificial Sequence
  derived and/or modified sequence
atgagccagcccagcggcggcagagcccccggcaccagaatctacagctggagctgccccaccgtgatgagccccggcgagaagctggaccccatccccgacagcttcatcctgcagccccccgtgttccaccccgtggtgccctacgtgaccaccatcttcggcggcctgcacgccggcaagatggtgatgctgcagggcgtggtgcccctggacgcccacagcagattccaggtggacttccagtgcggctgcagcctgtgccccagacccgacatcgccttccacttcaaccccagattccacaccaccaagccccacgtgatctgcaacaccctgcacggcggcagatggcagagagaggccagatggccccacctggccctgagaagaggcagcagcttcctgatcctgttcctgttcggcaacgaggaggtgaaggtgagcgtgaacggccagcacttcctgcacttcagatacagactgcccctgagccacgtggacaccctgggcatcttcggcgacatcctggtggaggccgtgggcttcctgaacatcaaccccttcgtggagggcagcagagagtaccccgccggccaccccttcctgctgatgagccccagactggaggtgccctgcagccacgccctgccccagggcctgagccccggccaggtgatcatcgtgagaggcctggtgctgcaggagcccaagcacttcaccgtgagcctgagagaccaggccgcccacgcccccgtgaccctgagagccagcttcgccgacagaaccctggcctggatcagcagatggggccagaagaagctgatcagcgcccccttcctgttctacccccagagattcttcgaggtgctgctgctgttccaggagggcggcctgaagctggccctgaacggccagggcctgggcgccaccagcatgaaccagcaggccctggagcagctgagagagctgagaatcagcggcagcgtgcagctgtactgcgtgcacagctag

SEQ ID NO: 53993 - protein, 327 aa, Artificial Sequence
  derived and/or modified sequence
MSQPSGGRAPGTRIYSWSCPTVMSPGEKLDPIPDSFILQPPVFHPVVPYVTTIFGGLHAGKMVMLQGVVPLDAHRFQVDFQCGCSLCPRPDIAFHFNPRFHTTKPHVICNTLHGGRWQREARWPHLALRRGSSFLILFLFGNEEVKVSVNGQHFLHFRYRLPLSHVDTLGIFGDILVEAVGFLNINPFVEGSREYPAGHEVPCSHALPQGLSPGQVIIVRGLVLQEPKHFTVSLRDQAAHAPVTLRASFADRTLAWISRWGQKKLISAPFLFYPQRFFEVLLLFQEGGLKLALNGQGLGATSMNQQALEQLRELRISGSVQLYCVHS

SEQ ID NO: 53994 - DNA, 984 bp, Artificial Sequence
  derived and/or modified sequence
atgtcccagcctagtggaggcagagcccctggaactcggatctatagctggagttgtccgacagtgatgagtcccggcgaaaaactcgaccccataccagatagcttcattctgcagcccccagtctttcacccagttgtaccctatgtgacaacgatcttcgggggtctgcacgccggcaagatggttatgctccagggggtggttcccctggatgcacatcggttccaggtcgacttccagtgcgggtgcagcctttgtcctagacccgatatcgccttccactttaatccaaggttccacaccactaaaccacacgtgatatgtaatacactgcatggcggcagatggcagcgtgaggccagatggcctcatctggcactccgcaggggcagctctttccttattctgttcctgtttggcaacgaagaagttaaggtgtccgttaatggccagcacttcttacactttaggtatcgtctccccctatctcacgtggacacattggggatcttcggcgacattctggtggaggcagtcggatttctcaatattaacccctttgtcgaaggaagcagagaatacccagctggacacgaagtgccctgctcacacgccttgcctcagggcctttctcctggccaggtcattatagtgcgcgggcttgtgctgcaggaaccaaaacacttcaccgtttcactgcgcgaccaggccgcccacgcgccagtgactttgcgcgcctcgttcgccgacagaactctggcatggatcagtcgttggggacagaagaaattaattagcgctccattcctgttctacccacagagatttttcgaggtgctgctgctatttcaggagggcgggttaaagttggccttaaacggacagggtctgggagctacaagcatgaatcagcaggctcttgagcagttacgggaattgagaatatctgggtccgttcagctttactgcgtgcactcctag

SEQ ID NO: 53995 - DNA, 984 bp, Artificial Sequence
  derived and/or modified sequence
atgagccagcccagcggcggccgggcccctggcacccgcatctacagctggagctgccccaccgtgatgagccctggagagaagctggaccccatcccagacagcttcatcctgcagccccctgtgttccaccctgtggtgccctacgtgaccaccatctttggaggcctgcatgctgggaagatggtgatgctgcagggcgtggtgcccctggatgcccaccgcttccaggtggacttccagtgtggctgcagcctgtgccccaggccagacatcgccttccacttcaacccccgcttccacaccaccaagccccacgtgatctgcaacaccctgcatggaggccgctggcagcgggaggcccgctggccccacctggccctgcggcggggcagcagcttcctgatcctcttcctgtttggaaatgaggaggtgaaggtgtctgtgaatggccagcacttcctgcacttccgctaccgcctgcccctgagccacgtggacaccctgggcatctttggagacatcctggtggaggccgtgggcttcctgaacatcaacccctttgtggagggcagccgggagtacccagctggccacgaggtgccctgcagccacgccctgccccagggcctgagccctggccaggtgatcatcgtgcggggcctggtgctgcaggagcccaagcacttcaccgtgtccctgcgggaccaggccgcccacgcccctgtgaccctgcgggccagctttgctgacaggaccctggcctggatcagccgctggggccagaagaagctgatcagcgcccccttcctgttctacccccagcgcttctttgaggtgctgctgctcttccaggagggcggcctgaagctggccctgaatggccagggcctgggcgccacctccatgaaccagcaggccctggagcagctgcgggagctgcgcatcagcggctctgtgcagctgtactgtgtgcacagctag

SEQ ID NO: 53996 - DNA, 1667 bp, Artificial Sequence
  derived and/or modified sequence
acaaaccctcgttggccccacaggagccagcctctggcttctctctgcaatggccatgtgctgcagacccggagtgggtagttagttggttaatgccagtcttcctcccctggacactgagttctgctgacagcccccgcccagccagagctctgctgtataccaccgggagtggggctggtgtggagcctggaggtcgcccgctgccctcctagggctgctccagacagcattaaaacgctgcaggtcgcaggtgagactaacagctgggagagctgctccaggcatttaggaccctgactggggcagatgagtcagcccagtgggggcagggctcctggaacgaggatctacagttggagttgccccactgtcatgtcacctggagaaaaactggacccaattcctgacagcttcattctgcaaccaccagtcttccacccggtggttccttatgtcacgacgatttttggaggcctgcatgcaggcaagatggtcatgctgcaaggagtggtccctctagatgcacacaggtttcaggtggacttccagtgtggctgcagcctgtgtccccggccagatatcgccttccacttcaaccctcgcttccataccaccaagccccatgtcatctgcaacaccctgcatggtggacgctggcaaagggaggcccggtggccccacctggccctgcgaagaggctccagcttcctcatcctctttctcttcgggaatgaggaagtgaaggtgagtgtgaatggacagcactttctccacttccgctaccggctcccactgtctcatgtggacacgctgggtatatttggtgacatcctggtagaggctgttggattcctgaacatcaatccatttgtggagggcagcagagagtacccagctggacatgaggtgccctgctcacatgctcttccccagggtctctcgcctgggcaggtcatcatagtacggggactggtcttgcaagagccgaagcattttactgtgagcctgagggaccaggctgcccatgctcctgtgacactcagggcctccttcgcagacagaactctggcctggatctcccgctgggggcagaagaaactgatctcagcccccttcctcttttacccccagagattctttgaggtgctgctcctgttccaggagggagggctgaagctggcgctcaatgggcaggggctgggggccaccagcatgaaccagcaggccctggagcagctgcgggagctccggatcagtggaagtgtccagctctactgtgtccactcctgaggatggttccagggaaataccgccagaaaacaagaaggtcagcccactcccagggccccactctcctcccctcattaaaccatccacctgacaccagcacatcaggcctggttcacctctggggtcacgagactgagtctacaggagctttgggcctgagggaaggcacaagagtgcaaaggttcctcgaactctgcaccttcctccaccaggagcctgggatatggctccatctgccttcagggcctggactgcactcacagaggcaagtgttgtagactaacaaagatactccaaaatacaatggcttaaagaatgtggtcatttattctttattatttatttatttgtggtcaaataaataaataaggtta

SEQ ID NO: 53997 - DNA, 1789 bp, Artificial Sequence
  derived and/or modified sequence
cctcagcttcccagagtgctgagattacaggcatgagccacagagcccagcccaggtaacttctacatggggaaaggtgagcctgggaaggccattgttaagtgcctctccaggggtccatttcagagttagctgtcagttcctaacttgtccattcttcttgcctcccagttcctagtctccagccactcaacagtcctcagaaagccccagtaccaggcttctggggaccagggtgacatctagtggatggcaagcctccctggggtcactgcagcctgttgtgtcctaggagctggggaaaggcaactggctggtgctgaatttggcaagggagcggaatttgacttctctggtgtaatgcagctttgccgtgtgacggtccaggaaaggggattaggtggaagaaaatatttcagtgaacactgatttttacctataaggaattttctgtttggagaggaaaagttgagttttattctgctcctttcctcccactcgcctgacatagaggtccctaagccctttctccaaacctgcatggatgagtttcttttcttgttcaggtggttccttatgtcacgacgatttttggaggcctgcatgcaggcaagatggtcatgctgcaaggagtggtccctctagatgcacacaggtttcaggtggacttccagtgtggctgcagcctgtgtccccggccagatatcgccttccacttcaaccctcgcttccataccaccaagccccatgtcatctgcaacaccctgcatggtggacgctggcaaagggaggcccggtggccccacctggccctgcgaagaggctccagcttcctcatcctctttctcttcgggaatgaggaagtgaaggtgagtgtgaatggacagcactttctccacttccgctaccggctcccactgtctcatgtggacacgctgggtatatttggtgacatcctggtagaggctgttggattcctgaacatcaatccatttgtggagggcagcagagagtacccagctggacatgaggtgccctgctcacatgctcttccccagggtctctcgcctgggcaggtcatcatagtacggggactggtcttgcaagagccgaagcattttactgtgagcctgagggaccaggctgcccatgctcctgtgacactcagggcctccttcgcagacagaactctggcctggatctcccgctgggggcagaagaaactgatctcagcccccttcctcttttacccccagagattctttgaggtgctgctcctgttccaggagggagggctgaagctggcgctcaatgggcaggggctgggggccaccagcatgaaccagcaggccctggagcagctgcgggagctccggatcagtggaagtgtccagctctactgtgtccactcctgaggatggttccagggaaataccgccagaaaacaagaaggtcagcccactcccagggccccactctcctcccctcattaaaccatccacctgacaccagcacatcaggcctggttcacctctggggtcacgagactgagtctacaggagctttgggcctgagggaaggcacaagagtgcaaaggttcctcgaactctgcaccttcctccaccaggagcctgggatatggctccatctgccttcagggcctggactgcactcacagaggcaagtgttgtagactaacaaagatactccaaaatacaatggcttaaagaatgtggtcatttattctttattatttatttatttgtggtcaaataaataaataaggtta

SEQ ID NO: 53998 - DNA, 984 bp, Artificial Sequence
  derived and/or modified sequence
atgagccagcccagcggcggccgggcccccggcacccggatctactcgtggtcttgccctacggtgatgagccccggggagaaactggaccccattccggattcctttatcctccaaccccccgtgttccacccagtggttccctacgtgactaccatctttggtggcctccatgccggaaaaatggttatgctgcagggggtggtcccactcgacgcccatagattccaggtggatttccagtgtggatgttcactgtgccctagacccgatatagcctttcattttaacccaaggtttcataccaccaagcctcacgtgatctgtaatacattgcatggcgggcggtggcagcgcgaagctcgctggccccatctggccttgcggagaggaagttccttcttgattctctttcttttcggaaatgaagaggtgaaagtgtctgttaacgggcagcattttctccatttcagatacaggcttccactgtcacatgtagatactcttggaatcttcggcgatattctcgtcgaggctgtggggttcttgaatatcaacccgtttgtagaggggtcccgcgaataccctgctggccacgaggtgccgtgttctcatgcattgccccagggactgagcccaggtcaggtaatcatcgtcagaggcctggtgctgcaagaacctaagcactttaccgttagcctgcgcgatcaggctgcacacgctcctgtgactctgcgggcaagctttgcagataggaccttggcctggatctcccggtggggccagaagaaactgataagcgccccattcctcttttatcctcagcggttcttcgaggttctccttttgtttcaggagggcggattgaagcttgcacttaacggtcaggggctgggagctacatcaatgaaccagcaagctctcgaacagttaagagaattgcgaataagcggctccgtacaactgtactgcgtgcactcatag

SEQ ID NO: 53999 - DNA, 984 bp, Artificial Sequence
  derived and/or modified sequence
atgtcacaaccctcggggggacgcgcacccggaacacgcatctattcctggagctgccctaccgttatgtcccccggagagaaactggaccccatcccagactcgtttattctgcagcccccagtgttccacccagttgtgccgtacgtgactacgatttttggcggactccacgcgggaaagatggttatgttacagggtgtagtgcccctggacgcgcatagattccaggtcgattttcaatgcggctgttcgctttgtcctcgccctgatattgcgttccactttaacccacgattccacaccacgaagcctcacgtgatctgcaacaccctgcatggaggcagatggcagagggaggcgagatggccacacctggcactgaggcgcggaagctcctttttaattctgtttctgtttggcaatgaggaagtcaaagtgagcgtgaatgggcagcacttcttacacttcagatacaggctccctctgagccacgtagacacattgggcattttcggagatatcctcgttgaggcagtgggattcctgaacataaacccctttgtggagggaagtagggaatacccagccggtcacgaggtgccctgttcccacgccttaccccaggggctgagtcccggacaggtgatcatcgttagagggttggtcctgcaggaacctaaacactttacagtatccctcagggatcaggctgcccacgccccagtgactctgcgagcctcgtttgcggaccgtacattggcctggataagcaggtggggacagaaaaagctgatttcagccccatttcttttctatccacagaggttctttgaggtgctgctgctgttccaagagggcggtctaaagttggctctgaatggccaggggctgggggctacgtccatgaaccaacaagccctggaacaactgagagagctgaggatcagtggcagcgtccagttatactgcgtgcactcatag

SEQ ID NO: 54000 - DNA, 984 bp, Artificial Sequence
  derived and/or modified sequence
atgagccagcccagcggcggcagagcccccggcaccagaatctacagctggagctgccccaccgtgatgagccccggcgagaagctggaccccatccccgacagcttcatcctgcagccccccgtgttccaccccgtggtgccctacgtgaccaccatcttcggcggcctgcacgccggcaagatggtgatgctgcagggcgtggtgcccctggacgcccacagattccaggtggacttccagtgcggctgcagcctgtgccccagacccgacatcgccttccacttcaaccccagattccacaccaccaagccccacgtgatctgcaacaccctgcacggcggcagatggcagagagaggccagatggccccacctggccctgagaagaggcagcagcttcctgatcctgttcctgttcggcaacgaggaggtgaaggtgagcgtgaacggccagcacttcctgcacttcagatacagactgcccctgagccacgtggacaccctgggcatcttcggcgacatcctggtggaggccgtgggcttcctgaacatcaaccccttcgtggagggcagcagagagtaccccgccggccacgaggtgccctgcagccacgccctgccccagggcctgagccccggccaggtgatcatcgtgagaggcctggtgctgcaggagcccaagcacttcaccgtgagcctgagagaccaggccgcccacgcccccgtgaccctgagagccagcttcgccgacagaaccctggcctggatcagcagatggggccagaagaagctgatcagcgcccccttcctgttctacccccagagattcttcgaggtgctgctgctgttccaggagggcggcctgaagctggccctgaacggccagggcctgggcgccaccagcatgaaccagcaggccctggagcagctgagagagctgagaatcagcggcagcgtgcagctgtactgcgtgcacagctag

SEQ ID NO: 54001 - DNA, 828 bp, Artificial Sequence
  derived and/or modified sequence
atggtaatgcttcagggagttgtacctctggacgcgcaccgctttcaggttgattttcaatgcggttgctccctttgtcccaggcctgacattgctttccactttaaccctaggttccacacaactaaaccccatgtgatttgtaataccttgcacggcggtaggtggcagagggaggcacgctggccacacctggcgctgcgaaggggcagctccttcctcattctatttctcttcgggaatgaagaggttaaagtgtctgtaaatggccagcacttcttacactttcgctaccggttgcccctgtctcatgtggatactctaggcattttcggcgatatcttggtcgaggcagttggattcctcaacatcaaccctttcgtggagggctccagggagtaccctgccggccatccattcctactcatgtcccccaggctggaagtgccctgcagtcacgctctgccacaaggcctttcaccagggcaggttataattgtgcggggactcgtccttcaggagccaaaacatttcacggtgtcccttcgtgaccaggccgcccacgctccggtgaccctccgagctagctttgctgaccgcaccctggcatggatcagccgatggggccaaaagaaactgatttccgctcccttcttattctaccctcagcggtttttcgaagtgcttcttctgttccaagaagggggactgaagttggctctcaacggccaggggttgggagctacctctatgaatcaacaggccttagaacagttgcgagagttgcgcatctccggctctgtgcaattgtactgtgtacacagttag

SEQ ID NO: 54002 - DNA, 828 bp, Artificial Sequence
  derived and/or modified sequence
atggtgatgctgcagggcgtggtgcccctggatgcccaccgcttccaggtggacttccagtgtggctgcagcctgtgccccaggccagacatcgccttccacttcaacccccgcttccacaccaccaagccccacgtgatctgcaacaccctgcacggcggccgctggcagcgggaggcccgctggccccacctggccctgcggcggggcagcagcttcctgatcctcttcctgtttggaaatgaggaggtgaaggtgtctgtgaatggccagcacttcctgcacttccgctaccgcctgcccctgagccacgtggacaccctgggcatctttggagacatcctggtggaggccgtgggcttcctgaacatcaacccctttgtggagggcagccgggagtacccagctggccaccccttcctgctgatgagcccccggctggaggtgccctgcagccacgccctgccccagggcctgagccctggccaggtgatcatcgtgcggggcctggtgctgcaggagcccaagcacttcaccgtgtccctgcgggaccaggccgcccacgcccctgtgaccctgcgggccagctttgctgacaggaccctggcctggatcagccgctggggccagaagaagctgatcagcgcccccttcctgttctacccccagcgcttctttgaggtgctgctgctcttccaggagggcggcctgaagctggccctgaatggccagggcctgggcgccacctccatgaaccagcaggccctggagcagctgcgggagctgcgcatcagcggctctgtgcagctgtactgtgtgcacagctag

SEQ ID NO: 54003 - DNA, 828 bp, Artificial Sequence
  derived and/or modified sequence
atggtgatgctgcagggcgtggtgcccctggacgcccaccggttccaggtcgacttccagtgtggttgcagcctgtgccccagaccagacatagcgttccactttaacccacgctttcatacaacaaagccacacgtgatttgcaacaccctacatggcggccggtggcaacgggaagcccgatggcctcatctggccctcaggcgaggcagcagctttctcatcctgttcctgtttggcaatgaggaggtgaaagtgtcggtgaacggacaacacttcctacatttcagataccgcctccctctcagccacgtagatacacttggcattttcggcgatattttagttgaggctgtgggtttcctgaatataaatccctttgttgaaggctctagagagtaccctgccggtcacccattcttgctgatgtcgccgcgactcgaagttccttgttcacacgctctaccacagggactgtcaccgggccaagtgatcatcgtgagagggctggtgctgcaggagcccaagcattttaccgtgagtctcagggatcaggccgcacatgctcccgtgaccctgagggcttcattcgccgatagaactctcgcttggatatctagatggggacagaaaaagcttatttccgctcccttcctgttttatcctcagagattttttgaagttttgctactatttcaggagggaggcctgaagctggcactgaatgggcaaggcctgggggcaacctcaatgaatcaacaggcacttgagcagctgcgcgagctgcgcatctcaggatctgtgcagttatattgtgtgcattcgtag

SEQ ID NO: 54004 - DNA, 828 bp, Artificial Sequence
  derived and/or modified sequence
atggtgatgctgcagggggttgttccactggacgctcaccgttttcaggttgattttcagtgcgggtgctctctgtgtcccagacccgatatagcatttcacttcaaccccagatttcacaccaccaaaccgcacgtgatctgcaacacattgcatggcggaaggtggcagcgagaggcacggtggccccacctggccctacggagggggagttcctttctgatcctctttttatttgggaatgaggaagtcaaagtgtcagtgaatggtcagcatttcctgcacttcaggtaccggctgccactctctcatgtagacacccttggaatcttcggggatatcctcgtcgaagcagttggcttcctaaatattaatccttttgtcgaagggtcacgggaatatcctgctggacatcctttcctgttaatgagtcccagacttgaagtgccttgcagccacgccctcccacaggggctgtcgccaggccaggtgatcattgtccgtgggctggtgctccaggagcctaagcactttaccgtgtcacttagagatcaagctgcccacgccccagtgaccctcagggccagtttcgccgaccggactctggcttggatctccagatgggggcagaaaaaactgatatcagcaccattcttattttacccacagagatttttcgaggttctgctcctgttccaggaggggggactaaagctggctttgaacgggcaggggctaggagccacgagtatgaaccagcaggccctggagcagcttagagaactgagaatcagcggttccgtgcagctgtactgcgtgcactcctag

SEQ ID NO: 54005 - DNA, 828 bp, Artificial Sequence
  derived and/or modified sequence
atggtgatgctgcagggcgtggtgcccctggacgcccacagattccaggtggacttccagtgcggctgcagcctgtgccccagacccgacatcgccttccacttcaaccccagattccacaccaccaagccccacgtgatctgcaacaccctgcacggcggcagatggcagagagaggccagatggccccacctggccctgagaagaggcagcagcttcctgatcctgttcctgttcggcaacgaggaggtgaaggtgagcgtgaacggccagcacttcctgcacttcagatacagactgcccctgagccacgtggacaccctgggcatcttcggcgacatcctggtggaggccgtgggcttcctgaacatcaaccccttcgtggagggcagcagagagtaccccgccggccaccccttcctgctgatgagccccagactggaggtgccctgcagccacgccctgccccagggcctgagccccggccaggtgatcatcgtgagaggcctggtgctgcaggagcccaagcacttcaccgtgagcctgagagaccaggccgcccacgcccccgtgaccctgagagccagcttcgccgacagaaccctggcctggatcagcagatggggccagaagaagctgatcagcgcccccttcctgttctacccccagagattcttcgaggtgctgctgctgttccaggagggcggcctgaagctggccctgaacggccagggcctgggcgccaccagcatgaaccagcaggccctggagcagctgagagagctgagaatcagcggcagcgtgcagctgtactgcgtgcacagctag

SEQ ID NO: 54006 - protein, 266 aa, Artificial Sequence
  derived and/or modified sequence
MVMLQGVVPLDAHRFQVDFQCGCSLCPRPDIAFHFNPRFHTTKPHVICNTLHGGRWQREARWPHLALRRGSSFLILFLFGNEEVKVSVNGQHFLHFRYRLPLSHVDTLGIFGDILVEAVGFLNINPFVEGSREYPAGHEVPCSHALPQGLSPGQVIIVRGLVLQEPKHFTVSLRDQAAHAPVTLRASFADRTLAWISRWGQKKLISAPFLFYPQRFFEVLLLFQEGGLKLALNGQGLGATSMNQQALEQLRELRISGSVQLYCVHS

SEQ ID NO: 54007 - DNA, 801 bp, Artificial Sequence
  derived and/or modified sequence
atggtgatgctgcagggcgtcgtgcccctggatgcacatcgctttcaggtcgatttccagtgcgggtgctctttgtgtccccgacctgatattgccttccatttcaaccctagattccacaccacgaaaccccatgtgatctgcaataccctgcacgggggccgctggcagcgcgaagcccgatggccccacttggccctcagaaggggcagctcatttctcatcctgttcctgtttggaaacgaagaggtcaaagtgagcgtgaatggacaacactttctacatttccggtatcggctcccactctctcatgtggatactctgggcatcttcggtgacattttagtggaagcggttggcttcttaaacatcaatccctttgtcgaaggcagccgggaatatcccgccggccacgaggtcccatgtagccacgcgctccctcaaggattgtcccccggccaggtgataattgtccgcggtctcgtgcttcaggagcccaaacacttcacagtctctttgcgggatcaggccgcacatgcccctgttactttgagagcgtcattcgctgaccgaaccttggcgtggatttctcggtgggggcagaaaaaactaatttccgcccccttccttttctatccccagcgctttttcgaggtgcttcttttatttcaggagggaggcctcaagctggcacttaatggtcaggggctgggagccaccagcatgaaccagcaagcacttgagcagttgcgcgagctgaggatcagcggaagcgttcagctgtattgcgtgcactcgtag

SEQ ID NO: 54008 - DNA, 801 bp, Artificial Sequence
  derived and/or modified sequence
atggtgatgctgcagggcgtggtgcccctggatgcccaccgcttccaggtggacttccagtgtggctgcagcctgtgccccaggccagacatcgccttccacttcaacccccgcttccacaccaccaagccccacgtgatctgcaacaccctgcacggcggccgctggcagcgggaggcccgctggccccacctggccctgcggcggggcagcagcttcctgatcctcttcctgtttggaaatgaggaggtgaaggtgtctgtgaatggccagcacttcctgcacttccgctaccgcctgcccctgagccacgtggacaccctgggcatctttggagacatcctggtggaggccgtgggcttcctgaacatcaacccctttgtggagggcagccgggagtacccagctggccacgaggtgccctgcagccacgccctgccccagggcctgagccctggccaggtgatcatcgtgcggggcctggtgctgcaggagcccaagcacttcaccgtgtccctgcgggaccaggccgcccacgcccctgtgaccctgcgggccagctttgctgacaggaccctggcctggatcagccgctggggccagaagaagctgatcagcgcccccttcctgttctacccccagcgcttctttgaggtgctgctgctcttccaggagggcggcctgaagctggccctgaatggccagggcctgggcgccacctccatgaaccagcaggccctggagcagctgcgggagctgcgcatcagcggctctgtgcagctgtactgtgtgcacagctag

SEQ ID NO: 54009 - DNA, 801 bp, Artificial Sequence
  derived and/or modified sequence
atggtgatgctgcagggcgtggtgcccctggacgcccaccggttccaggttgatttccagtgcggatgctcgctatgtcctagaccagacatcgcctttcatttcaatccgcgtttccacaccacaaagccacatgtgatatgcaatacactgcacggagggcgttggcagagagaggcgcgatggccccatctcgccctacgacgggggtcaagctttctgattttgttcttatttggaaacgaggaggtaaaggtgagtgtgaacggacagcacttcttacattttaggtaccgcctacccctttcgcacgttgacactcttgggatctttggcgatatcttagtagaggcagtggggttccttaatattaatccattcgtggagggtagcagagagtaccctgccggccatgaggtaccgtgttctcatgctctgccacaaggcctcagtcctggtcaagttataatagtccgcggattggtgctgcaggagcccaagcacttcacagtaagtctccgtgatcaggcagcacatgctccagtcactctccgcgctagctttgccgatcgcacacttgcctggatttcccggtggggtcaaaagaaactgattagcgcaccctttctgttctatccacagcgtttctttgaggttttgcttctcttccaggagggcggactgaagctagccctaaacggtcagggactgggagccacaagcatgaatcaacaagccctggagcagctgcgtgagctgcgtattagcggttctgtgcagctgtactgcgtccacagttag

SEQ ID NO: 54010 - DNA, 801 bp, Artificial Sequence
  derived and/or modified sequence
atggtgatgctgcagggagtggtgccccttgatgcacaccgatttcaggtcgattttcagtgcggctgtagcctctgtccaagaccggacatcgccttccacttcaatccacggtttcacacgactaagccccacgtcatctgcaacactttgcatggcggaagatggcaacgcgaggcaagatggccgcatctggcccttcgaagagggtcgtcctttctgattctgtttctttttgggaatgaggaggtaaaggtaagcgtgaacggccagcattttctgcattttagataccgtctcccactgagtcacgtggacacacttggtattttcggcgacatcctggtcgaggccgttggcttccttaacattaacccctttgtggaaggatctagggaatatccggctggtcatgaggtgccatgctctcatgcacttcctcaggggctgtctcccggacaggtgataattgttcggggattggtgctccaggagccgaaacatttcactgtaagtctgagggaccaggctgcccacgcacccgtaaccctccgagccagcttcgccgaccggactctcgcctggatctctagatggggccagaaaaaactgatttcggcccctttcctgttttatcctcagcgtttttttgaggtcttgcttttgttccaggaaggagggctgaagcttgccctgaacggtcagggcctaggggctacgtctatgaaccagcaggctctcgagcaactgcgcgagctgcgcatcagtggcagcgtgcaactttactgcgtacatagttag

SEQ ID NO: 54011 - DNA, 801 bp, Artificial Sequence
  derived and/or modified sequence
atggtgatgctgcagggcgtggtgcccctggacgcccacagattccaggtggacttccagtgcggctgcagcctgtgccccagacccgacatcgccttccacttcaaccccagattccacaccaccaagccccacgtgatctgcaacaccctgcacggcggcagatggcagagagaggccagatggccccacctggccctgagaagaggcagcagcttcctgatcctgttcctgttcggcaacgaggaggtgaaggtgagcgtgaacggccagcacttcctgcacttcagatacagactgcccctgagccacgtggacaccctgggcatcttcggcgacatcctggtggaggccgtgggcttcctgaacatcaaccccttcgtggagggcagcagagagtaccccgccggccacgaggtgccctgcagccacgccctgccccagggcctgagccccggccaggtgatcatcgtgagaggcctggtgctgcaggagcccaagcacttcaccgtgagcctgagagaccaggccgcccacgcccccgtgaccctgagagccagcttcgccgacagaaccctggcctggatcagcagatggggccagaagaagctgatcagcgcccccttcctgttctacccccagagattcttcgaggtgctgctgctgttccaggagggcggcctgaagctggccctgaacggccagggcctgggcgccaccagcatgaaccagcaggccctggagcagctgagagagctgagaatcagcggcagcgtgcagctgtactgcgtgcacagctag

SEQ ID NO: 54012 - protein, 200 aa, Artificial Sequence
  derived and/or modified sequence
MSRREGSLDPQTDSSVSLLPHLEAKIRQTHSLAHLLTKYAEQLLQEYVQLQGDPFGLPSFSPPRLPVAGLSAPAPSHAGLPVHERLRLDAAALAALPPLLDAVCRRQAELNPRAPRLLRRLEDAARQARALGAAVEALLAALGAANRGPRAEPPAATASAASATGVFPAKVLGLRVCGLYREWLSRTEGDLGQLLPGGSA

SEQ ID NO: 54013 - DNA, 603 bp, Artificial Sequence
  derived and/or modified sequence
atgagcagaagagagggcagcctggacccccagaccgacagcagcgtgagcctgctgccccacctggaggccaagatcagacagacccacagcctggcccacctgctgaccaagtacgccgagcagctgctgcaggagtacgtgcagctgcagggcgaccccttcggcctgcccagcttcagcccccccagactgcccgtggccggcctgagcgcccccgcccccagccacgccggcctgcccgtgcacgagagactgagactggacgccgccgccctggccgccctgccccccctgctggacgccgtgtgcagaagacaggccgagctgaaccccagagcccccagactgctgagaagactggaggacgccgccagacaggccagagccctgggcgccgccgtggaggccctgctggccgccctgggcgccgccaacagaggccccagagccgagccccccgccgccaccgccagcgccgccagcgccaccggcgtgttccccgccaaggtgctgggcctgagagtgtgcggcctgtacagagagtggctgagcagaaccgagggcgacctgggccagctgctgcccggcggcagcgcctag

SEQ ID NO: 54014 - DNA, 603 bp, Artificial Sequence
  derived and/or modified sequence
atgagccgaagggagggctctttggacccacagaccgacagctctgtttctcttctgcctcaccttgaggcgaagataagacagacacactctttggcccacctcctcacaaagtacgccgaacagctactgcaggaatacgttcaattgcaaggagacccgtttggtctcccgagttttagcccgcctaggcttccagttgccgggcttagcgccccagccccgagccacgccggacttccagtccacgaaagacttaggctggacgccgccgcattggccgctcttccccccctgttggacgcggtgtgccggcgccaggccgaactcaacccaagagcaccacgcttgctgagacggcttgaagacgctgctcggcaagcaagggccttgggggccgctgttgaggcactgttagccgcactgggcgcggcaaacaggggacctcgggccgagccaccagcagctactgcatccgcagcctcagctaccggagtatttccggcaaaagtccttggactccgagtgtgtgggctgtatcgcgagtggctgagcagaaccgagggtgatcttggccaattactgcccggcgggtctgcgtag

SEQ ID NO: 54015 - DNA, 1660 bp, Artificial Sequence
  derived and/or modified sequence
ggggcgtgaagggagccgggatcagccaggggccagcatgagccggagggagggaagtctggacccccagactgattcctcagtctcacttcttccccacttggaggccaagatccgtcagacacacagccttgcgcacctcctcaccaaatacgctgagcagctgctccaggaatatgtgcagctccagggagaccccttcgggctgcccagcttctcgccgccgcggctgccggtggccggcctgagcgccccggctccgagccacgcggggctgccagtgcacgagcggctgcggctggacgcggcggcgctggccgcgctgcccccgctgctggacgcagtgtgtcgccgccaggccgagctgaacccgcgcgcgccgcgcctgctgcgccgcctggaggacgcggcgcgccaggcccgggccctgggcgccgccgtggaggccttgctggccgcgctgggcgccgccaaccgcgggccccgggccgagccccccgccgccaccgcctcagccgcctccgccaccggggtcttccccgccaaggtgctggggctccgcgtttgcggcctctaccgcgagtggctgagccgcaccgagggcgacctgggccagctgctgcccgggggctcggcctgagcgccgcggggcagctcgccccgcctcctcccgctgggttccgtctctccttccgcttctttgtctttctctgccgctgtcggtgtctgtctgtctgctcttagctgtctccattgcctcggccttctttgctttttgtgggggagaggggaggggacgggcagggtctctgtcgcccaggctggggtgcagtggcgcgatcccagcactgcagcctcaacctcctgggctcaagccatccttccgcctcagcttccccagcagctgggactacaggcacgcgccaccacagccggctaattttttatttaattttttgtagagacgaggtttcgccatgttgcccaggctggtcttgaactccggggctcaagcgatcctcccgcttcagcctccctaagtgctgggattgcaggcgtgagccactttcccagcctctctttgctttgcctgccccgttctcttaactcttggaccctcctcgtctgcatggtaactccgtctgagtctaccattttcttgctctccctccttccttgggcctgcctcagttccctttggcctccccctttacccagctcttggggtgtctctgttttttccatccccacttcctgccttctcgtggccctgtgtgagcacatgtgtacatctcagccttatctcaaggaggtgacaccttctctccttgtccccatctggctgtctctctgtgcttccctggccaggggcgtgcctgctggtcctatggggggaaggctactctgcatctcagccaccttcctcaggctcactccacctacatccccagtctgccacaccccatccctttgggcctcagccctgtccctttgatgtcctcctttccttcagcccctctgccctgtccctgcacacctccactgcctcccagcagatctgtggagacaaaacaagcaacaccttaaaagagttttatttctgaaaataaattaattttttgtaaataaaatgtttaaaaataaaaaagaaactaaagtt

SEQ ID NO: 54016 - DNA, 603 bp, Artificial Sequence
  derived and/or modified sequence
atgagcagaagagagggcagcctggacccccagacagacagctctgtgtccctgctgccccacctggaggccaagatccggcagacccacagcctggcccacctgctgaccaagtatgcagagcagctgctgcaggagtatgtgcagctgcagggcgaccccttcggcctgcccagcttcagccccccccggctgcctgtggccggcctgagcgccccagcccccagccacgccggcctgcctgtgcatgagcggctgcggctggatgctgctgccctggccgccctgccccccctgctggatgctgtgtgccggcggcaggccgagctgaacccccgggccccccggctgctgcggcggctggaggatgctgcccggcaggcccgggccctgggcgctgctgtggaggccctgctggccgccctgggcgccgccaacagaggccccagggctgagcccccagctgccacagccagcgctgccagcgccaccggggtcttccctgccaaggtgctgggcctgcgggtgtgtggcctgtaccgggagtggctgagcaggacagaaggagacctgggccagctgctgcccggcggcagcgcctag

SEQ ID NO: 54017 - DNA, 603 bp, Artificial Sequence
  derived and/or modified sequence
atgagccggcgggagggcagcctggacccccagaccgacagcagcgtatctctcctgccacatctcgaagccaaaattcgccaaacccacagcctggcacatcttctgactaagtacgccgaacagttgctgcaagagtatgttcaactccagggtgatccctttggactgccctcctttagcccccctagattaccagtcgctgggttaagcgcgccagcgccttcacatgccggcctgcctgtgcacgagcgcctccgtctggatgctgcagctctggcagcgcttcctccgttactggacgccgtctgtagacgccaggctgagctaaatcccagagcaccaagactcctcagaaggcttgaagatgctgcacgccaggctcgggctttgggagccgcggtggaggctttgcttgcagccctgggagcggccaacaggggaccccgagctgaaccacccgccgccaccgcctccgctgcttctgctacaggcgtgttcccagccaaagtgctaggcctgcgggtctgtggtctgtatcgcgagtggctgagccggaccgagggagatcttggacagcttcttcccggcggcagcgcttag

SEQ ID NO: 54018 - DNA, 603 bp, Artificial Sequence
  derived and/or modified sequence
atgtcgaggcgggagggctccctggatccccagaccgatagctccgtatctttgctcccccacctggaggccaaaatcaggcagacccacagcctcgcacacctactgacaaagtatgcagagcagcttctccaagaatacgtgcagctgcagggcgatccgtttggcttgccatctttcagccctccacgcctgccggttgctgggcttagcgctcccgctcccagccacgccggtctcccagtgcacgagcgtctgagactcgatgccgctgcgttagccgcactgccgcctttgctcgacgccgtatgtcgaaggcaggcggaacttaatcctagggcacccagattgctcagaaggctggaagatgccgctaggcaggcacgggcactcggcgctgccgtcgaggccctcctcgccgcactgggagctgctaaccgaggccctcgggctgagccccctgccgcaaccgcaagtgcagctagcgcaaccggagttttccctgccaaggtgttaggacttcgtgtgtgtggtttatatagagaatggctctctcgcactgaaggcgacttaggacagctgttaccaggcggatcagcctag

SEQ ID NO: 54019 - protein, 690 aa, Artificial Sequence
  derived and/or modified sequence
MGDEDWEAEINPHMSSYVPIFEKDRYSGENGDNFNRTPASSSEMDDGPSRRDHFMKSGFASGRNFGNRDAGECNKRDNTSTMGGFGVGKSFGNRGFSNSRFEDGDSSGFWRESSNDCEDNPTRNRGFSKRGDNDLDPDECMQRTGGLFGSRRPVLSGTGNGDTSQSRSGSGSERGGYKGLNEEVITGSGKNSWKSEAEGGESSDTQGPKVTYIPPPPPEDEDSIFAHYQTGINFDKYDTILVEVSGHDAPPAILTFEEANLCQTLNNNIAKAGYTKLTPVQKYSIPIILAGRDLMACAQTGSGKTAAFLLPILAHMMHDGITASRFKELQEPECIIVAPTRELVNQIYLEARKFSFGTCVRAVVIYGGTQLGHSIRQIVQGCNILCATPGRLMDIIGKEKIGLKQIKYLVLDEADRMLDMGFGPEMKKLISCPGMPSKEQRQTLMFSATFPEEIQRLAAEFLKSNYLFVAVGQVGGACRDVQQTVLQVGQFSKREKLVEILRNIGDERTMVFVETKKKADFIATFLCQEKISTTSIHGDREQREREQALGDFRFGKCPVLVATSVAARGLDIENVQHVINFDLPSTIDEYVHRIGRTGRCGNTGRAISFFDLESDNHLAQPLVKVLTDAQQDVPAWLEEIAFSTYIPGFSGSTRGNVFASVDTRKGKSTLNTAGFSSSQAPNPVDDESWD

SEQ ID NO: 54020 - protein, 105 aa, Artificial Sequence
  derived and/or modified sequence
MGDEDWEAEINPHMSSYVPIFEKDRYSGENGDNFNRTPASSSEMDDGPSRRDHFMKSGFASGRNFGNRDAGECNKRDNTSTMGGFGVGKSFGNRGFSNSRFEDGD

SEQ ID NO: 54021 - DNA, 2073 bp, Artificial Sequence
  derived and/or modified sequence
atgggggatgaggactgggaggccgagatcaatcctcatatgtcttcatacgtacctatttttgagaaagatagatacagcggcgagaacggcgacaattttaacaggacccccgcatcttcttcagagatggatgatggcccctctaggcgagatcactttatgaagtctggcttcgccagcggcagaaattttggcaatagggacgccggagagtgtaacaagcgggacaatacatcaaccatgggtggcttcggagtcgggaaatcattcggcaatcgcggattctcaaattctcgttttgaggatggcgacagctctggattttggcgagaaagctcgaacgattgcgaagataatcccacccgcaacagaggtttttccaaaagaggcgacaacgatctggacccagatgagtgtatgcagagaaccggaggcctctttggttcaagaaggcccgtgctgtccgggaccggcaacggggatacgtcacaatctaggtctggctcgggaagtgagcggggagggtacaaaggcctaaatgaggaggtgatcactggttcaggcaaaaatagctggaagagcgaagcggaaggaggtgagtcatccgatacccagggtcctaaagtgacttacattccacccccaccaccagaagacgaggacagtatttttgcacactatcagaccggtattaatttcgataagtacgacacaattctggtcgaagtgagtggtcacgacgcacctcccgccattctgacctttgaagaggcaaatttatgccagactctgaacaacaacatagccaaagccggttacaccaaactgaccccagttcagaaatactcaatacccattatcctcgccggaagagatctcatggcctgcgctcagacgggttccggcaagactgccgcctttttgctaccgatcctggcccacatgatgcacgacgggatcacagcatccagattcaaagaactgcaggaaccagagtgtatcattgttgcacctacgagggaattagtgaatcagatttatcttgaggcacggaagttttcattcggaacgtgcgtccgcgcagtggtgatttacggagggacacagctgggtcactccattagacagattgtgcagggatgcaacattctttgtgctacgcccggtcgcctgatggatatcatcggaaaagagaagattggtctgaaacaaattaaatatctcgtcctggacgaagcagataggatgttggacatgggattcggccccgaaatgaaaaagcttatctcatgccccgggatgccctccaaagagcagaggcagactcttatgttctcggccaccttcccggaggagatccagagactggcagccgagttcctgaaatctaactatctttttgtcgctgtcggacaggtgggaggtgcttgtcgcgacgtgcagcagactgtgctccaggtggggcaatttagtaagagggaaaaactggtggaaattctgcgaaatattggagatgagagaacaatggtgttcgtcgaaacaaaaaaaaaggccgacttcattgcgaccttcctttgccaagagaagataagtacaaccagtatccacggcgacagagaacagagagagcgcgagcaggccctcggtgatttccggtttggaaaatgtccagtgcttgtagccacatccgtggctgcaaggggcctagacattgaaaacgttcagcatgtcataaattttgacctgccatccacgatagacgaatacgttcaccggattggacggaccggaagatgcgggaacaccgggcgagctattagcttctttgacctcgagtctgataatcatttggctcagcctctggttaaagtactcactgatgcacagcaggatgttcccgcttggctggaggagatcgctttttcaacctatatcccgggattttccggctccacaaggggcaacgtctttgccagcgttgatacgcgtaagggcaaaagcaccctgaacaccgccggcttcagcagctcccaggcccctaatcccgtagacgatgagtcatgggattag

SEQ ID NO: 54022 - DNA, 2073 bp, Artificial Sequence
  derived and/or modified sequence
atgggagatgaggattgggaagccgaaataaacccccatatgtctagttatgtccccatattcgaaaaggacaggtactccggcgagaatggggataactttaaccgcaccccggcatcctcctccgaaatggatgacggaccatcccggagggaccactttatgaaaagcgggttcgcttcgggacggaatttcggtaacagagatgctggtgaatgcaacaagcgagataacacatcaaccatggggggattcggagtaggcaagtcctttgggaacagagggttcagcaactctaggttcgaagatggtgacagttccggcttctggcgtgaatccagcaacgactgcgaggataaccctaccagaaaccgggggttttctaaaaggggcgacaacgacctggacccagacgagtgtatgcaaaggacagggggactttttggttctagaagacccgtgctgtcagggaccggcaacggggacaccagccagtcgaggtctggatccggatccgaacggggcgggtataaaggcctgaacgaggaggtcatcaccgggtcaggcaaaaattcttggaaatctgaggcagagggaggcgaatcctctgatacacagggccccaaggtcacttatatacccccccctcctcccgaggatgaggatagtatttttgcccattatcagacaggcatcaacttcgacaaatacgacaccatactcgtggaagttagtggtcatgacgccccacccgccatcctgacattcgaggaagcaaacctatgccagacactgaataacaacattgctaaggccggatacaccaagttaacccccgtgcagaagtatagcatcccaattatcttggctggccgggatctgatggcttgtgctcagaccggatctggaaagactgctgcctttctgcttcccattctggctcatatgatgcacgacggcataaccgccagcaggttcaaggagctgcaggagcctgaatgtatcattgttgccccaactagggaattggtgaaccagatctacctggaggcccgaaagttcagctttggcacgtgtgttagggccgtcgttatatatggcggtacacaattgggacatagcatcaggcagatcgtccagggctgcaacatcctgtgcgccaccccaggacggctgatggacattatcggcaaggaaaaaattggattaaaacagatcaagtacttagtactggacgaggccgatcgcatgctcgacatgggctttggcccagaaatgaagaagctcatttcgtgccccggcatgccatctaaggaacagcgtcagaccctgatgttctccgctacctttcctgaggagattcagagactggccgcggagttcctgaagtccaactatctgtttgtggcggtcggccaggtcggtggcgcctgccgagacgtgcaacagacagtactacaggtgggccagttctcgaagcgcgaaaagttggtggaaatcctgcggaacatcggcgatgaacgcactatggtcttcgtggaaactaaaaaaaaagccgactttatcgccacctttctgtgccaagaaaaaatatcaaccacgtccatacacggagaccgcgagcagcgtgagcgagagcaagctctaggagacttcaggtttgggaagtgccccgtccttgtggccacatctgtggccgcaaggggcctggacatcgaaaatgtgcagcatgtcattaactttgacctgccttccacaatcgatgagtatgtgcatcggattggaagaactggccgctgcgggaacactggaagggcaatttcatttttcgatctcgaaagcgataaccatctggctcagcctctggttaaagttctgaccgatgctcagcaggacgtgccagcttggcttgaagagatagctttctccacttatatcccaggattcagcgggtctacaaggggcaatgtgttcgcatcggtcgacaccagaaaaggcaagtccacattgaacacggcagggttttccagttcccaagctccaaatcctgtggatgatgagtcatgggattag

SEQ ID NO: 54023 - DNA, 318 bp, Artificial Sequence
  derived and/or modified sequence
atgggcgacgaggactgggaggctgagattaatcctcacatgtcatcttatgtccctattttcgaaaaggataggtactccggagaaaacggggataacttcaaccgaactcccgcgtcctcctcggaaatggacgacgggccatcacgccgcgaccattttatgaaaagcgggtttgcatccggcaggaatttcgggaacagggatgcgggcgaatgcaataaacgggataatacatctaccatgggaggattcggcgttggtaagagtttcggaaatcgggggttctccaactcacggtttgaggacggagattag

SEQ ID NO: 54024 - DNA, 2073 bp, Artificial Sequence
  derived and/or modified sequence
atgggagatgaggactgggaggccgagatcaacccccacatgagcagctatgtgcccatctttgagaaggaccgctacagcggagaaaatggagacaacttcaacagaacaccagccagcagcagcgagatggatgatggccccagccggcgggaccacttcatgaagagcggctttgccagcggcaggaactttggaaacagagatgctggggagtgcaacaagagggacaacaccagcaccatgggcggctttggagtgggcaagagctttggaaacagaggcttcagcaacagcagatttgaagatggagacagcagcggcttctggagggagagcagcaatgactgtgaggacaaccccaccaggaacagaggcttcagcaagagaggagacaatgacctggaccctgatgagtgcatgcagaggactggaggcctgtttggcagcagaagacctgtgctgagcggcactggaaatggagacaccagccagagccgcagcggcagcggcagcgagcggggcggctacaagggcctgaatgaggaggtgatcaccggcagcggcaagaacagctggaagtctgaggccgagggcggggagagcagtgacacccagggccccaaggtgacctacatccccccacctcctccagaagatgaagattccatctttgcccactaccagacaggcatcaactttgacaagtatgacaccatcctggtggaggtgtctggccatgatgcccccccagccatcctgacctttgaggaggccaacctgtgccagaccctgaacaacaacatcgccaaggccggctacaccaagctgacccctgtgcagaagtacagcatccccatcatcctggccggccgggacctgatggcctgtgcccagacaggcagcggcaagacagctgccttcctgctgcccatcctggcccacatgatgcatgatggcatcacagccagccgcttcaaggagctgcaggagcctgagtgcatcatcgtggcccccacccgggagctggtgaaccagatctacctggaggccaggaagttctcctttggcacctgtgtgcgggctgtggtgatctacggcggcacccagctgggccacagcatccggcagatcgtgcagggctgcaacatcctgtgtgccaccccaggccgcctgatggacatcatcggcaaggagaagattggcctgaagcagatcaagtacctggtgctggatgaggccgacaggatgctggacatgggcttcggccctgagatgaagaagctgatcagctgccccggcatgcccagcaaggagcagaggcagaccctgatgttttctgccaccttccctgaggagatccagaggctggccgctgagttcctgaagagcaactacctgtttgtggccgtgggccaggtgggcggggcctgcagagatgtgcagcagacagtgctgcaggtgggccagttcagcaagcgggagaagctggtggagatcctgaggaacattggagatgagaggaccatggtgtttgtggagaccaagaagaaggctgacttcatcgccaccttcctgtgccaggagaagatcagcaccaccagcatccatggagaccgggagcagcgggagcgggagcaggccctgggggacttccgctttgggaagtgccctgtgctggtggccacctctgtggccgcccggggcctggacattgaaaatgtgcagcacgtgatcaactttgacctgcccagcaccattgatgaatatgtgcaccgcatcggccgcacaggccgctgtggcaacacaggccgggccatctccttctttgacctggagagtgacaaccacctggcccagcccctggtgaaggtgctgacagatgcccagcaggatgtgcctgcctggctggaggagatcgccttcagcacctacatccctggcttcagcggcagcaccagaggaaatgtgtttgcctctgtggacaccaggaagggcaagagcaccctgaacacagctggcttcagcagcagccaggcccccaaccctgtggatgatgagagctgggactag

SEQ ID NO: 54025 - DNA, 318 bp, Artificial Sequence
  derived and/or modified sequence
atgggagatgaggactgggaggccgagatcaacccccacatgagcagctatgtgcccatctttgagaaggaccgctacagcggagaaaatggagacaacttcaacagaacaccagccagcagcagcgagatggatgatggccccagccggcgggaccacttcatgaagagcggctttgccagcggcaggaactttggaaacagagatgctggggagtgcaacaagagggacaacaccagcaccatgggcggctttggagtgggcaagagctttggaaacagaggcttcagcaacagcagatttgaagatggagactag

SEQ ID NO: 54026 - DNA, 2073 bp, Artificial Sequence
  derived and/or modified sequence
atgggcgacgaggactgggaggccgagatcaacccccacatgagcagctacgttccgatattcgagaaggacagatacagtggagaaaatggagataatttcaacagaactcctgcttcgtcctctgagatggacgatgggccatccagacgcgaccacttcatgaagtcggggttcgcttccggaaggaactttggaaatcgcgatgctggagaatgtaataaaagggataatacatcaaccatgggggggttcggggtcgggaaatcatttggaaaccgcggcttttcaaattcacgctttgaagacggcgattctagcggtttctggcgggaatcatccaatgactgcgaggacaacccaactcgaaaccggggcttcagtaaacggggcgataacgatttggaccctgacgagtgtatgcaacggactggtggcctgtttggttccaggcgcccagtgctgagtggaacgggcaacggagatacttcccagtctaggtcaggctcaggatctgaaagaggaggatacaagggactgaacgaagaggtaatcaccggatccgggaagaactcttggaaatccgaggcagagggaggggaaagcagcgacacccaaggccccaaagtgacatacatcccaccgccccccccagaagacgaagactcaattttcgcccactatcagacggggatcaacttcgataaatacgatacaatcctcgtggaggtgagcggacacgacgcaccccctgccatactaacattcgaggaggcaaatttgtgtcagaccttgaataacaatatcgctaaggccgggtacaccaagctgacccctgtccagaagtacagcattccgatcatattggcaggccgcgacctcatggcttgtgcccagacaggcagcggaaagacggccgcttttctcttgcccatcttggcgcacatgatgcacgatggcatcaccgctagcaggtttaaggagctgcaggaacctgaatgcataattgtggcccccacaagggaactcgttaatcagatctatctggaggcaaggaaatttagttttggcacatgcgtgagggccgtggtgatttacggcggaacccagttgggacatagcattcggcagattgtccaagggtgtaacatattgtgtgccacccctggccgcctgatggacatcatcggcaaggagaagataggccttaaacagatcaaatatctagtgctcgatgaagcagaccgcatgttggatatggggtttggaccagaaatgaaaaagctcatttcctgccctgggatgccctctaaagaacagcgacaaaccttgatgttctcggcaacctttcccgaagaaattcaaagactggccgccgaatttctcaagagtaactatctgtttgttgccgtcgggcaggtgggcggggcttgtagggatgtacagcagacggtactccaggtgggccagtttagcaaacgggagaaactggtggaaatactcagaaacatcggtgatgagcgcacaatggttttcgtagagacaaagaagaaagcagacttcatagccacctttctgtgtcaggagaagatatccacaacatctatccacggagacagagaacagcgcgagcgggaacaagccttaggcgacttcagatttggcaaatgcccggttctcgtagccacatcagtggccgcgcgaggtctggacatcgagaacgtccagcacgtaatcaattttgatctgccctcaacgatcgacgagtacgtgcacaggatcggtcgaacaggccggtgtggcaatacaggaagagctatcagcttttttgatttggaatctgataaccatctggcccagccattagtgaaagtgctgactgacgcacagcaggatgtccccgcatggctcgaggagatcgccttcagcacttatatccctggtttttcggggtccactagaggcaacgtgttcgccagcgtcgatacaaggaaaggaaagtccacgttgaacacggccgggtttagttcctcccaggcacccaatcctgttgacgacgagtcatgggattag

SEQ ID NO: 54027 - DNA, 2073 bp, Artificial Sequence
  derived and/or modified sequence
atgggcgacgaggactgggaggccgagatcaacccccacatgagctcatatgtgccaatcttcgaaaaagatagatactcaggagagaatggcgataactttaatcgcactccagcctcttcttccgaaatggacgatgggcctagccgtcgggatcatttcatgaagtctggctttgcctcaggcaggaacttcggcaatcgagacgctggggagtgtaataaacgggataatacaagcaccatggggggctttggagttgggaaaagttttggcaaccgtggtttttccaatagccgcttcgaagatggcgacagttctgggttctggcgggagtcctcaaatgactgtgaagacaatccaacccggaataggggtttttcgaagcgtggggataacgacctggatcccgacgagtgcatgcaacgcacaggcggtttattcggctccaggagacctgtgctgagcgggaccggcaacggggacacttcccagtcccgctcaggatcaggaagtgagcgggggggttataaggggcttaatgaggaggtgatcacaggttcggggaaaaatagctggaaatccgaagctgaaggaggagagagctccgatacccaaggcccgaaggtaacatatattcccccaccgcctcctgaggatgaagatagtatcttcgcacattaccaaacaggcatcaacttcgacaaatatgataccattcttgtcgaggtttcgggccatgatgctccgcccgctattctgacgtttgaggaagccaacctgtgccaaacacttaacaacaatattgcgaaggccggctacacaaaactcaccccagttcagaagtattccatcccaattattctggccggtcgggacctcatggcttgtgcccagaccggctctggaaaaaccgcagctttcctgctgcccattcttgcgcacatgatgcatgacggaattacggcttccagattcaaagagttgcaggagccggagtgcatcatcgtggcccccacccgggagctcgtgaatcaaatctatctagaagccagaaaattctcgttcggcacatgcgtgagggccgtggtgatatacggcggaacacagcttggccactctatcaggcaaatcgtccaaggttgtaatattctgtgcgccacccccggaaggcttatggacatcattgggaaggaaaagatcgggctcaaacaaataaaataccttgtgctcgacgaagctgaccgcatgttagacatgggctttggacctgaaatgaagaaactgataagttgtcctgggatgccctccaaggagcagcgacaaactctcatgttctctgcaacatttcccgaggagatacaacggttagccgcagagtttctgaaatccaattacctgttcgtcgcagttggccaagtagggggtgcctgtagggatgttcagcagacagtactgcaagtgggacaatttagcaaaagggagaagttggtcgagattttacggaacataggagatgagagaaccatggtgttcgtggaaaccaagaagaaagccgattttatagccacattcctttgtcaagagaaaatcagtaccacctccatccatggtgatagggagcagagggaaagagagcaggctctgggcgatttcagatttggcaagtgtcccgtattagtagcaaccagcgtggctgcaaggggactggacatcgagaacgttcagcacgtgataaacttcgacttgccatctacgatcgacgaatatgtgcaccgcattggaaggaccggccgctgtggaaacactggacgggccatttcctttttcgacttagaatccgataaccacctcgcacagcccctggtgaaagtcctgaccgatgctcaacaagatgtgccagcctggctggaggaaatcgcattttctacatatatcccgggctttagcggctcaacaaggggaaacgtcttcgcctcagtcgatacccgtaaggggaaaagcaccctgaatactgcgggcttctccagctcccaggcgcctaatcccgtcgacgatgagagctgggactag

SEQ ID NO: 54028 - DNA, 318 bp, Artificial Sequence
  derived and/or modified sequence
atgggcgacgaggactgggaggccgagatcaacccccacatgagctcttacgtgccaatctttgaaaaggatagatatagcggagaaaacggcgataacttcaacagaacccccgcttcgtccagtgagatggatgatggcccttctcgacgagaccatttcatgaaaagtgggtttgcctccggccgcaatttcggaaatcgagatgctggcgaatgtaacaagcgggacaacacgagcacaatgggtggcttcggcgttggaaagtcttttggaaatagaggattctccaattcccgcttcgaggatggagactag

SEQ ID NO: 54029 - DNA, 2073 bp, Artificial Sequence
  derived and/or modified sequence
atgggagatgaagactgggaagcggagatcaaccctcacatgagctcatacgtgccgatcttcgagaaggatcgctatagcggcgagaatggggataacttcaatcggaccccggcatcctctagcgagatggatgatggcccatcccggagagaccatttcatgaaatctggctttgctagtggcaggaactttgggaaccgcgacgcgggtgagtgcaataagagagacaatacatccaccatgggcggtttcggagtggggaaaagcttcggtaatagaggtttctctaattctagatttgaagatggggacagctctgggttctggcgggaatcctcgaatgactgtgaagataatcccacccggaaccgaggcttctccaagaggggcgacaacgaccttgacccggatgagtgcatgcaaaggactgggggtctgttcggttcacgcagaccagtcctcagcgggactggaaatggtgacacctcccagagccgttccggatcaggctccgagaggggagggtataaaggacttaatgaagaggtaattacagggagcgggaaaaactcttggaaaagcgaagctgagggcggagagtccagcgatacccaaggtcccaaggttacctatatccccccacccccaccagaggacgaggactccatctttgcacattatcagaccggaatcaattttgataagtatgacacaatactggtggaagtttccggccatgatgcaccacccgcaatcctaaccttcgaagaggctaatctgtgccagaccctgaataacaatatcgcaaaggccggttacactaaacttacgcccgtgcaaaaatatagcataccaattattctggccggaagagatttgatggcctgcgcccagactggttctgggaagacagcggcattcctactacctatactggcacacatgatgcatgatggaatcacagcttcaagattcaaagagctgcaggagcctgagtgtatcatcgtcgcaccaacccgcgagctggtgaaccagatttacctggaggccagaaagttttcttttgggacctgcgtgagggccgtcgtgatctatggcggaacccaattgggccactctatacggcagattgttcagggctgtaatattttatgcgccaccccgggaaggttaatggacataatcggtaaggaaaagatcggcctgaagcaaattaagtacttagttctagacgaggcagaccgaatgttggatatgggctttgggcctgaaatgaagaaacttatcagctgccctggtatgccatctaaggaacagagacagactctcatgttttctgccacctttccggaggagattcaaaggctggcagcggaattccttaagagtaattatttgttcgtcgccgttgggcaagtggggggtgcttgtcgggacgtgcagcagaccgtgttacaggtcggacaatttagtaagcgggagaagctggtagagatactgcgaaatatcggcgatgaacggacgatggtctttgttgaaactaaaaaaaaagctgactttatagccacttttctgtgtcaggaaaagatcagcacaaccagtattcacggtgaccgggagcaacgcgagagagaacaggcacttggtgacttcagatttggcaaatgccccgtactcgtggctacctctgttgctgccagaggactcgacattgaaaatgtgcagcacgtgattaattttgacctgcccagcaccatcgacgaatacgtgcaccggattggtagaaccggacgttgtgggaatacggggagagccataagtttcttcgaccttgagtcggacaatcaccttgcccagcccctcgtgaaggtgctcactgatgctcagcaggatgtgcctgcttggcttgaagaaatcgccttttcgacatacattccgggttttagtggttcaaccaggggcaatgtgttcgcttccgttgacactaggaaaggaaagagcacactgaacaccgcagggttcagcagctctcaggctccaaatcccgtcgatgatgagagctgggactag

SEQ ID NO: 54030 - DNA, 2073 bp, Artificial Sequence
  derived and/or modified sequence
atgggagatgaagactgggaagctgagatcaatccccatatgagctcatatgtcccgattttcgaaaaagaccgatacagtggcgaaaatggcgataattttaatagaactcccgcttcctcttctgagatggatgatggtccatcaaggagggaccatttcatgaaatcgggcttcgctagtggacgcaacttcgggaaccgggatgctggagagtgtaataagcgggataatacgtccacgatggggggattcggggtaggaaagagctttggtaatcgaggtttttccaattccagatttgaggacggcgacagtagcggattttggcgggagtcctcgaatgactgtgaagacaaccccactcgtaataggggcttttccaagaggggtgacaacgatctggatcccgacgagtgcatgcagcggaccggtggcctttttgggagccgccgtccagtgctctccggaacaggcaatggagacacctcacaaagtcgaagtgggagcggatccgaaagaggtggatacaagggcttaaatgaggaggttataactggctctgggaagaacagctggaaatccgaggctgagggcggagagtcatcagacacacaggggccaaaggttacctatattccccctccaccccctgaagacgaggacagcatctttgcccattaccagacagggattaattttgataaatacgatacaatcctggtggaggttagcggacacgatgcacctccagccatcttaaccttcgaagaggcaaatctgtgtcagactcttaacaacaatatagctaaagcgggatacaccaaactcacccccgtgcagaagtactctataccaattattttggctgggagggacctgatggcatgtgcgcaaacgggaagcgggaagaccgccgctttcctcttgcctatcctggctcatatgatgcacgacggaattacggctagtcggttcaaagagttacaggagccagaatgcattatagtggccccaacccgggaattagtaaaccagatctatttggaggccaggaaattcagcttcggaacatgtgtgcgcgcagttgtgatctatggaggcacacagcttggacactccatcagacagattgtccaggggtgcaatatcctttgtgcaactcctgggagacttatggatataataggcaaagagaagattgggctcaaacagattaagtatttggtgttggacgaggctgaccgtatgttggatatgggtttcggacccgagatgaaaaaacttataagttgtcccggaatgccatcaaaagagcagcgtcagaccctcatgttctcagccacattccccgaggaaatccagcgcctggctgccgagtttctgaaatctaattatttgttcgtggccgttggacaagtggggggtgcttgtagagatgtgcagcagacagtgctccaggtgggacagttctctaaaagagagaaactggtggagatactgcgaaacataggagatgaaagaacaatggtcttcgtggagaccaagaagaaagccgatttcatcgcgactttcctctgtcaggagaagattagtacaacctctattcacggcgatagagagcagcgcgaacgagaacaagcccttggcgattttcgttttggtaagtgtccagtgcttgtggctacaagcgtggctgcccgaggactcgacatcgagaacgtgcagcacgtcatcaactttgatctcccatcgactattgacgaatatgttcatcggatcggcaggacaggaaggtgcggcaacacaggcagagccatatccttttttgatcttgaatccgacaaccacttggcccaacctctggtgaaggttttgacagacgctcagcaggacgtgcctgcttggctggaagaaatagcgttttccacgtacatccccggtttctctggatccacccgcggaaatgtctttgcctctgtcgacacacggaaaggaaaaagcactctgaacaccgcgggattctcctcaagccaggctccaaatccggtggatgatgagtcttgggactag

SEQ ID NO: 54031 - DNA, 318 bp, Artificial Sequence
  derived and/or modified sequence
atgggggatgaagactgggaggccgagataaacccacatatgtcctcctacgtgcctattttcgagaaagatcgatactctggcgagaatggagataactttaataggacacccgcatctagttcggagatggatgacggcccaagcaggcgagatcatttcatgaagtcaggattcgcgtctggcagaaattttgggaacagggacgcaggagaatgtaacaagagggacaatactagcactatggggggttttggagtcgggaagagctttgggaatagaggtttctctaattctcgatttgaagatggtgattag

SEQ ID NO: 54032 - DNA, 2778 bp, Artificial Sequence
  derived and/or modified sequence
acctgacgcagtgggcgtcttgcacgtgcagccgtttaagtcgcgtgggcgcctgcgagggcttgggagagcaagccgcggagagaacttgaagccaccatgggagatgaagattgggaagcagaaatcaaccctcatatgtcttcctatgttcccatatttgagaaggataggtattctggagaaaatggagacaattttaacaggactccagcttcatcatcagaaatggatgatggaccttctcgaagagatcatttcatgaaaagtggatttgcctctgggcggaattttggaaacagagatgctggtgagtgtaataagcgagataatacatccacaatgggtggttttggagttggaaagagttttggaaacagaggtttttcaaacagcaggtttgaagatggtgatagctctggtttctggagagagtctagtaatgactgcgaagataatccaacacggaacagagggttttccaagagaggcgataatgacttagacccagacgaatgtatgcagcgcactggtggcctttttggttctagaagaccagtattaagtggcacaggtaatggtgatacttctcaaagcagaagtggcagtggaagtgaacgaggtggttacaaaggtttaaatgaagaagtaataacaggctctggaaagaattcttggaagtcagaagcagaaggaggagaaagtagtgatactcaaggaccaaaagtgacctacataccccctcctccacctgaggatgaggactccatctttgcacattatcagacaggcataaacttcgacaaatacgacactattcttgtggaagtgtctggacatgatgcaccaccagcaattctgacttttgaagaagctaatctctgtcagacactgaataacaacattgctaaagctggttatactaagcttactcctgtgcaaaaatacagtattcctatcatacttgcaggacgagatttgatggcttgcgctcaaacagggtctgggaagactgcggcttttctcctaccaattttggctcatatgatgcatgatggaataactgccagtcgttttaaagagttgcaggaaccagagtgtattattgtagcaccaactcgagaattggtcaaccagatttatttggaagccagaaaattttcttttgggacttgtgtaagagctgttgttatatatgggggaacccagctgggacattcaattcgacaaatagtacaaggctgtaatatattatgtgctactcctggaagactgatggatatcataggcaaagaaaagattggtctcaaacagatcaaatacttagttttggatgaagctgatcgcatgttggatatgggttttggtccagaaatgaagaagttaatttcttgcccaggaatgccatcaaaggaacagcgccaaacccttatgttcagtgcaacttttccagaggaaattcaaaggttggctgcagagtttttaaagtcaaattatctgtttgttgctgttggacaagtgggtggagcatgtagagatgttcagcagaccgttctccaagttggccagttctcaaaaagagaaaagctcgttgaaattctgcgaaacataggggatgaaagaactatggtctttgttgaaactaagaaaaaagcagattttattgcaacttttctttgtcaagaaaaaatatcaactacaagtattcatggtgatcgggaacagagagagcgggagcaagctcttggagattttcgctttggaaagtgcccagttcttgttgctacttcagtagctgccagagggctggatattgaaaatgtgcaacatgttatcaattttgatcttccttctaccattgatgaatatgttcatcgaattgggcgtactggtcgttgtgggaatactggcagagcaatttccttttttgatcttgaatcggataaccatttagcacagcctctagtaaaagtattgacagatgctcaacaggatgttcctgcatggttggaagaaattgcctttagtacatacattcctggcttcagtggtagtacaagaggaaacgtgtttgcatcagttgataccagaaagggcaagagcactttgaacacagctgggttttcttcttcacaagctcccaatccagtagatgatgagtcatgggattaaagccaaaacatccttcaagtctgtggttttgatgcagagaagaaaatagttttgatttttgagtttttaacagaagtataaaacttaacattctcatagctcctgtccttgtattctcactcctacacttaaaaaaaaaatccttactgactagttatgtgagatgctaaaacttacaacattgcagttactgatacaaatggtgttaactgggaatattaaagcattctaaatgtctttcttatttctggtatattctttagggggcttagacatgtttaatgtttaaatgccaagtcttactatagtgtttattgatcttataaaacaagcaaataggatatgatacacttttggttaaaaattactgggtctcatttttacttgagtctttaaaacagtagtgtgtcactataatgtgataatctttaagagaaagtagaatacttaagcctttcaaagtgattttgatttttagatcatcagatgtatgatgaaaatggttaaatgtttgtgatgggagctctgtactcaatggcataacaatgtttatttttataatatacaatctttccttgaaataaaggatgaaacacttttccctta

SEQ ID NO: 54033 - DNA, 2324 bp, Artificial Sequence
  derived and/or modified sequence
aacttgaagccaccatgggagatgaagattgggaagcagaaatcaaccctcatatgtcttcctatgttcccatatttgagaaggataggtattctggagaaaatggagacaattttaacaggactccagcttcatcatcagaaatggatgatggaccttctcgaagagatcatttcatgaaaagtggatttgcctctgggcggaattttggaaacagagatgctggtgagtgtaataagcgagataatacatccacaatgggtggttttggagttggaaagagttttggaaacagaggtttttcaaacagcaggtttgaagatggtgatagctctggtttctggagagagtctagtaatgactgcgaagataatccaacacggaacagagggttttccaagagaggcgataatgacttagacccagacgaatgtatgcagcgcactggtggcctttttggttctagaagaccagtattaagtggcacaggtaatggtgatacttctcaaagcagaagtggcagtggaagtgaacgaggtggttacaaaggtttaaatgaagaagtaataacaggctctggaaagaattcttggaagtcagaagcagaaggaggagaaagtagtgatactcaaggaccaaaagtgacctacataccccctcctccacctgaggatgaggactccatctttgcacattatcagacaggcataaacttcgacaaatacgacactattcttgtggaagtgtctggacatgatgcaccaccagcaattctgacttttgaagaagctaatctctgtcagacactgaataacaacattgctaaagctggttatactaagcttactcctgtgcaaaaatacagtattcctatcatacttgcaggacgagatttgatggcttgcgctcaaacagggtctgggaagactgcggcttttctcctaccaattttggctcatatgatgcatgatggaataactgccagtcgttttaaagagttgcaggaaccagagtgtattattgtagcaccaactcgagaattggtcaaccagatttatttggaagccagaaaattttcttttgggacttgtgtaagagctgttgttatatatgggggaacccagctgggacattcaattcgacaaatagtacaaggctgtaatatattatgtgctactcctggaagactgatggatatcataggcaaagaaaagattggtctcaaacagatcaaatacttagttttggatgaagctgatcgcatgttggatatgggttttggtccagaaatgaagaagttaatttcttgcccaggaatgccatcaaaggaacagcgccaaacccttatgttcagtgcaacttttccagaggaaattcaaaggttggctgcagagtttttaaagtcaaattatctgtttgttgctgttggacaagtgggtggagcatgtagagatgttcagcagaccgttctccaagttggccagttctcaaaaagagaaaagctcgttgaaattctgcgaaacataggggatgaaagaactatggtctttgttgaaactaagaaaaaagcagattttattgcaacttttctttgtcaagaaaaaatatcaactacaagtattcatggtgatcgggaacagagagagcgggagcaagctcttggagattttcgctttggaaagtgcccagttcttgttgctacttcagtagctgccagagggctggatattgaaaatgtgcaacatgttatcaattttgatcttccttctaccattgatgaatatgttcatcgaattgggcgtactggtcgttgtgggaatactggcagagcaatttccttttttgatcttgaatcggataaccatttagcacagcctctagtaaaagtattgacagatgctcaacaggatgttcctgcatggttggaagaaattgcctttagtacatacattcctggcttcagtggtagtacaagaggaaacgtgtttgcatcagttgataccagaaagggcaagagcactttgaacacagctgggttttcttcttcacaagctcccaatccagtagatgatgagtcatgggattaaagccaaaacatccttcaagtctgtggttttgatgcagagaagaaaatagttttgatttttgagtttttaacagaagtataaaacttaacattctcatagctcctgtccttgtattctcactcctacacttaaaaaaaaaatccttactgactagttatgtgagatgctaaaacttacaacattgcagttactgatacaaatggtgttaactgggaatattaaagcattctaaatgtc

SEQ ID NO: 54034 - DNA, 567 bp, Artificial Sequence
  derived and/or modified sequence
agtgggccgcttttctacgggaactggcctgaactcggccgtacgggctccccagtaaccgacctttggccaaagtgtggatggagtaggaggagttttgaagccgtccttcgaagcctttctgcctcggggtctcagagtcccacgggtgcccaaagtctgggcttgaggcctgcagaggaggcgaaggggccttattcctggcttcttcactgcgttttctctgaacagacatgaacttgaagccaccatgggagatgaagattgggaagcagaaatcaaccctcatatgtcttcctatgttcccatatttgagaaggataggtattctggagaaaatggagacaattttaacaggactccagcttcatcatcagaaatggatgatggaccttctcgaagagatcatttcatgaaaagtggatttgcctctgggcggaattttggaaacagagatgctggtgagtgtaataagcgagataatacatccacaatgggtggttttggagttggaaagagttttggaaacagaggtttttcaaacagcaggtttgaagatggtgatag

SEQ ID NO: 54035 - DNA, 2073 bp, Artificial Sequence
  derived and/or modified sequence
atgggcgacgaggactgggaggccgagatcaacccccacatgagcagctacgtgcccatcttcgagaaggacagatacagcggcgagaacggcgacaacttcaacagaacccccgccagcagcagcgagatggacgacggccccagcagaagagaccacttcatgaagagcggcttcgccagcggcagaaacttcggcaacagagacgccggcgagtgcaacaagagagacaacaccagcaccatgggcggcttcggcgtgggcaagagcttcggcaacagaggcttcagcaacagcagattcgaggacggcgacagcagcggcttctggagagagagcagcaacgactgcgaggacaaccccaccagaaacagaggcttcagcaagagaggcgacaacgacctggaccccgacgagtgcatgcagagaaccggcggcctgttcggcagcagaagacccgtgctgagcggcaccggcaacggcgacaccagccagagcagaagcggcagcggcagcgagagaggcggctacaagggcctgaacgaggaggtgatcaccggcagcggcaagaacagctggaagagcgaggccgagggcggcgagagcagcgacacccagggccccaaggtgacctacatccccccccccccccccgaggacgaggacagcatcttcgcccactaccagaccggcatcaacttcgacaagtacgacaccatcctggtggaggtgagcggccacgacgccccccccgccatcctgaccttcgaggaggccaacctgtgccagaccctgaacaacaacatcgccaaggccggctacaccaagctgacccccgtgcagaagtacagcatccccatcatcctggccggcagagacctgatggcctgcgcccagaccggcagcggcaagaccgccgccttcctgctgcccatcctggcccacatgatgcacgacggcatcaccgccagcagattcaaggagctgcaggagcccgagtgcatcatcgtggcccccaccagagagctggtgaaccagatctacctggaggccagaaagttcagcttcggcacctgcgtgagagccgtggtgatctacggcggcacccagctgggccacagcatcagacagatcgtgcagggctgcaacatcctgtgcgccacccccggcagactgatggacatcatcggcaaggagaagatcggcctgaagcagatcaagtacctggtgctggacgaggccgacagaatgctggacatgggcttcggccccgagatgaagaagctgatcagctgccccggcatgcccagcaaggagcagagacagaccctgatgttcagcgccaccttccccgaggagatccagagactggccgccgagttcctgaagagcaactacctgttcgtggccgtgggccaggtgggcggcgcctgcagagacgtgcagcagaccgtgctgcaggtgggccagttcagcaagagagagaagctggtggagatcctgagaaacatcggcgacgagagaaccatggtgttcgtggagaccaagaagaaggccgacttcatcgccaccttcctgtgccaggagaagatcagcaccaccagcatccacggcgacagagagcagagagagagagagcaggccctgggcgacttcagattcggcaagtgccccgtgctggtggccaccagcgtggccgccagaggcctggacatcgagaacgtgcagcacgtgatcaacttcgacctgcccagcaccatcgacgagtacgtgcacagaatcggcagaaccggcagatgcggcaacaccggcagagccatcagcttcttcgacctggagagcgacaaccacctggcccagcccctggtgaaggtgctgaccgacgcccagcaggacgtgcccgcctggctggaggagatcgccttcagcacctacatccccggcttcagcggcagcaccagaggcaacgtgttcgccagcgtggacaccagaaagggcaagagcaccctgaacaccgccggcttcagcagcagccaggcccccaaccccgtggacgacgagagctgggactag

SEQ ID NO: 54036 - DNA, 318 bp, Artificial Sequence
  derived and/or modified sequence
atgggcgacgaggactgggaggccgagatcaacccccacatgagcagctacgtgcccatcttcgagaaggacagatacagcggcgagaacggcgacaacttcaacagaacccccgccagcagcagcgagatggacgacggccccagcagaagagaccacttcatgaagagcggcttcgccagcggcagaaacttcggcaacagagacgccggcgagtgcaacaagagagacaacaccagcaccatgggcggcttcggcgtgggcaagagcttcggcaacagaggcttcagcaacagcagattcgaggacggcgactag

SEQ ID NO: 54037 - protein, 1369 aa, Artificial Sequence
  derived and/or modified sequence
MSPCGRKMGEGRQQRRAPVGKLLLLPGRRDTPHGRSGSSGARTQRSLLWLLVHVWLWAASGSSAQLFNLTLSVDEGLPPDTLVGDIRAGLPAAQQQEGSGFFLSEDSDDSPLLDDFHVHPDTGIIRTARRLDRERRDHYSFVAATLLGAVVQVEIRVNDVNDHSPRFPLDSLQLDVSELSPPGTAFRLPVAHDPDAGLFSTQGYTLVQPSDLPKDPAGPFFQLRYRTPGPLPSPLLPGSSSPLEPLDLVLLRRLDREEAAAHRLQIEAWDGGRPRRTGLLSVELRVLDENDNPPVFEQDEYRAAVREDAQPGAEVCRVRATDRDLGPNGFVRYSVRARQVPGAGSGGGALGDAAYFAVEELSGVVRVWRPLDREAQAWHQLVVEARDGGAEPEVATVRVSIAVLDVNDNRPAIHVLFLTEGGVARVSEGARPGDYVARVSVSDADGDWEKEDEATGELGVGLGDGSISLSLEGGEGDFALLPGGPPGVFFLCVEGPLDRESRDLYELLLVATDAGSPPLSTEETLLLRVADLNDQPPLFSQQHYKASVSEAAAPGTVVMWVSASDADEAGSDHAWLRYTVVQLSAPCNLGSLQSKMVHTAECGPSFAIDSESGAISTIRTLDREVQEAVELKVVAQDLGEPPLSATCLVSITVDDVNDNEPIFWRQVYNATIAEHAPVGHCFLQVTASDADSGLYGFIEYSLYDGFLSYEAPQAFRIDPHDGQICVSQDIDRERDPATYDLLVEAKDGGGLSAQAFVRVDLEDVNDNHPVFNPSTYVTSISDETQPGTEIINVLATDQDSGIYGTVAYELIPGNVSSLFTIDSTTGIIYLTLPLSHLESTTLSLMVSAQDGGGLTAVINADVTIHIFQTTLAPAEFERPKYTFLVYEDVPEDSPIGTVKAREPLNSSEPIFYRISSGDLGGKFSIHPRLGTIRTRKPLDHETQPVVVLTVQAQLGSAPACSSTEVNITVMDVNDNHPAFLRTSDEIRISQTTPPGTALYLARAEDRDSGRNGLIRYSIASPQPGVFAIDRALGVLFLNGSLGAGEQRELTLTLRAEDQGVHPQAALLVLTVVIEKREHSPSWTFEHLVYQVEVSESLSPMTQMLQTQAHPLGPQRAASPLRYSLEPSVDSAMFGIRPYTGWIYLRRQFDYESTQTYNFRVFAWIPEDGFLQNVSTTVIVRVWDENDNSPTFLHDVLFLKVEESPVPQGVIGKITAIDMDSGKNGQLLYFLLSDGKFFKMNPNTGELINWVALDREHRGHHEMTVLVTDRGSPPRNATMAVYVSVTDINDNRPFFPQCLPGKELHVKVLEGQPVNMLVTTVFAKDPDEGNNAEVTYSVSSARPMPLKGKTAFGKQSCKKQTNKQTNKILT

SEQ ID NO: 54038 - protein, 1366 aa, Artificial Sequence
  derived and/or modified sequence
MSPCGRKMGEGRQQRRAPVGKLLLLPGRRDTPHGRSGSSGARTQRSLLWLLVHVWLWAASGSSAQLFNLTLSVDEGLPPDTLVGDIRAGLPAAQQQEGSGFFLSEDSDDSPLLDDFHVHPDTGIIRTARRLDRERRDHYSFVAATLLGAVVQVEIRVNDVNDHSPRFPLDSLQLDVSELSPPGTAFRLPVAHDPDAGLFSTQGYTLVQPSDLPKDPAGPFFQLRYRTPGPLPSPLLPGSSSPLEPLDLVLLRRLDREEAAAHRLQIEAWDGGRPRRTGLLSVELRVLDENDNPPVFEQDEYRAAVREDAQPGAEVCRVRATDRDLGPNGFVRYSVRARQVPGAGSGGGALGDAAYFAVEELSGVVRVWRPLDREAQAWHQLVVEARDGGAEPEVATVRVSIAVLDVNDNRPAIHVLFLTEGGVARVSEGARPGDYVARVSVSDADGDWEKEDEATGELGVGLGDGSISLSLEGGEGDFALLPGGPPGVFFLCVEGPLDRESRDLYELLLVATDAGSPPLSTEETLLLRVADLNDQPPLFSQQHYKASVSEAAAPGTVVMWVSASDADEAGSDHAWLRYTVVQLSAPCNLGSLQSKMVHTAECGPSFAIDSESGAISTIRTLDREVQEAVELKVVAQDLGEPPLSATCLVSITVDDVNDNEPIFWRQVYNATIAEHAPVGHCFLQVTASDADSGLYGFIEYSLYDGFLSYEAPQAFRIDPHDGQICVSQDIDRERDPATYDLLVEAKDGGGLSAQAFVRVDLEDVNDNHPVFNPSTYVTSISDETQPGTEIINVLATDQDSGIYGTVAYELIPGNVSSLFTIDSTTGIIYLTLPLSHLESTTLSLMVSAQDGGGLTAVINADVTIHIFQTTLAPAEFERPKYTFLVYEDVPEDSPIGTVKAREPLNSSEPIFYRISSGDLGGKFSIHPRLGTIRTRKPLDHETQPVVVLTVQAQLGSAPACSSTEVNITVMDVNDNHPAFLRTSDEIRISQTTPPGTALYLARAEDRDSGRNGLIRYSIASPQPGVFAIDRALGVLFLNGSLGAGEQRELTLTLRAEDQGVHPQAALLVLTVVIEKREHSPSWTFEHLVYQVEVSESLSPMTQMLQTQAHPLGPQRAASPLRYSLEPSVDSAMFGIRPYTGWIYLRRQFDYESTQTYNFRVFAWIPEDGFLQNVSTTVIVRVWDENDNSPTFLHDVLFLKVEESPVPQGVIGKITAIDMDSGKNGQLLYFLLSDGKFFKMNPNTGELINWVALDREHRGHHEMTVLVTDRGSPPRNATMAVYVSVTDINDNRPFFPQCLPGKELHVKVLEGQPVNMLVTTVFAKDPDEGNNAEVTYSVSSARPMPLKGKTAFGKQSCKKQTNKQTKS

SEQ ID NO: 54039 - DNA, 4110 bp, Artificial Sequence
  derived and/or modified sequence
atgagtccatgcggaaggaagatgggcgaagggcgccagcaacgtcgcgccccagtgggtaaactgctgttgctaccggggaggagggacaccccacacggacgttcaggtagcagcggtgcgcgcacccagcgaagtttgttgtggcttctcgtgcatgtctggctgtgggcggcctcggggtcatctgcccagctgttcaatctcactctttcggtggatgagggcctgccacccgatacactagtgggggacattcgcgctggccttccagccgcccagcagcaagagggatcaggcttctttctttctgaagattcagatgacagtccacttctggacgatttccatgtgcaccctgacaccggaataatccggaccgcgaggcgccttgatcgcgaacggcgggatcactattctttcgttgcggccactcttttgggtgcggtggtacaggttgaaattcgggtgaacgatgtcaatgatcatagccctcggttcccgctggatagtctgcagctcgacgtgagcgaactctccccccctggaacagcgttccgactgcccgtggcacatgatccggacgccgggctcttctcaacccaaggttacaccctggttcaaccatctgatctgccaaaggacccggctgggccctttttccagttgcggtatcgaacccccggcccgctcccgtctccactactgcccgggtcctcgagtccactggagcctttagacctggtgttgctgaggcggctggatcgtgaggaggccgctgcccacagacttcagattgaggcttgggacggcggcagaccgcggcgcacgggcttgcttagcgtcgaacttagggtgctggatgagaacgacaatcctcctgttttcgagcaggatgagtacagagctgccgtgagggaagacgcgcagcccggggccgaggtttgtcgtgtcagagccacagaccgggacttgggacccaacgggttcgtgagatattctgtgagagcaaggcaagtgcctggcgccggtagtggcggcggagcccttggagatgccgcgtattttgcggttgaagaacttagcggcgtggtacgtgtatggagacccctggacagggaagcgcaggcctggcatcagctggtggtcgaggcccgggatgggggtgccgaacccgaagtggcgacagtgagggtgtctatagctgtactggacgttaacgacaaccgacctgctatccacgtcctcttcctgacagaaggtggggtggcaagagtgtccgagggagcacgaccaggcgactacgttgctcgggtgagtgtgtcggatgctgacggagattgggagaaagaggacgaggctaccggggagctgggcgtgggcctcggagatggctcaattagcctcagcctggagggcggggaaggtgacttcgccctactccccggcggtccacccggagtctttttcctgtgtgtggagggtccccttgaccgggagtctagagacttgtatgagttattgcttgtggccacagacgccggttccccccccttgtccaccgaagagacgcttctgctccgagtggcggatcttaatgaccagccccccttatttagccaacagcattacaaggccagcgtgtccgaagctgcagccccagggacggtcgtcatgtgggtctccgcttcggatgccgatgaggccggtagtgatcacgcttggcttagatacaccgtggttcagctctccgcaccatgtaacctgggctccctgcagtctaaaatggtgcatacagcggaatgtggaccatcgttcgcgatcgatagtgagtccggagccattagcaccattcgcacgcttgatcgggaggtacaggaagccgttgagcttaaagtagttgctcaagatctgggggagcctcctctctctgccacatgcctggtctcaatcacagtcgatgacgtcaacgataatgaacctatcttttggcgacaagtctacaatgctaccatcgctgaacacgccccggttggtcattgcttcctccaagtgacagcttccgacgcagatagtggcctctacggctttatcgagtattctctgtacgatggattcctgtcttacgaagccccacaggctttccggatcgacccacacgatggacagatctgcgtgtcccaggatatcgaccgagagcgcgatccagccacctatgatctgttggtggaggcaaaagatggtgggggacttagtgcccaggctttcgtgcgcgtcgatctggaggatgtgaacgataaccatcccgtttttaacccttccacttatgtgacctctattagcgatgagacccaacccggtacagaaattattaatgtcctggccaccgaccaggactctgggatttacggcactgtcgcctacgagctcattcctgggaacgttagttccctctttaccatcgatagcactacaggaatcatctatctgacgttgccactttcccatcttgagtcaaccacactcagcttgatggtgtctgcccaagatggaggcggcctcacagccgtgatcaatgccgacgttacaatccatatatttcagactactctggccccagctgagttcgaacgccctaagtacacgttcctcgtttatgaagacgtgccagaggatagccccataggcactgtgaaagcgcgcgaaccactaaattcctctgaacccattttctatcgaatcagcagtggcgatctggggggaaagttttcaatccaccccaggctaggtacaatccggaccaggaagccactggatcacgaaactcaacctgtcgttgtattaacagtgcaagcacagctcgggagcgcgcccgcctgctcctctactgaggtaaatatcacagtaatggacgtgaatgataaccatcccgcattcctccgaactagcgatgagatccgcattagtcagaccaccccacctggtacagcactgtatctggcacgggccgaggaccgcgactctggacgaaacggcctgatacgctacagtatcgcctccccacagcctggggtatttgctatagacagagcgcttggggtgctgttcctgaacgggtctctgggcgccggcgagcagcgcgaactaaccctgacacttcgcgcggaagatcaaggcgtacaccctcaagcagcactcctggttctaacggtcgttatcgagaagcgcgagcactctccgtcctggactttcgagcaccttgtttatcaggtagaggtctccgaatccctgagccccatgacacaaatgctgcaaacccaggcccacccactgggcccccagagagccgcaagccccctgagatactctctagaaccatccgtcgactctgcaatgtttggtattcgcccttataccgggtggatctaccttcggaggcagtttgactacgagtccacgcagacctataacttcagggtgttcgcatggatcccggaggacgggttcctgcagaatgtctcgacaaccgtcattgtgcgggtgtgggatgaaaatgacaacagcccaaccttcttacacgatgtgctgtttctgaaggtcgaggagagtccggtgccgcagggggtaatcggcaaaataaccgccatcgacatggatagtggcaagaatggacagctactgtacttcctgctgagtgacggaaaatttttcaagatgaaccctaacaccggggaactgatcaactgggttgcactagatagggaacaccggggccaccatgaaatgactgtgctcgtaaccgatagggggtctcctccacgcaacgccacaatggccgtgtatgtgtcagtgacagacataaatgacaatcgccctttcttcccccagtgcctcccggggaaggaactacacgtcaaagtgttggaggggcagcccgtgaacatgctggtgaccaccgtattcgctaaagatccagatgaaggcaataatgccgaagtgacgtacagcgtttcgtcagcgaggcctatgcccctgaagggaaaaacagcatttggtaaacaaagctgcaagaaacagacaaataagcaaactaacaaaattttaacttag

SEQ ID NO: 54040 - DNA, 4101 bp, Artificial Sequence
  derived and/or modified sequence
atgagcccctgtggtcgtaaaatgggagagggcaggcaacaaagaagagcgccagtcggtaagctgcttctcctacccgggcgacgcgacaccccgcatggccgcagtgggagctccggcgcaaggactcaacgttctcttctctggttattggtgcatgtgtggctgtgggcagcttccggttccagtgctcagcttttcaatctaaccctgagtgtggacgagggtctccctccggacacacttgtgggcgacattcgcgctgggctccctgctgcccaacagcaggaaggcagcgggttcttcctgtctgaggattcggatgactccccactcctggacgatttccacgtgcaccccgacacaggcattatccgaactgcacgtaggttagaccgggagcgtcgcgatcactattcgttcgtggctgcaacactgttaggcgcggtcgttcaggtagagataagagtgaatgatgtcaacgatcatagccctaggttcccactcgactcacttcagctcgatgtttctgaactcagtccacccgggactgctttccgtctgcccgtcgcacatgatcccgatgccggattgttttcaacccagggctataccctggtgcagccaagcgacctccccaaagatcctgccggaccattttttcagttgcggtaccgtacacccggccctctcccgagtcccttgcttccgggatcttccagcccactcgaacccttagacttggttctgctcagaagactagacagagaagaggcagcggctcatcggctacaaatcgaagcttgggacgggggcaggccccgcaggacgggactgctgtctgtggaactcagggtgctcgacgagaacgacaaccccccagttttcgaacaagacgaatacagggccgctgttagggaagacgctcagccaggcgcagaggtctgcagggtgagagctacggaccgggacctcggacccaacggattcgtccgctactcggttcgggccagacaggtgccgggagcgggatccggcggaggcgctctgggagacgctgcctattttgcggtggaggagctgtcaggggtggtgcgggtctggcgcccgctggacagagaagcgcaggcctggcatcaactggtcgtggaggcacgcgacggaggtgctgagccggaggtggccactgtgcgcgtgagcattgccgtcctagatgtcaatgacaaccgccctgcaatccatgtattatttctcacagaaggcggggtggcccgggtctccgagggggcgcgacccggggattacgtagctcgggtgtccgtctctgatgccgacggcgactgggagaaggaagacgaggccaccggtgaactaggtgtgggtttaggcgacggctcaatttctctcagccttgaggggggagagggggacttcgccctgctccctggtgggcctcctggcgttttttttctttgcgtcgaagggccgctggatcgggagagcagggatctgtacgagctgctgctggtcgctacggacgcagggtcacctccactctccaccgaggaaacacttctcctgcgggtggctgacctcaacgaccagccacctctgttctcccagcagcattataaggcctctgtaagcgaagctgccgcgcccggcaccgttgtcatgtgggtctctgcctccgatgctgacgaagccgggagcgaccacgcatggctgagatacaccgtggttcagctgagtgcaccctgcaatctgggtagcctgcagagcaaaatggtgcataccgccgaatgtggccctagtttcgcaattgacagcgaatctggcgcaatctccacaattcggacactggatcgcgaggtgcaagaagccgtagaattaaaggttgtcgctcaggatctgggagaacctccattgtcagccacttgtcttgtttcaatcaccgttgacgatgttaatgacaatgagcccatattctggcgtcaggtttataatgccactatcgcagagcacgcccctgtcggtcactgttttctgcaggtcactgcctcggatgctgattctggactgtacgggtttatcgagtactccttgtatgatgggttcctgtcctatgaggcacctcaggccttcaggattgacccccatgacggtcagatctgcgtgtcacaagatatcgacagagaaagagatcccgcaacctacgacctcctagtagaagctaaggacgggggggggctgtctgctcaggcgttcgttcgtgtggatctggaggatgtaaacgacaatcatcccgtcttcaatcccagcacatatgtcacatccatctcggacgagacacagcccggcaccgagataattaatgtgctcgctacggatcaggacagtggtatatatggaaccgtggcatatgagctgattccgggcaatgtgtcaagtctgttcacaattgacagtacaaccggcatcatttacctcacactgcccttaagccaccttgagagcacaaccctttccctcatggtgagcgcccaggacggcgggggtctgactgccgtgatcaatgccgatgtgaccatccacattttccagacaacgctggcccccgccgagttcgaacgccccaaatataccttcttagtgtacgaggatgtgcctgaggatagtccaattgggacagtgaaagctcgggagcccctaaactccagcgaacccattttctaccgaatctcatcaggcgatctcggaggtaagttcagtattcaccctaggcttggaacaatccggacccggaaaccactggatcacgagacgcaacctgtcgtggtgttaaccgttcaagcacaactcgggtcagcccctgcttgctccagcactgaggtaaacataacggttatggacgtgaatgacaaccaccccgcctttcttagaacctcagacgaaattaggatctcccagactacaccaccggggaccgctctgtacctggcacgagcagaggaccgggactctggccgaaacggactgatcagatacagtattgcttctccgcagccaggggtcttcgccatagaccgcgccctgggggtgctctttctaaatggcagtctgggagctggcgagcaaagagaactgaccctcaccctgagggccgaagatcagggtgtgcacccccaggctgcgttgttggtgcttactgttgtgattgaaaaaagagaacacagcccatcatggactttcgaacatttggtatatcaggtcgaggtcagtgagtccttgtccccaatgactcagatgctccagacacaggctcaccctctgggaccacagagggctgcctcaccattgaggtattcgcttgagccttctgtggatagcgccatgtttggcatcaggccctacaccgggtggatttatcttagaagacaatttgactatgaatccacccagacatacaactttagagtgtttgcttggatccccgaggacggattcttgcagaacgtctcgaccacagtgattgtaagagtctgggatgaaaatgataattcacccacattcctccacgatgtgttgttccttaaggtagaagaaagccctgtccctcagggcgttattggtaagatcactgcaatagacatggactcgggcaaaaacgggcagctgctctattttctcctgtccgacggaaagttctttaaaatgaaccctaatactggggagttgattaattgggtggcactggacagggaacacagggggcatcatgagatgaccgtgttggtcaccgataggggtagtccccctcgtaacgctaccatggctgtgtatgtgtccgtgacggacataaacgataataggcccttctttccccagtgtctaccaggaaaggagctgcacgtgaaggttttagaggggcaaccagtgaacatgcttgtgacaaccgtgttcgcaaaggatccagatgaaggcaacaatgccgaggtcacctacagtgtgagtagcgcacgaccgatgccactgaaaggcaagaccgctttcgggaaacagagctgcaagaagcaaacgaacaaacagactaaaagctag

SEQ ID NO: 54041 - DNA, 4110 bp, Artificial Sequence
  derived and/or modified sequence
atgagcccctgtggcaggaagatgggagagggccggcagcagaggcgggcccctgtgggcaagctgctgctgctgcccggccggcgggacacccctcatggccgcagcggcagcagcggggcccggacccagaggagcctgctgtggctgctggtgcacgtgtggctgtgggccgccagcggcagcagcgcccagctgttcaacctgaccctgtctgtggatgagggcctgcccccagacaccctggtgggggacatccgggccggcctgcctgctgcccagcagcaggagggcagcggcttcttcctgtctgaagattctgatgacagccccctgctggatgacttccacgtgcacccagacaccggcatcatcagaacagcccggcggctggaccgggagcggcgggaccactacagctttgtggccgccaccctgctgggcgctgtggtgcaggtggagatccgggtgaatgatgtgaatgaccacagcccccgcttccccctggacagcctgcagctggatgtgtctgagctgagccccccaggcacagccttccggctgcctgtggcccatgaccctgatgctggcctcttcagcacccagggctacaccctggtgcagcccagcgacctgcccaaggaccctgctggccccttcttccagctgcgctaccgcaccccaggccccctgcccagccccctgctgcccggcagcagcagccccctggagcccctggacctggtgctgctgcggcggctggaccgggaggaggccgccgcccaccggctgcagatcgaggcctgggatggcggccggcccaggagaacaggcctgctgtctgtggagctgcgggtgctggatgaaaatgacaacccccctgtgtttgagcaggatgagtacagagctgctgtgagagaagatgcccagcctggagctgaggtgtgccgggtgcgggccacagaccgggacctgggccccaacggctttgtgcgctacagcgtgcgggcccggcaggtgcctggagctggcagcggcggcggggccctgggagatgctgcctactttgctgtggaggagctgagcggcgtggtgcgggtgtggaggcccctggaccgggaggcccaggcctggcaccagctggtggtggaggccagagatggaggagctgagcctgaggtggccaccgtgcgggtgtccattgctgtgctggatgtgaatgacaacagacctgccatccacgtgctcttcctgacagaaggaggagtggcccgggtgtctgagggcgcccggcctggggactatgtggcccgggtgtctgtgtctgatgctgatggagactgggagaaggaggatgaggccactggagagctgggcgtgggcctgggagatggcagcatcagcctgagcctggagggcggggagggggactttgccctgctgcccggcggccccccaggagtcttcttcctgtgtgtggagggccccctggaccgggagagccgggacctgtatgagctgctgctggtggccacagatgctggcagcccccccctgagcacagaggagaccctgctgctgcgggtggccgacctgaatgaccagcccccactcttcagccagcagcactacaaggcctctgtgtctgaggccgccgcccctggcaccgtggtgatgtgggtgtctgccagtgatgctgatgaagctggcagtgaccacgcctggctgcgctacacagtggtgcagctgagcgccccctgcaacctgggcagcctgcagagcaagatggtgcacacagcagaatgtggccccagctttgccatcgacagcgagagcggggccatcagcaccatccgcaccctggaccgggaggtgcaggaggccgtggagctgaaggtggtggcccaggacctgggggagccccccctgagcgccacctgcctggtgtccatcaccgtggatgatgtgaatgacaatgagcccatcttctggaggcaggtgtacaatgccaccatcgccgagcacgcccctgtgggccactgcttcctgcaggtgacagccagtgatgctgacagcggcctgtatggcttcatcgagtacagcctgtatgatggcttcctgtcctatgaggccccccaggccttcagaattgacccccatgatggccagatctgtgtgtcccaggacatcgaccgggagcgggaccctgccacctatgacctgctggtggaggccaaggatggcggcggcctgagcgcccaggcctttgtgcgggtggacctggaggatgtgaatgacaaccaccctgtgttcaaccccagcacctacgtgaccagcatcagtgatgagacccagcccggcacagagatcatcaacgtgctggccacagaccaggacagcggcatctatggaacagtggcctatgagctgatccctggaaatgtgagcagcctcttcaccatcgacagcaccaccggcatcatctacctgaccctgcccctgagccacctggagagcaccaccctgagcctgatggtgtctgcccaggacggcggcggcctgacagctgtgatcaatgctgatgtgaccatccacatcttccagaccaccctggccccagctgagtttgagcggcccaagtacaccttcctggtgtatgaagatgtgcctgaggacagccccatcggcaccgtgaaggcccgggagcccctgaacagcagcgagcccatcttctaccgcatcagcagcggggacctgggcggcaagttcagcatccacccccggctgggcaccatccgcaccaggaagcccctggaccacgagacccagcctgtggtggtgctgactgtgcaggcccagctgggcagcgccccagcctgcagcagcacagaggtgaacatcaccgtgatggatgtgaatgacaaccacccagccttcctgcggaccagtgatgagatccgcatcagccagaccaccccacctggaacagccctgtacctggcccgggcagaggaccgggacagcggcagaaatggcctcatccgctacagcatcgccagcccccagcccggggtgtttgccatcgaccgggccctgggcgtgctcttcctgaatggcagcctgggcgctggggagcagcgggagctgaccctgaccctgcgggcagaggaccagggcgtgcacccccaggccgccctgctggtgctgactgtggtgattgagaagcgggagcacagccccagctggacctttgagcacctggtgtaccaggtggaggtgtctgagagcctgagccccatgacccagatgctgcagacccaggcccaccccctgggcccccagagagctgccagccccctgcgctacagcctggagcccagcgtggacagcgccatgtttggcatccggccctacacaggctggatctacctgcggcggcagtttgattatgagagcacccagacctacaacttccgggtgtttgcctggatcccagaagatggcttcctgcagaatgtgtccaccaccgtcatcgtgcgggtgtgggatgaaaatgacaacagccccaccttcctgcatgatgtgctcttcctgaaggtggaggagagccctgtgccccagggcgtcatcggcaagatcacagccatcgacatggacagcggcaagaatggccagctgctgtacttcctgctgagtgatggcaagttcttcaagatgaaccccaacacaggagagctgatcaactgggtggccctggaccgggagcaccggggccaccacgagatgacagtgctggtgacagaccggggcagccccccaagaaatgccaccatggctgtgtatgtgtctgtgacagacatcaatgacaaccggcccttcttcccccagtgcctgcccgggaaggagctgcacgtgaaggtgctggagggccagcctgtgaacatgctggtgaccaccgtgtttgccaaggaccctgatgagggcaacaatgctgaggtgacctacagcgtgtcctctgcccggcccatgcccctgaagggcaagacagccttcggcaagcagagctgcaagaagcagaccaacaagcagaccaacaagatcctgacctag

SEQ ID NO: 54042 - DNA, 4101 bp, Artificial Sequence
  derived and/or modified sequence
atgagcccctgtggcaggaagatgggagagggccggcagcagaggcgggcccctgtgggcaagctgctgctgctgcccggccggcgggacacccctcatggccgcagcggcagcagcggggcccggacccagaggagcctgctgtggctgctggtgcacgtgtggctgtgggccgccagcggcagcagcgcccagctgttcaacctgaccctgtctgtggatgagggcctgcccccagacaccctggtgggggacatccgggccggcctgcctgctgcccagcagcaggagggcagcggcttcttcctgtctgaagattctgatgacagccccctgctggatgacttccacgtgcacccagacaccggcatcatcagaacagcccggcggctggaccgggagcggcgggaccactacagctttgtggccgccaccctgctgggcgctgtggtgcaggtggagatccgggtgaatgatgtgaatgaccacagcccccgcttccccctggacagcctgcagctggatgtgtctgagctgagccccccaggcacagccttccggctgcctgtggcccatgaccctgatgctggcctcttcagcacccagggctacaccctggtgcagcccagcgacctgcccaaggaccctgctggccccttcttccagctgcgctaccgcaccccaggccccctgcccagccccctgctgcccggcagcagcagccccctggagcccctggacctggtgctgctgcggcggctggaccgggaggaggccgccgcccaccggctgcagatcgaggcctgggatggcggccggcccaggagaacaggcctgctgtctgtggagctgcgggtgctggatgaaaatgacaacccccctgtgtttgagcaggatgagtacagagctgctgtgagagaagatgcccagcctggagctgaggtgtgccgggtgcgggccacagaccgggacctgggccccaacggctttgtgcgctacagcgtgcgggcccggcaggtgcctggagctggcagcggcggcggggccctgggagatgctgcctactttgctgtggaggagctgagcggcgtggtgcgggtgtggaggcccctggaccgggaggcccaggcctggcaccagctggtggtggaggccagagatggaggagctgagcctgaggtggccaccgtgcgggtgtccattgctgtgctggatgtgaatgacaacagacctgccatccacgtgctcttcctgacagaaggaggagtggcccgggtgtctgagggcgcccggcctggggactatgtggcccgggtgtctgtgtctgatgctgatggagactgggagaaggaggatgaggccactggagagctgggcgtgggcctgggagatggcagcatcagcctgagcctggagggcggggagggggactttgccctgctgcccggcggccccccaggagtcttcttcctgtgtgtggagggccccctggaccgggagagccgggacctgtatgagctgctgctggtggccacagatgctggcagcccccccctgagcacagaggagaccctgctgctgcgggtggccgacctgaatgaccagcccccactcttcagccagcagcactacaaggcctctgtgtctgaggccgccgcccctggcaccgtggtgatgtgggtgtctgccagtgatgctgatgaagctggcagtgaccacgcctggctgcgctacacagtggtgcagctgagcgccccctgcaacctgggcagcctgcagagcaagatggtgcacacagcagaatgtggccccagctttgccatcgacagcgagagcggggccatcagcaccatccgcaccctggaccgggaggtgcaggaggccgtggagctgaaggtggtggcccaggacctgggggagccccccctgagcgccacctgcctggtgtccatcaccgtggatgatgtgaatgacaatgagcccatcttctggaggcaggtgtacaatgccaccatcgccgagcacgcccctgtgggccactgcttcctgcaggtgacagccagtgatgctgacagcggcctgtatggcttcatcgagtacagcctgtatgatggcttcctgtcctatgaggccccccaggccttcagaattgacccccatgatggccagatctgtgtgtcccaggacatcgaccgggagcgggaccctgccacctatgacctgctggtggaggccaaggatggcggcggcctgagcgcccaggcctttgtgcgggtggacctggaggatgtgaatgacaaccaccctgtgttcaaccccagcacctacgtgaccagcatcagtgatgagacccagcccggcacagagatcatcaacgtgctggccacagaccaggacagcggcatctatggaacagtggcctatgagctgatccctggaaatgtgagcagcctcttcaccatcgacagcaccaccggcatcatctacctgaccctgcccctgagccacctggagagcaccaccctgagcctgatggtgtctgcccaggacggcggcggcctgacagctgtgatcaatgctgatgtgaccatccacatcttccagaccaccctggccccagctgagtttgagcggcccaagtacaccttcctggtgtatgaagatgtgcctgaggacagccccatcggcaccgtgaaggcccgggagcccctgaacagcagcgagcccatcttctaccgcatcagcagcggggacctgggcggcaagttcagcatccacccccggctgggcaccatccgcaccaggaagcccctggaccacgagacccagcctgtggtggtgctgactgtgcaggcccagctgggcagcgccccagcctgcagcagcacagaggtgaacatcaccgtgatggatgtgaatgacaaccacccagccttcctgcggaccagtgatgagatccgcatcagccagaccaccccacctggaacagccctgtacctggcccgggcagaggaccgggacagcggcagaaatggcctcatccgctacagcatcgccagcccccagcccggggtgtttgccatcgaccgggccctgggcgtgctcttcctgaatggcagcctgggcgctggggagcagcgggagctgaccctgaccctgcgggcagaggaccagggcgtgcacccccaggccgccctgctggtgctgactgtggtgattgagaagcgggagcacagccccagctggacctttgagcacctggtgtaccaggtggaggtgtctgagagcctgagccccatgacccagatgctgcagacccaggcccaccccctgggcccccagagagctgccagccccctgcgctacagcctggagcccagcgtggacagcgccatgtttggcatccggccctacacaggctggatctacctgcggcggcagtttgattatgagagcacccagacctacaacttccgggtgtttgcctggatcccagaagatggcttcctgcagaatgtgtccaccaccgtcatcgtgcgggtgtgggatgaaaatgacaacagccccaccttcctgcatgatgtgctcttcctgaaggtggaggagagccctgtgccccagggcgtcatcggcaagatcacagccatcgacatggacagcggcaagaatggccagctgctgtacttcctgctgagtgatggcaagttcttcaagatgaaccccaacacaggagagctgatcaactgggtggccctggaccgggagcaccggggccaccacgagatgacagtgctggtgacagaccggggcagccccccaagaaatgccaccatggctgtgtatgtgtctgtgacagacatcaatgacaaccggcccttcttcccccagtgcctgcccgggaaggagctgcacgtgaaggtgctggagggccagcctgtgaacatgctggtgaccaccgtgtttgccaaggaccctgatgagggcaacaatgctgaggtgacctacagcgtgtcctctgcccggcccatgcccctgaagggcaagacagccttcggcaagcagagctgcaagaagcagaccaacaagcagaccaagagctag

SEQ ID NO: 54043 - DNA, 4110 bp, Artificial Sequence
  derived and/or modified sequence
atgagcccctgcggccggaagatgggcgagggccggcagcagcggcgcgctccggtggggaaactcctgctgctcccaggccggcgcgacacaccccacggaaggagcggatcatcaggagcacgaacccagaggagtctcctctggctgctggtgcacgtttggttatgggcagctagcgggagtagcgcgcagctttttaacctcacattgtctgtagacgagggtctaccacccgataccctggtaggcgacatcagggccgggctgcccgcagctcagcagcaagaaggcagtgggttctttttatcagaggactccgacgactcccccctgctggatgatttccacgttcaccctgacacaggcatcatccgaaccgcacggcggttggacagggagcgacgtgaccactatagcttcgtggcagccacgcttttgggcgctgtggtgcaggtggaaatccgcgtgaatgacgtaaatgatcacagtccacgtttcccattggattctttacagctggatgtaagtgagcttagccctcctggaacagcgtttcgcctgccagtcgctcatgatccagatgcggggctcttcagtacgcaagggtatactctggttcagccaagtgacctgccaaaggaccccgcaggtccgttctttcagctgcgttacagaacccctggacctctgccttcccctttactacctggctcatcctcacctctggaaccactcgacctcgtactcctgcgcaggcttgacagagaggaggcagccgcccatcgcctgcagattgaggcgtgggatggggggcgccccaggagaaccgggctgctgagcgtggagctgcgggtcctggacgagaacgacaacccaccagtgttcgagcaggacgagtatcgggcggctgtgagagaggacgctcaacccggagccgaggtgtgccgcgttagggccacagaccgcgacctcgggcccaatggattcgttcggtactccgttagggctaggcaagtgcccggagcgggctccggcgggggcgccctgggtgatgccgcatattttgcagtcgaggaactgtcaggcgtggtcagagtctggcgtcctctggaccgtgaggcccaggcatggcatcagctcgttgttgaggcacgggacggtggcgcggaaccagaagtagcaacagtaagagtaagtattgctgtactggatgttaacgacaaccgcccggcaattcacgtcctgttcttaacagagggaggggtggccagggtatccgaaggcgctagaccaggcgactacgtggccagggtcagtgtgtcagatgcagacggcgactgggagaaggaggatgaggcaactggagagctaggggtgggcctgggggacggatctatcagcctgtcgcttgaaggtggagagggagatttcgccctcctacctggggggcccccgggcgtgttctttttgtgtgtcgaggggccattggatagagagtcacgtgacctctacgagctccttctagtggcaactgatgcaggttccccacccttgtctacagaggagacactgttgctccgcgtcgctgacctcaatgatcagcctcctcttttctcacagcaacattataaagcctccgtgtccgaggccgccgcaccgggtacggtggttatgtgggtctccgccagtgacgccgacgaggcgggttctgatcatgcatggctcagatatactgtcgtccagctaagtgcaccctgcaacctgggttccttgcaaagcaagatggttcacacagctgaatgtgggccttcttttgccattgattccgagagtggggccattagcacaattcgaacactggatagggaagtgcaagaggctgttgagttaaaagtggtggcgcaggacctgggtgaacctcctttaagcgctacgtgcctggtctctattactgtcgacgacgtgaatgataacgaaccaattttctggaggcaggtctataatgcaactattgccgagcatgctccagtgggtcactgtttcttgcaggtaactgcctcagacgctgactccggactctacggtttcatcgaatattcactgtacgacggtttcttgagctacgaggctcctcaggcttttaggatcgacccccatgacggtcaaatttgtgtgagccaggacatcgatcgcgagcgggacccagctacttacgacttgctggtggaagccaaagatggaggcggactgtctgcgcaggcctttgttcgagtggacttggaagacgtgaacgataaccatcctgtgtttaacccgtcaacgtacgtaactagcattagtgatgagacacaaccgggcaccgaaattatcaatgtgctagctacagatcaagattcgggtatttacggaacagtcgcctatgagctgatccccggaaacgtctccagcctgttcacaattgactctactacgggaattatttatctgacactccccctgagccacttggaatccacaacactctcactcatggtttctgctcaggatggaggaggcctaactgctgtcattaacgccgacgtgaccattcacatcttccagactaccctagcaccagctgaattcgagcgtccaaaatataccttcctggtgtacgaggacgtgccggaagactccccgattggcacagttaaggcgagagaacccctcaattcctccgaacccatcttttatagaattagtagcggcgacctcggcggaaaattctctatccatcctcgcctcggcaccattagaacaaggaagcctcttgatcacgagacgcaacctgtggtagtgctgactgtgcaggctcaactcgggtcagcccctgcttgcagcagtactgaagtgaacatcaccgttatggacgtgaacgataaccatccggccttcttgaggacatcagatgaaattcggatctctcagactacccccccgggtacagccctttacctagcccgggctgaggatcgggatagcggccgaaatggtctcatacgatattccattgcatccccccaaccaggagtctttgccattgaccgcgctctcggtgtgctcttcctgaatggaagtctgggggcgggcgaacagcgggaattgacccttactctccgggccgaagaccagggagtgcacccccaggcggctttgctggtgttgacggtggtgatcgaaaaacgggagcattctcccagttggacttttgagcacctcgtgtaccaggtagaggtcagcgaatctctgagccctatgactcagatgctccagactcaggcccacccgctgggcccacagagggccgcatccccccttagatattcgctggagccatctgtggatagtgctatgtttggcattaggccatataccggatggatttaccttaggagacagttcgactatgagagtacacagacttacaacttcagggtgttcgcttggatccctgaggatggttttctccaaaatgtgagcacaaccgtgattgttcgcgtttgggacgaaaacgacaacagcccgacgtttctgcacgacgtgcttttcctgaaagtggaggaaagtccggtgccccagggcgtcattggaaagatcaccgctattgatatggactccgggaagaatggccagctcctgtatttcctgttgtccgatgggaaattctttaagatgaaccccaacaccggggaactgattaactgggtagcacttgatcgtgaacatcggggacaccacgagatgacggttctcgtgaccgacaggggatccccaccaagaaatgccaccatggccgtgtacgtcagcgttaccgacatcaacgacaacaggcctttcttcccacagtgcctgcctggcaaggagcttcatgtgaaggttctcgaaggccagccagttaacatgcttgtcactaccgtctttgccaaggatcctgacgaaggaaacaatgcggaggttacctacagtgtctcttctgctcgaccaatgcccctgaagggcaagacagccttcggtaagcaaagctgcaagaagcagaccaataagcagaccaataaaatactgacttag

SEQ ID NO: 54044 - DNA, 4101 bp, Artificial Sequence
  derived and/or modified sequence
atgagcccctgcggccggaagatgggcgagggccggcagcagcggcgggccccagtaggaaagctcttgctcctacctggccgaagagatacacctcacggacgatccggaagctcaggcgccagaacccagaggagtctgctgtggttattagtccacgtgtggctatgggccgcttcaggatccagcgctcaactcttcaatctcaccctctccgtggatgagggactgccaccagacacattagttggagacatccgagcaggacttcctgcggcccaacaacaggagggatctgggttcttccttagcgaagactcggacgatagtccgctgttggatgatttccacgtgcacccggacaccggcatcatcaggactgcacgaaggttagatagggagaggcgggaccattacagcttcgtggccgcaactttactgggtgcagtggtgcaagttgagattcgggtaaatgacgtgaacgaccacagccccagatttcctctcgactcactgcaactggacgtgagcgagctgtccccccctggtactgcctttcgactaccagtggcccacgatccagacgcagggctcttcagcactcagggctacacactggtgcaacctagcgatcttcctaaagaccccgctgggccattttttcagctacggtatagaaccccaggtccactgccctctcccttgctccccgggagcagtagtcccctcgaacccctggacttagtgcttttgcgcagactcgacagagaagaggcggccgctcaccggttacagattgaggcgtgggatggcgggagaccaagaagaacaggcttactgagtgtcgaactgcgagtgttggacgagaacgataacccccccgtgtttgaacaggacgagtatcgagctgctgttagagaagacgcacagcctggcgcggaggtctgtagggtcagagccactgaccgggatctcggaccaaatgggttcgtccgctattccgtgagagccagacaagtgcccggcgcaggcagcgggggtggcgcgcttggcgacgcagcatactttgccgtagaggagctgtccggagtggtcagagtgtggagaccgctggatagggaagcccaggcgtggcatcaactggtcgtagaggcaagggacgggggtgctgagcccgaagtggcaacagtgagagtgtcaattgctgtactggatgtgaatgataatagaccggcgattcatgtgttattcctgaccgaaggcggtgtggctagggtctcagaaggggccaggccaggcgactacgtggcacgggtgtctgtatccgatgccgacggtgattgggagaaggaggatgaagctacgggagagctaggcgtagggctgggcgacggcagcatttcactaagccttgaaggcggagagggcgactttgccctcctccctggaggcccgcctggagtctttttcttgtgcgtggaaggcccccttgacagggagtcccgcgatctctacgagctactcctcgtcgccacagacgcaggatctccaccactcagcactgaagaaactctgctgctgcgggtagctgacctgaacgaccagccccctctgtttagccagcagcattacaaggcctctgtgtccgaagccgcagcccctggcacagtcgtcatgtgggtgtccgcctccgatgctgacgaggctggcagtgatcatgcctggctccggtatacagtggtgcagctctcagccccttgcaacctcggatcccttcagagcaaaatggttcataccgccgaatgcggccccagctttgccatcgatagcgaaagcggggcgatcagcacgattcgaactctggatagagaggtgcaagaggcagttgaactgaaggtcgtggcccaggacctgggtgaacctccactgtccgctacctgtctggtctccatcactgtggatgacgtcaacgataatgagccgattttttggcgacaagtgtacaacgcgaccatcgctgagcacgcccccgtgggccattgtttcttgcaggtcaccgcctcggacgccgacagcggtctatacggattcatcgagtactccttatacgacggatttcttagctacgaggctccacaagctttccgcatagacccacacgatggccagatttgcgtatcccaggatatagatcgcgagcgcgaccctgcaacttacgatctcttagtggaagctaaagacggcggaggacttagtgcacaggcattcgtcagggtggaccttgaggacgtcaatgacaatcaccccgtgttcaatccatccacctacgtgacttccattagcgacgaaacacaaccaggcacagagatcatcaacgtcttggctacggaccaagattcgggaatctacggtaccgtggcctacgaacttatcccaggaaacgtatctagtctgttcactattgattctacaactggcatcatctatctgacccttccattgagccatttggagagcaccactctttccttaatggtcagtgctcaggatggcggaggtctgacagccgtcatcaacgccgacgtcaccattcatatcttccaaacaaccctggcccccgccgagttcgagagaccgaagtatacattcctggtgtacgaggatgtccctgaagactctccaatcggcacagttaaagcgagagagcccctcaatagttctgaaccgatcttctaccggatcagctctggggacctgggggggaagttcagtatccacccccggttggggacaatcagaacaaggaagcccctggatcacgagactcagccagtggtcgtgcttacagtgcaggcccaactagggagcgccccggcatgctcctccacagaagtgaatattaccgtcatggatgttaacgacaatcaccctgcattccttagaacgtctgacgaaatccggatatcccaaactactccaccaggtacggccttatacttggcaagggcagaggatagggactccggtaggaatggactaatcagatacagtatagcatccccccagccaggggtgtttgcgatagaccgggccttgggggtcctgttcttgaacgggagcttaggggcaggagagcaacgggagctgactttgacactgcgcgctgaagatcagggtgtccacccacaagccgctctactagtgcttaccgtggttatcgaaaagagagagcacagcccttcatggacattcgagcacttggtgtaccaggtggaggtatccgaatccctgtcccctatgactcagatgctgcaaacgcaggctcacccactggggcctcagcgtgcagcctctcctctgagatatagcctggaaccaagcgttgacagcgccatgtttgggattaggccatatacaggctggatttacctgagacgacagttcgattatgagtcgacccaaacctacaacttccgcgtgtttgcttggatccccgaggacggttttctgcagaacgttagcacaacagtgatcgtaagggtgtgggatgagaatgataattctcccacctttctgcacgacgtattgttcttgaaggtggaagaatccccggtgccccagggcgtgattggcaaaatcaccgccattgatatggattccggcaagaacggacagctgctctatttcctcctgtcagatgggaagttttttaagatgaaccctaatactggcgaactcattaactgggtcgcactggatcgggaacatagagggcaccatgagatgacggtgctggtcactgatcggggatccccacctagaaacgcgactatggccgtgtatgtgagcgtcacggatattaacgacaataggccattcttcccccagtgcctaccaggaaaggagctccatgtgaaggttcttgagggccagcccgtgaacatgctggtgacaaccgtgttcgctaaggaccccgacgaaggtaacaatgccgaggtcacctattccgtgagctccgctaggccaatgcccctgaagggtaaaaccgcatttgggaaacagagctgtaaaaaacaaaccaataagcagactaagtcatag

SEQ ID NO: 54045 - DNA, 4110 bp, Artificial Sequence
  derived and/or modified sequence
atgagcccatgtggtagaaagatgggcgagggaagacagcagcgtcgtgccccagtgggtaaactcctgctgctacccggacgcagggatactccacacgggagaagcggctcctctggtgcgagaacccagcgtagcctgctgtggctgctcgtacatgtgtggctgtgggcagcgagtggaagctctgcccagctcttcaaccttacgctgtcagtggatgagggtctgcctcctgatacactggtgggggatatacgggcaggtttgcctgccgctcaacagcaagagggaagcggcttttttctctctgaggattctgatgactcccctctgttggatgatttccacgtccacccggacacaggtatcatccgaacagctcgtaggctggaccgggaaaggagagatcactatagttttgttgccgctaccctgctgggggcagtggttcaggtggaaattcgggtgaatgatgtgaacgaccatagcccaagattccctctcgactctttgcagctggacgtgtctgaactgtctccacctggcacagcatttcgcctgccagtggcccacgatccagatgcagggctcttcagcactcaaggctacacccttgtccagcctagcgacctgcccaaggacccggcaggacccttctttcaacttagataccggacaccaggaccccttccgtctccattgctcccaggcagctcttcgccattagagcccttggatttggtgctccttcgaagactggaccgggaagaggccgctgctcacagattacaaatcgaagcctgggacggaggcaggccacgcagaactggcttactgtccgtggaactcagggtcctcgacgaaaatgataatcctcccgtctttgaacaagacgagtatcgagccgctgtgagggaggacgcacagccaggcgctgaagtatgccgggtgagggctaccgaccgagatctcgggccaaatggtttcgttcggtactccgttagagcacggcaggtgcccggagcagggtctggtgggggtgctctgggcgacgcagcatactttgcagtggaggagctctccggggtggtacgggtatggcggcctctggatagagaggcacaggcatggcatcaactcgtagtagaggctcgtgacgggggagccgaacctgaagtggctacggttcgggtcagtatcgccgtactcgacgttaacgacaacaggccagctattcacgtcttgtttttgaccgaggggggtgtggccagagttagcgagggggcaaggccgggagactatgtggctagagtctctgtgtctgacgctgacggcgactgggaaaaggaggatgaagccaccggtgagcttggtgtcggactcggagatggtagcattagcctgtcccttgagggaggggagggtgacttcgcactgctgcctggaggcccaccaggagtttttttcctgtgtgtggagggacccttagacagggagtctagggatctgtatgaactgctattagttgctactgatgccggatctccccctttgagtacagaagagactctgctgttgcgagtggcagatttgaacgatcagccccctctgttctctcaacagcactataaagctagcgttagcgaagcggctgcacctgggacagtggtgatgtgggtttcggccagcgacgctgatgaagcgggttcggaccacgcttggctccggtataccgtggtgcagctgtcggcgccttgtaacctgggcagccttcagtccaagatggtgcacactgccgagtgcggtccatctttcgccatagacagtgaatctggtgcaatatctacaatccgcacactggatcgggaggtccaggaagccgtagagctcaaagtcgttgcccaggaccttggagaaccacctcttagtgccacctgcttagtaagtatcaccgtggatgatgtcaatgataatgagccaatcttttggaggcaagtgtataacgcgacaattgctgaacatgcacctgtaggacactgcttcctgcaggttaccgcatctgacgcggactcagggctgtacggcttcattgaatacagtctatacgatggatttctgtcgtatgaggcccctcaagcatttagaattgacccacacgacggtcaaatatgtgtctcccaagacatcgacagggagcgcgatccagcgacatacgatctgcttgttgaagcaaaggatggcggtggtctgagcgcacaggcctttgtgcgcgtggatctggaggatgtgaacgacaatcatcctgtgttcaatcctagtacctatgtgacgtcaatcagcgatgaaacccaaccgggaacagaaattatcaacgtgctcgctaccgaccaggactctggaatctacgggaccgtggcttacgaacttataccgggaaacgtatccagcctgtttactatcgatagcaccaccgggatcatctatttgaccttgcctctcagccatctggagtctaccactctgtccctcatggtttctgcgcaagatggtgggggacttacagcagtcattaatgcagatgtgacgattcacatattccagacgacactcgcccctgccgagttcgaacggccaaagtacaccttcctggtgtacgaagacgtgcctgaagatagcccaatcggcactgtgaaagccagagaaccgcttaattcttcagagcccattttttacaggataagttcaggggatctaggtggcaagttctccatccacccccgtctggggaccatccgcacccgtaagcctttggaccacgaaacacagcccgtcgtggtcctcaccgtgcaggcacaactaggatctgcccctgcatgcagctctactgaggtgaacatcaccgtgatggacgttaacgacaaccaccccgcttttttgaggaccagcgacgagattcggatttctcagaccaccccaccagggacagctttatatctcgccagagcagaggaccgggacagcggacgtaacggtcttattagatacagtatagcgagtccccaacccggagtgtttgctatagatcgggctcttggggtgctgttcctgaacgggtccctcggcgcaggagagcaacgagaactgactctgactttgagagccgaggaccaaggagtacatccacaggctgctctacttgtgttgacagtagtcatcgagaaaagggagcacagtccatcctggacatttgaacatctggtttaccaggtagaggtgtctgaaagtctgtccccaatgactcagatgctacagacccaagctcacccccttgggcctcagcgagccgcatcccctctacggtactccctggagccatccgttgattccgctatgtttggaatccggccatacacaggttggatctaccttaggagacagttcgactatgagtccacccaaacttacaattttcgcgtgtttgcttggatacctgaggacggattcctgcagaatgtgagcactaccgttatagtccgagtctgggatgagaacgacaattcacccactttcctccacgatgtcctgtttctaaaagtggaggagtctcctgtcccccaaggcgtaatagggaagattaccgctatcgacatggactccggcaagaatgggcagctactctattttctgttaagcgacggaaaatttttcaagatgaatcccaacaccggggagcttatcaattgggtggccctggacagagaacaccgtggacatcatgagatgaccgtgctggtgacggatcgtggatcccctcccaggaacgctacaatggccgtgtacgttagcgtgactgacattaatgataatcgtcccttctttccacagtgcttacccggaaaggagcttcacgtcaaggtcctggaagggcagcccgttaatatgcttgtgactaccgtctttgccaaagacccagatgagggtaataatgctgaagtcacctattcggtttcttccgctaggccaatgccactgaaaggcaaaactgccttcgggaagcaaagttgcaaaaagcagacaaataaacagaccaataagattttgacttag

SEQ ID NO: 54046 - DNA, 4101 bp, Artificial Sequence
  derived and/or modified sequence
atgagcccatgtggccgtaaaatgggtgaaggccgtcagcagcgccgagcccctgtgggcaagctgctgctgctgcccggaagaagggatacccctcacggcaggtccggatcctctggggcacgcacccagagaagcctgctgtggctcctcgtgcatgtgtggctttgggcagcctcgggctcttccgcacagctcttcaatttaacactgtcggttgacgagggcctacctccagatacccttgtgggcgacattcgagctgggctgcccgcagctcagcagcaagaaggcagcggttttttcttgtcagaagactctgacgattccccactgttggatgacttccacgtccatccagacacaggcataatcaggaccgccagacgcttggatagggagagacgcgaccactactcttttgtggctgcaacgctgctgggcgcagtcgtccaggtggagattagggtgaacgacgttaatgaccacagccctaggtttcccctcgacagcctccagctggacgtgtccgagctttctccgcctggtaccgccttccggctgcctgtggcccacgatccagacgccggactcttcagcactcagggatacacactggtgcagccaagtgacttacccaaggatcctgctgggcctttttttcaactccgctatcgaacccctggcccattgcctagtccgcttctgcctggatcttcgtccccgcttgaacccctggatctcgtgctacttcgcaggctcgatagagaggaggcagctgcccatagacttcagatcgaggcctgggacggagggaggcccaggcggaccggtttattatccgtggaattaagagtgttggatgaaaacgataacccccctgtgtttgagcaagatgagtatagggcagccgtccgcgaggatgcacagccaggagctgaggtgtgcagagtgcgggcaacagatcgcgatttagggcctaacggcttcgtgcgatattccgtgcgggcacgccaggttcccggtgccggatccgggggtggggctctgggagatgccgcatactttgcagttgaggagctctcgggagtggtacgggtgtggaggcctctagaccgcgaagctcaggcctggcaccagttagttgtggaggcccgagatggaggggcagaacccgaagttgcgacggttagggtctcaatagcggtcctggatgtgaatgataaccgcccagccatccatgtactgtttcttacggaggggggtgtggcaagagtctctgagggtgcccgtccaggcgactatgttgctcgagtaagcgtcagcgatgccgatggagactgggaaaaggaggacgaagccactggagagctcggtgtagggctcggcgatggcagcatttcactgagtttggagggcggagaaggcgatttcgccctgctgccagggggaccaccaggcgttttcttcctgtgtgtggaaggccctctcgacagggagagcagagacctgtatgaactgctcttggtggcgacagatgctgggtcgcctccactttcaaccgaggagactcttctgctgcgcgttgccgacctgaatgatcagccgcctctcttctctcagcagcactataaagcctctgtcagcgaagcagcagccccaggcaccgtcgtgatgtgggtctctgcttctgatgctgatgaggccggttcagatcacgcttggttgcgctatacagttgtgcaattatccgctccttgtaacctagggtccctccaatctaagatggttcacaccgctgaatgcggaccctcatttgctatagacagcgagtctggtgccatcagcaccatccggactctggatagagaggtacaagaagccgtcgaactgaaagtggtagcacaggacttgggggagccccctctgtctgctacctgcctcgtgagtattaccgtggatgatgtaaatgacaacgaacctatattctggcgccaagtgtataacgcaacaattgcagagcatgcacccgtggggcattgcttcctacaggtaacagcctccgacgccgactccggactgtatggcttcatcgaatattccctgtacgatgggttcctatcttatgaggctcctcaggcatttcggatcgacccccacgatgggcaaatttgcgtcagtcaggacatcgaccgcgaacgcgaccctgctacatatgacctgctggtggaggccaaagacggaggtggcctctctgcacaggctttcgtaagggtcgacctggaagatgtgaatgataaccaccccgtcttcaatccgtccacgtacgtgacgtctatttccgatgagacccaacctggtacggaaatcatcaatgtgctcgccaccgaccaggactctggcatctacggaaccgtggcctatgagcttatcccaggaaacgtgtcttcgctgtttaccatcgattctaccacgggtatcatctacttaacgcttcctctctcccatttggagtccaccactctgagcttgatggtaagcgctcaagatggaggcggattgaccgctgtaattaacgccgatgtgactattcacatcttccagaccacattagcgcctgctgaattcgagcgcccaaaatacaccttcctggtttacgaggacgtacctgaggacagccctattggtacagtcaaagcgagagagcccctgaattcgtccgaacctatcttctacaggattagctctggggatctcgggggaaagttcagcattcaccccagacttgggaccatccgcactcggaagcccttagatcacgaaactcagcctgttgtggtcctgactgttcaggcccagctaggatctgcaccggcatgcagttcaaccgaggtgaatatcaccgtgatggacgtgaacgacaaccacccggcattcctaaggacctctgatgagattcgtatctctcagactacccctcccggtactgccctataccttgcaagggctgaggatagagactctgggaggaatgggctgatcaggtactctattgccagtccccagcccggagtgttcgcgatcgatcgtgccttgggagtcctcttccttaacggatctttaggcgctggagagcaacgggaactcacattgacattacgagcagaagaccaaggcgtgcacccacaggcagctcttctggttctcacggtcgtgatcgagaaacgcgagcacagtccgagctggacattcgaacatctggtctatcaggttgaggtttccgaatccctttcccctatgacacagatgctacagacgcaggcacacccgttaggacctcaacgcgctgctagcccactgaggtacagcttggaaccctcagtggattctgccatgttcggcatccgcccttataccggttggatctatttgcgtaggcagttcgactacgaaagcacacagacatacaatttcagagtattcgcgtggatccctgaagacgggttcctccagaacgttagcactaccgttatcgtcagagtctgggatgagaacgacaacagccccacgttcctgcatgacgtgctctttttgaaagttgaagagagcccagtgcctcaaggcgtcattggaaagattactgctattgacatggactcggggaaaaacgggcagctcctctattttttgttgtccgacggaaaattcttcaagatgaatcccaacaccggcgaactcatcaactgggtggccctcgaccgcgagcacaggggccatcacgaaatgaccgtgttggtcaccgatcggggtagcccgccacgcaacgcaacgatggccgtgtacgtgtcggtaactgacatcaacgataatagacctttttttcctcagtgtcttcctggcaaggagcttcatgtgaaggtgctggagggccaaccagtaaacatgctggttaccacagtttttgcaaaggacccggacgaaggcaacaacgccgaggtaacatactccgtgagttccgcacgtcctatgcccctcaaggggaagacagcgttcggaaagcagagttgcaagaaacagaccaataagcaaaccaagagctag

SEQ ID NO: 54047 - DNA, 5055 bp, Artificial Sequence
  derived and/or modified sequence
aataatgcacctgactttaccaggggggaacaaccagccgagtagaacaaggaacagatgtaaagggaataaaaggagagagaaaaagagatgagattcgtttaaagaaatccaggggcagaagaggtggctgccgcggcagaggcagctagagcttacttccctgtctgcgtgagctgcaggcagaggacgctttcaccagttgcagatgtaacctcgggaattcctgggccgtcggtttgtttgccaaacaaagtcttttcttctctggctcagacactgaagaggctcctggatttttctgcgatcctgccacaagctggcagttacccgagagccttcccaaggagctggaggagaaatgagcccttgtgggcggaagatgggcgaagggcgtcagcagcggcgggctccggtcgggaagctccttctgctccccgggaggagagatacaccccatgggcggtcaggcagcagcggcgccaggacgcagcgctccctgctctggctcttggtgcacgtgtggctgtgggcggcctcgggctcctctgcccagttgttcaacctcaccctttccgtagatgaggggcttcccccggacacgctggtaggtgacatccgcgccgggctgccggccgcgcagcagcaggaggggagcggcttctttctgtcggaggactccgatgactccccgctgctggacgacttccacgtgcacccggacaccggcatcatccgcactgcgcggcgcctggaccgcgagcggcgggaccactacagcttcgtcgccgccacgctgctgggcgctgtggtgcaggtggagattcgcgtcaacgacgtgaatgaccactcgccccgctttcccctcgactccctgcaactcgacgtctccgagctcagcccgccagggaccgccttccgcctgccagttgcccacgatccggacgccggactgttcagcactcagggctacaccctggtgcaaccgtccgacctgcccaaggaccccgcaggcccgttcttccagttgcgctaccggactccggggccactaccgtcaccgcttttgccaggctcctcgtcacccctggagcctctagatctggtgctgctgcggcgcttggaccgagaggaggcggcggcgcaccggctgcagatcgaggcatgggacggcggccgaccccggcgcaccggcctcctgagcgtggagctgcgcgtgctggatgagaacgacaacccgccggtctttgagcaggacgagtaccgcgccgcggtgcgcgaggacgcccagccgggcgccgaggtctgtcgcgtgcgcgccaccgaccgcgacctggggcccaatggcttcgtgcgctacagcgtccgcgcccggcaagtgcctggggcgggtagcggcggcggggcactgggcgacgcggcctacttcgcggtggaggagctgagcggcgtggtgcgagtgtggagacctctggaccgcgaggcacaggcctggcaccagttggtggtggaggcccgcgatggaggcgccgagcctgaggttgccacggtgcgcgtgtccatcgccgtgctggacgtgaatgacaaccggccagcaattcacgtgctctttctcacagagggaggcgtcgcccgtgtctctgaaggcgcccgaccgggcgactacgtggctcgcgtctcggtgtctgacgcggacggtgactgggagaaggaagatgaggccacaggggagcttggtgtgggtcttggagacgggagcatctctctgtccttggaaggcggagagggagacttcgcgttgctacccggcggccccccaggggtatttttcctttgcgtggaggggcccctggacagagagagccgcgatctgtatgagttactactggtggccacggacgcggggtccccgccgctgagcacggaggagacgctgctactccgggtcgctgacctcaatgaccaaccacctctcttcagccaacagcattacaaggcctcagtgtccgaggccgcggcccctggcactgtagtcatgtgggtcagcgcctccgatgccgacgaggcaggcagtgatcacgcctggctgcgctacactgtagtccaactctcggctccctgcaatctcggctccctgcaatcaaagatggtccacaccgcagagtgtggaccatcttttgccattgattccgaaagcggtgcgatcagcactatccggactctagaccgagaggtccaggaggcggtggagctgaaagtggtggcccaggacctcggagagcccccactctctgccacctgcctggtgagcatcaccgtagatgatgtgaatgacaatgagcccatcttctggaggcaggtgtacaatgccaccattgcagagcatgccccggttggacactgctttctgcaggtgacagcctctgatgcagattcaggactctatggctttattgaatattctctttatgatggattcctgagctatgaagcacctcaggcattccggatcgaccctcatgatgggcaaatctgtgtttctcaagatatcgacagggaaagggatccagctacctatgatctcctggtggaagctaaggatgggggtgggctaagtgcccaagcctttgttcgtgtggacctggaggacgtgaatgataatcatcctgtgtttaacccatcaacctatgtgacgagcatcagtgatgagacccagccaggcaccgagatcatcaatgttcttgccactgaccaggactctgggatatatgggacagtggcttatgagcttattccaggaaacgtgtcgtccctttttaccattgactccaccacaggaattatttacttaacattacctcttagtcatttggaatctaccacactttcgttgatggtctctgctcaagacggtggtgggctcacagctgtcattaatgccgatgtcaccatacacattttccagacaactctggcacctgctgagtttgaaaggcctaagtacactttcttagtttatgaagatgtgcctgaagatagtcccattggaacagtgaaagcaagagagcccttgaactcctcagaaccaatcttttacaggatttcttctggtgatctcggcggaaagttctccattcacccgcggctgggcactattcgcacccggaagcccctggatcacgagacgcagcccgtggttgtgctcacggtgcaggcgcagctcggcagcgccccagcctgcagcagcaccgaggtcaacataacagtcatggatgtcaatgacaaccacccagcgttcctcaggacctcggatgagattagaatatcccagaccacgccccctggcacagccttgtacctcgcacgtgcggaagacagagacagtgggcggaacggactcatccggtactccatcgccagcccgcagccaggcgtctttgccatcgacagagccctgggggtgctgttcctcaacggcagcctgggcgcgggcgagcagcgggagctcacgctgactctcagggccgaggaccaaggcgtgcatcctcaggcagccctgctggtgctgacagtcgttatcgagaaacgcgaacacagcccatcctggactttcgaacatttggtctatcaagtggaagtcagtgagtctctctcaccgatgacacaaatgctgcaaacacaggcgcacccacttggcccccagcgtgcagcctcgcctcttaggtactcgctggaacccagcgtagactctgctatgtttggaatccgcccttacacgggctggatttatttgcggcgacagtttgactatgaatccacccaaacatataattttagagtgtttgcttggatccccgaggacggattcttgcaaaatgtgagcactacagtcattgttcgtgtctgggatgagaatgacaattcccccaccttcttgcatgatgtgttgtttttgaaagtcgaagagagccctgttccccaaggggtaataggcaaaattacagctattgacatggactctggaaagaatggacagctattatatttccttttgtctgatggaaaattcttcaagatgaatcctaatacaggagagttaatcaattgggtggcactggatcgtgagcaccgggggcaccatgagatgactgtgctagtgacagaccgcggctccccaccacgaaacgccaccatggcggtttacgtctcagttactgacatcaatgataacaggcccttcttcccccagtgtctccctggaaaggagttacacgtgaaggttctggaaggtcaaccagtaaatatgttggttacaactgtgtttgcaaaggatcctgatgaaggaaataatgcagaagttacatactcagtatcttcagctagacctatgcctctgaagggaaaaacagcatttgggaagcagtcgtgcaaaaaacaaacaaacaaacaaacaaacaaaatcctgacctgaatctggtcagttctctagatctgcctcccaatttaaggaaaacataagaatagaggaacatattatgctacacgttggagatgcaacagcaaatctagatcatggaaaatgtcaggatacaagttccagtttattcaacaaataaattgcaaggacaaatagagagatgggtggcaggaatccatagattaaagaaatatgcaatatatggactttattttgatcttaatgtaaacaagaaaaataaagagtatttatgggatggttgaaaatttgaaaacttactgaatatttggtgatactgtgaaccattattaatttttaaggtataatatggtactgtgatgattgtgttaaaatatttattttttaaagatgcattttgaaatatatacagaagaaataatatgacttctggaacttacttcaaaaaaaatgggagaagcgaagtatatacatggggaatagatgaaataagattggccatgagctgatcattgttgaagctaggtgatggactcgtgaaagtttattataccattttgtccacttttttgtatgcattttccataataaaaattttt

SEQ ID NO: 54048 - DNA, 5051 bp, Artificial Sequence
  derived and/or modified sequence
aataatgcacctgactttaccaggggggaacaaccagccgagtagaacaaggaacagatgtaaagggaataaaaggagagagaaaaagagatgagattcgtttaaagaaatccaggggcagaagaggtggctgccgcggcagaggcagctagagcttacttccctgtctgcgtgagctgcaggcagaggacgctttcaccagttgcagatgtaacctcgggaattcctgggccgtcggtttgtttgccaaacaaagtcttttcttctctggctcagacactgaagaggctcctggatttttctgcgatcctgccacaagctggcagttacccgagagccttcccaaggagctggaggagaaatgagcccttgtgggcggaagatgggcgaagggcgtcagcagcggcgggctccggtcgggaagctccttctgctccccgggaggagagatacaccccatgggcggtcaggcagcagcggcgccaggacgcagcgctccctgctctggctcttggtgcacgtgtggctgtgggcggcctcgggctcctctgcccagttgttcaacctcaccctttccgtagatgaggggcttcccccggacacgctggtaggtgacatccgcgccgggctgccggccgcgcagcagcaggaggggagcggcttctttctgtcggaggactccgatgactccccgctgctggacgacttccacgtgcacccggacaccggcatcatccgcactgcgcggcgcctggaccgcgagcggcgggaccactacagcttcgtcgccgccacgctgctgggcgctgtggtgcaggtggagattcgcgtcaacgacgtgaatgaccactcgccccgctttcccctcgactccctgcaactcgacgtctccgagctcagcccgccagggaccgccttccgcctgccagttgcccacgatccggacgccggactgttcagcactcagggctacaccctggtgcaaccgtccgacctgcccaaggaccccgcaggcccgttcttccagttgcgctaccggactccggggccactaccgtcaccgcttttgccaggctcctcgtcacccctggagcctctagatctggtgctgctgcggcgcttggaccgagaggaggcggcggcgcaccggctgcagatcgaggcatgggacggcggccgaccccggcgcaccggcctcctgagcgtggagctgcgcgtgctggatgagaacgacaacccgccggtctttgagcaggacgagtaccgcgccgcggtgcgcgaggacgcccagccgggcgccgaggtctgtcgcgtgcgcgccaccgaccgcgacctggggcccaatggcttcgtgcgctacagcgtccgcgcccggcaagtgcctggggcgggtagcggcggcggggcactgggcgacgcggcctacttcgcggtggaggagctgagcggcgtggtgcgagtgtggagacctctggaccgcgaggcacaggcctggcaccagttggtggtggaggcccgcgatggaggcgccgagcctgaggttgccacggtgcgcgtgtccatcgccgtgctggacgtgaatgacaaccggccagcaattcacgtgctctttctcacagagggaggcgtcgcccgtgtctctgaaggcgcccgaccgggcgactacgtggctcgcgtctcggtgtctgacgcggacggtgactgggagaaggaagatgaggccacaggggagcttggtgtgggtcttggagacgggagcatctctctgtccttggaaggcggagagggagacttcgcgttgctacccggcggccccccaggggtatttttcctttgcgtggaggggcccctggacagagagagccgcgatctgtatgagttactactggtggccacggacgcggggtccccgccgctgagcacggaggagacgctgctactccgggtcgctgacctcaatgaccaaccacctctcttcagccaacagcattacaaggcctcagtgtccgaggccgcggcccctggcactgtagtcatgtgggtcagcgcctccgatgccgacgaggcaggcagtgatcacgcctggctgcgctacactgtagtccaactctcggctccctgcaatctcggctccctgcaatcaaagatggtccacaccgcagagtgtggaccatcttttgccattgattccgaaagcggtgcgatcagcactatccggactctagaccgagaggtccaggaggcggtggagctgaaagtggtggcccaggacctcggagagcccccactctctgccacctgcctggtgagcatcaccgtagatgatgtgaatgacaatgagcccatcttctggaggcaggtgtacaatgccaccattgcagagcatgccccggttggacactgctttctgcaggtgacagcctctgatgcagattcaggactctatggctttattgaatattctctttatgatggattcctgagctatgaagcacctcaggcattccggatcgaccctcatgatgggcaaatctgtgtttctcaagatatcgacagggaaagggatccagctacctatgatctcctggtggaagctaaggatgggggtgggctaagtgcccaagcctttgttcgtgtggacctggaggacgtgaatgataatcatcctgtgtttaacccatcaacctatgtgacgagcatcagtgatgagacccagccaggcaccgagatcatcaatgttcttgccactgaccaggactctgggatatatgggacagtggcttatgagcttattccaggaaacgtgtcgtccctttttaccattgactccaccacaggaattatttacttaacattacctcttagtcatttggaatctaccacactttcgttgatggtctctgctcaagacggtggtgggctcacagctgtcattaatgccgatgtcaccatacacattttccagacaactctggcacctgctgagtttgaaaggcctaagtacactttcttagtttatgaagatgtgcctgaagatagtcccattggaacagtgaaagcaagagagcccttgaactcctcagaaccaatcttttacaggatttcttctggtgatctcggcggaaagttctccattcacccgcggctgggcactattcgcacccggaagcccctggatcacgagacgcagcccgtggttgtgctcacggtgcaggcgcagctcggcagcgccccagcctgcagcagcaccgaggtcaacataacagtcatggatgtcaatgacaaccacccagcgttcctcaggacctcggatgagattagaatatcccagaccacgccccctggcacagccttgtacctcgcacgtgcggaagacagagacagtgggcggaacggactcatccggtactccatcgccagcccgcagccaggcgtctttgccatcgacagagccctgggggtgctgttcctcaacggcagcctgggcgcgggcgagcagcgggagctcacgctgactctcagggccgaggaccaaggcgtgcatcctcaggcagccctgctggtgctgacagtcgttatcgagaaacgcgaacacagcccatcctggactttcgaacatttggtctatcaagtggaagtcagtgagtctctctcaccgatgacacaaatgctgcaaacacaggcgcacccacttggcccccagcgtgcagcctcgcctcttaggtactcgctggaacccagcgtagactctgctatgtttggaatccgcccttacacgggctggatttatttgcggcgacagtttgactatgaatccacccaaacatataattttagagtgtttgcttggatccccgaggacggattcttgcaaaatgtgagcactacagtcattgttcgtgtctgggatgagaatgacaattcccccaccttcttgcatgatgtgttgtttttgaaagtcgaagagagccctgttccccaaggggtaataggcaaaattacagctattgacatggactctggaaagaatggacagctattatatttccttttgtctgatggaaaattcttcaagatgaatcctaatacaggagagttaatcaattgggtggcactggatcgtgagcaccgggggcaccatgagatgactgtgctagtgacagaccgcggctccccaccacgaaacgccaccatggcggtttacgtctcagttactgacatcaatgataacaggcccttcttcccccagtgtctccctggaaaggagttacacgtgaaggttctggaaggtcaaccagtaaatatgttggttacaactgtgtttgcaaaggatcctgatgaaggaaataatgcagaagttacatactcagtatcttcagctagacctatgcctctgaagggaaaaacagcatttgggaagcagtcgtgcaaaaaacaaacaaacaaacaaacaaaatcctgacctgaatctggtcagttctctagatctgcctcccaatttaaggaaaacataagaatagaggaacatattatgctacacgttggagatgcaacagcaaatctagatcatggaaaatgtcaggatacaagttccagtttattcaacaaataaattgcaaggacaaatagagagatgggtggcaggaatccatagattaaagaaatatgcaatatatggactttattttgatcttaatgtaaacaagaaaaataaagagtatttatgggatggttgaaaatttgaaaacttactgaatatttggtgatactgtgaaccattattaatttttaaggtataatatggtactgtgatgattgtgttaaaatatttattttttaaagatgcattttgaaatatatacagaagaaataatatgacttctggaacttacttcaaaaaaaatgggagaagcgaagtatatacatggggaatagatgaaataagattggccatgagctgatcattgttgaagctaggtgatggactcgtgaaagtttattataccattttgtccacttttttgtatgcattttccataataaaaattttt

SEQ ID NO: 54049 - DNA, 4110 bp, Artificial Sequence
  derived and/or modified sequence
atgagcccctgcggcagaaagatgggcgagggcagacagcagagaagagcccccgtgggcaagctgctgctgctgcccggcagaagagacaccccccacggcagaagcggcagcagcggcgccagaacccagagaagcctgctgtggctgctggtgcacgtgtggctgtgggccgccagcggcagcagcgcccagctgttcaacctgaccctgagcgtggacgagggcctgccccccgacaccctggtgggcgacatcagagccggcctgcccgccgcccagcagcaggagggcagcggcttcttcctgagcgaggacagcgacgacagccccctgctggacgacttccacgtgcaccccgacaccggcatcatcagaaccgccagaagactggacagagagagaagagaccactacagcttcgtggccgccaccctgctgggcgccgtggtgcaggtggagatcagagtgaacgacgtgaacgaccacagccccagattccccctggacagcctgcagctggacgtgagcgagctgagcccccccggcaccgccttcagactgcccgtggcccacgaccccgacgccggcctgttcagcacccagggctacaccctggtgcagcccagcgacctgcccaaggaccccgccggccccttcttccagctgagatacagaacccccggccccctgcccagccccctgctgcccggcagcagcagccccctggagcccctggacctggtgctgctgagaagactggacagagaggaggccgccgcccacagactgcagatcgaggcctgggacggcggcagacccagaagaaccggcctgctgagcgtggagctgagagtgctggacgagaacgacaacccccccgtgttcgagcaggacgagtacagagccgccgtgagagaggacgcccagcccggcgccgaggtgtgcagagtgagagccaccgacagagacctgggccccaacggcttcgtgagatacagcgtgagagccagacaggtgcccggcgccggcagcggcggcggcgccctgggcgacgccgcctacttcgccgtggaggagctgagcggcgtggtgagagtgtggagacccctggacagagaggcccaggcctggcaccagctggtggtggaggccagagacggcggcgccgagcccgaggtggccaccgtgagagtgagcatcgccgtgctggacgtgaacgacaacagacccgccatccacgtgctgttcctgaccgagggcggcgtggccagagtgagcgagggcgccagacccggcgactacgtggccagagtgagcgtgagcgacgccgacggcgactgggagaaggaggacgaggccaccggcgagctgggcgtgggcctgggcgacggcagcatcagcctgagcctggagggcggcgagggcgacttcgccctgctgcccggcggcccccccggcgtgttcttcctgtgcgtggagggccccctggacagagagagcagagacctgtacgagctgctgctggtggccaccgacgccggcagcccccccctgagcaccgaggagaccctgctgctgagagtggccgacctgaacgaccagccccccctgttcagccagcagcactacaaggccagcgtgagcgaggccgccgcccccggcaccgtggtgatgtgggtgagcgccagcgacgccgacgaggccggcagcgaccacgcctggctgagatacaccgtggtgcagctgagcgccccctgcaacctgggcagcctgcagagcaagatggtgcacaccgccgagtgcggccccagcttcgccatcgacagcgagagcggcgccatcagcaccatcagaaccctggacagagaggtgcaggaggccgtggagctgaaggtggtggcccaggacctgggcgagccccccctgagcgccacctgcctggtgagcatcaccgtggacgacgtgaacgacaacgagcccatcttctggagacaggtgtacaacgccaccatcgccgagcacgcccccgtgggccactgcttcctgcaggtgaccgccagcgacgccgacagcggcctgtacggcttcatcgagtacagcctgtacgacggcttcctgagctacgaggccccccaggccttcagaatcgacccccacgacggccagatctgcgtgagccaggacatcgacagagagagagaccccgccacctacgacctgctggtggaggccaaggacggcggcggcctgagcgcccaggccttcgtgagagtggacctggaggacgtgaacgacaaccaccccgtgttcaaccccagcacctacgtgaccagcatcagcgacgagacccagcccggcaccgagatcatcaacgtgctggccaccgaccaggacagcggcatctacggcaccgtggcctacgagctgatccccggcaacgtgagcagcctgttcaccatcgacagcaccaccggcatcatctacctgaccctgcccctgagccacctggagagcaccaccctgagcctgatggtgagcgcccaggacggcggcggcctgaccgccgtgatcaacgccgacgtgaccatccacatcttccagaccaccctggcccccgccgagttcgagagacccaagtacaccttcctggtgtacgaggacgtgcccgaggacagccccatcggcaccgtgaaggccagagagcccctgaacagcagcgagcccatcttctacagaatcagcagcggcgacctgggcggcaagttcagcatccaccccagactgggcaccatcagaaccagaaagcccctggaccacgagacccagcccgtggtggtgctgaccgtgcaggcccagctgggcagcgcccccgcctgcagcagcaccgaggtgaacatcaccgtgatggacgtgaacgacaaccaccccgccttcctgagaaccagcgacgagatcagaatcagccagaccaccccccccggcaccgccctgtacctggccagagccgaggacagagacagcggcagaaacggcctgatcagatacagcatcgccagcccccagcccggcgtgttcgccatcgacagagccctgggcgtgctgttcctgaacggcagcctgggcgccggcgagcagagagagctgaccctgaccctgagagccgaggaccagggcgtgcacccccaggccgccctgctggtgctgaccgtggtgatcgagaagagagagcacagccccagctggaccttcgagcacctggtgtaccaggtggaggtgagcgagagcctgagccccatgacccagatgctgcagacccaggcccaccccctgggcccccagagagccgccagccccctgagatacagcctggagcccagcgtggacagcgccatgttcggcatcagaccctacaccggctggatctacctgagaagacagttcgactacgagagcacccagacctacaacttcagagtgttcgcctggatccccgaggacggcttcctgcagaacgtgagcaccaccgtgatcgtgagagtgtgggacgagaacgacaacagccccaccttcctgcacgacgtgctgttcctgaaggtggaggagagccccgtgccccagggcgtgatcggcaagatcaccgccatcgacatggacagcggcaagaacggccagctgctgtacttcctgctgagcgacggcaagttcttcaagatgaaccccaacaccggcgagctgatcaactgggtggccctggacagagagcacagaggccaccacgagatgaccgtgctggtgaccgacagaggcagcccccccagaaacgccaccatggccgtgtacgtgagcgtgaccgacatcaacgacaacagacccttcttcccccagtgcctgcccggcaaggagctgcacgtgaaggtgctggagggccagcccgtgaacatgctggtgaccaccgtgttcgccaaggaccccgacgagggcaacaacgccgaggtgacctacagcgtgagcagcgccagacccatgcccctgaagggcaagaccgccttcggcaagcagagctgcaagaagcagaccaacaagcagaccaacaagatcctgacctag

SEQ ID NO: 54050 - DNA, 4101 bp, Artificial Sequence
  derived and/or modified sequence
atgagcccctgcggcagaaagatgggcgagggcagacagcagagaagagcccccgtgggcaagctgctgctgctgcccggcagaagagacaccccccacggcagaagcggcagcagcggcgccagaacccagagaagcctgctgtggctgctggtgcacgtgtggctgtgggccgccagcggcagcagcgcccagctgttcaacctgaccctgagcgtggacgagggcctgccccccgacaccctggtgggcgacatcagagccggcctgcccgccgcccagcagcaggagggcagcggcttcttcctgagcgaggacagcgacgacagccccctgctggacgacttccacgtgcaccccgacaccggcatcatcagaaccgccagaagactggacagagagagaagagaccactacagcttcgtggccgccaccctgctgggcgccgtggtgcaggtggagatcagagtgaacgacgtgaacgaccacagccccagattccccctggacagcctgcagctggacgtgagcgagctgagcccccccggcaccgccttcagactgcccgtggcccacgaccccgacgccggcctgttcagcacccagggctacaccctggtgcagcccagcgacctgcccaaggaccccgccggccccttcttccagctgagatacagaacccccggccccctgcccagccccctgctgcccggcagcagcagccccctggagcccctggacctggtgctgctgagaagactggacagagaggaggccgccgcccacagactgcagatcgaggcctgggacggcggcagacccagaagaaccggcctgctgagcgtggagctgagagtgctggacgagaacgacaacccccccgtgttcgagcaggacgagtacagagccgccgtgagagaggacgcccagcccggcgccgaggtgtgcagagtgagagccaccgacagagacctgggccccaacggcttcgtgagatacagcgtgagagccagacaggtgcccggcgccggcagcggcggcggcgccctgggcgacgccgcctacttcgccgtggaggagctgagcggcgtggtgagagtgtggagacccctggacagagaggcccaggcctggcaccagctggtggtggaggccagagacggcggcgccgagcccgaggtggccaccgtgagagtgagcatcgccgtgctggacgtgaacgacaacagacccgccatccacgtgctgttcctgaccgagggcggcgtggccagagtgagcgagggcgccagacccggcgactacgtggccagagtgagcgtgagcgacgccgacggcgactgggagaaggaggacgaggccaccggcgagctgggcgtgggcctgggcgacggcagcatcagcctgagcctggagggcggcgagggcgacttcgccctgctgcccggcggcccccccggcgtgttcttcctgtgcgtggagggccccctggacagagagagcagagacctgtacgagctgctgctggtggccaccgacgccggcagcccccccctgagcaccgaggagaccctgctgctgagagtggccgacctgaacgaccagccccccctgttcagccagcagcactacaaggccagcgtgagcgaggccgccgcccccggcaccgtggtgatgtgggtgagcgccagcgacgccgacgaggccggcagcgaccacgcctggctgagatacaccgtggtgcagctgagcgccccctgcaacctgggcagcctgcagagcaagatggtgcacaccgccgagtgcggccccagcttcgccatcgacagcgagagcggcgccatcagcaccatcagaaccctggacagagaggtgcaggaggccgtggagctgaaggtggtggcccaggacctgggcgagccccccctgagcgccacctgcctggtgagcatcaccgtggacgacgtgaacgacaacgagcccatcttctggagacaggtgtacaacgccaccatcgccgagcacgcccccgtgggccactgcttcctgcaggtgaccgccagcgacgccgacagcggcctgtacggcttcatcgagtacagcctgtacgacggcttcctgagctacgaggccccccaggccttcagaatcgacccccacgacggccagatctgcgtgagccaggacatcgacagagagagagaccccgccacctacgacctgctggtggaggccaaggacggcggcggcctgagcgcccaggccttcgtgagagtggacctggaggacgtgaacgacaaccaccccgtgttcaaccccagcacctacgtgaccagcatcagcgacgagacccagcccggcaccgagatcatcaacgtgctggccaccgaccaggacagcggcatctacggcaccgtggcctacgagctgatccccggcaacgtgagcagcctgttcaccatcgacagcaccaccggcatcatctacctgaccctgcccctgagccacctggagagcaccaccctgagcctgatggtgagcgcccaggacggcggcggcctgaccgccgtgatcaacgccgacgtgaccatccacatcttccagaccaccctggcccccgccgagttcgagagacccaagtacaccttcctggtgtacgaggacgtgcccgaggacagccccatcggcaccgtgaaggccagagagcccctgaacagcagcgagcccatcttctacagaatcagcagcggcgacctgggcggcaagttcagcatccaccccagactgggcaccatcagaaccagaaagcccctggaccacgagacccagcccgtggtggtgctgaccgtgcaggcccagctgggcagcgcccccgcctgcagcagcaccgaggtgaacatcaccgtgatggacgtgaacgacaaccaccccgccttcctgagaaccagcgacgagatcagaatcagccagaccaccccccccggcaccgccctgtacctggccagagccgaggacagagacagcggcagaaacggcctgatcagatacagcatcgccagcccccagcccggcgtgttcgccatcgacagagccctgggcgtgctgttcctgaacggcagcctgggcgccggcgagcagagagagctgaccctgaccctgagagccgaggaccagggcgtgcacccccaggccgccctgctggtgctgaccgtggtgatcgagaagagagagcacagccccagctggaccttcgagcacctggtgtaccaggtggaggtgagcgagagcctgagccccatgacccagatgctgcagacccaggcccaccccctgggcccccagagagccgccagccccctgagatacagcctggagcccagcgtggacagcgccatgttcggcatcagaccctacaccggctggatctacctgagaagacagttcgactacgagagcacccagacctacaacttcagagtgttcgcctggatccccgaggacggcttcctgcagaacgtgagcaccaccgtgatcgtgagagtgtgggacgagaacgacaacagccccaccttcctgcacgacgtgctgttcctgaaggtggaggagagccccgtgccccagggcgtgatcggcaagatcaccgccatcgacatggacagcggcaagaacggccagctgctgtacttcctgctgagcgacggcaagttcttcaagatgaaccccaacaccggcgagctgatcaactgggtggccctggacagagagcacagaggccaccacgagatgaccgtgctggtgaccgacagaggcagcccccccagaaacgccaccatggccgtgtacgtgagcgtgaccgacatcaacgacaacagacccttcttcccccagtgcctgcccggcaaggagctgcacgtgaaggtgctggagggccagcccgtgaacatgctggtgaccaccgtgttcgccaaggaccccgacgagggcaacaacgccgaggtgacctacagcgtgagcagcgccagacccatgcccctgaagggcaagaccgccttcggcaagcagagctgcaagaagcagaccaacaagcagaccaagagctag

SEQ ID NO: 54051 - protein, 630 aa, Artificial Sequence
  derived and/or modified sequence
MQGSSLWLSLTFRSARVLSRARFFEWQSPGLPNTAAMENGTGPYGEERPREVQETTVTEGAAKIAFPSANEVFYNPVQEFNRDLTCAVITEFARIQLGAKGIQIKVPGEKDTQKVVVDLSEQEEEKVELKESENLASGDQPRTAAVGEICEEGLHVLEGLAASGLRSIRFALEVPGLRSVVANDASTRAVDLIRRNVQLNDVAHLVQPSQADARMLMYQHQRVSERFDVIDLDPYGSPATFLDAAVQAVSEGGLLCVTCTDMAVLAGNSGETCYSKYGAMALKSRACHEMALRIVLHSLDLRANCYQRFVVPLLSISADFYVRVFVRVFTGQAKVKASARAKFSAACGPPVTPECEHCGQRHQLGGPMWAEPIHDLDFVGRVLEAVSANPGRFHTSERIRGVLSVITEELPDVPLYYTLDQLSSTIHCNTPSLLQLRSALLHADFRVSLSHACKNAVKTDAPASALWDIMRCWEKECPVKRERLSETSPAFRILSVEPRLQANFTIREDANPSSRQRGLKRFQANPEANWGPRPRARPGGKAADEAMEERRRLLQNKRKEPPEDVAQRAARLKTFPCKRFKEGTCQRGDQCCYSHSPPTPRVSADAAPDCPETSNQTPPGPGAAAGPGID

SEQ ID NO: 54052 - DNA, 1893 bp, Artificial Sequence
  derived and/or modified sequence
atgcagggaagctcactgtggctctccttaacctttaggtctgctcgtgtgctaagtagagcccggtttttcgaatggcagtctcccggcctgccaaacaccgctgccatggaaaacggaacaggtccatacggagaggaacggcctagggaagttcaggagacaacagtaactgagggcgctgcaaaaattgctttcccatctgctaacgaggtattttacaatcccgtgcaagagtttaatagggacctgacatgtgccgtgataaccgaattcgccagaattcaactcggagccaaaggaattcagattaaagtgcctggtgaaaaagacacacagaaagtcgtggtggacttatccgagcaggaagaggaaaaggtagaattaaaagagagcgagaacctggcttccggggatcagcccagaacggccgctgtgggcgaaatttgcgaagaaggattacacgttctggagggcctcgctgcctcaggcttaaggagtattcgcttcgcattagaggtacctggactaagatccgttgtggccaacgacgcctcaacaagggccgtcgatttgattaggcgtaatgtgcagttgaatgatgtcgctcatcttgtgcagccatcccaggctgatgccagaatgttaatgtaccagcatcagcgggtcagtgagcgattcgatgtcatcgatctggacccttacgggtcccccgcgacctttctggatgcggcagtgcaggctgtgtctgagggcggcttattgtgcgtgacatgtaccgacatggcggtgctggcagggaactccggtgagacatgctacagcaaatatggcgcaatggctctaaagagtcgcgcgtgtcacgagatggctctgcgcatcgtcctccactcgcttgatttacgtgctaattgttaccagcggttcgtagttcctctgctgtccatctctgcagacttctacgtccgcgtttttgttcgtgtgtttactgggcaggcaaaggtgaaggcgagcgccagagccaagttctcggctgcgtgcggtccacccgtgacaccagaatgcgagcattgcggccagcgtcatcagctgggcgggccaatgtgggctgagccgatacatgacttggactttgtaggccgggtcttggaggcagtgtctgccaaccccggaagattccatacctccgagaggattcgcggtgtactatccgtgatcacagaagaattaccagatgtccccttgtattatactttggaccagctatccagcactatccattgtaatacaccttccctgctccaactgcggtccgctctgctgcacgctgattttagagtgtccctgtcccatgcctgtaaaaatgcagtgaagaccgatgcaccagcaagcgccctgtgggacatcatgaggtgttgggagaaagaatgccccgtaaagcgggaaaggctgtctgaaacttcacccgcctttagaattctctccgtggagccaagattacaagctaacttcactatcagggaagacgctaatcctagttcccggcagcggggcttaaagcgtttccaggctaatccggaggccaactgggggcctcgtcctcgcgctcggccaggcggcaaggcagccgacgaggccatggaagagcgtcggcggttgcttcaaaataaaaggaaggaaccacccgaggacgttgctcagcgggcagcccgtttaaaaaccttcccttgcaaaaggtttaaagagggcacctgtcagaggggcgaccaatgctgctactcccactcacccccgacccctcgtgtgagtgctgatgctgccccggattgtccggaaaccagtaatcagaccccccctggccctggggctgctgccgggccggggattgactag

SEQ ID NO: 54053 - DNA, 1893 bp, Artificial Sequence
  derived and/or modified sequence
atgcagggcagcagcctgtggctgagcctgaccttccgcagcgcccgggtgctgagccgggcccgcttctttgagtggcagagccctggcctgcccaacacagctgccatggagaatggaacaggcccctacggggaggagcggccccgggaggtgcaggagaccaccgtgacagagggcgccgccaagatcgccttccccagcgccaatgaggtgttctacaaccctgtgcaggagttcaacagagacctgacctgtgctgtgatcacagaatttgcccgcatccagctgggcgccaagggcatccagatcaaggtgcctggagagaaggacacccagaaggtggtggtggacctgtctgagcaggaggaggagaaggtggagctgaaggagagcgagaacctggccagcggggaccagcccaggacagctgctgtgggggagatctgtgaggagggcctgcacgtgctggagggcctggccgccagcggcctgcggagcatccgctttgccctggaggtgcccggcctgcggtctgtggtggccaatgatgccagcaccagggctgtggacctgatcagaagaaatgtgcagctgaatgatgtggcccacctggtgcagcccagccaggctgatgccaggatgctgatgtaccagcaccagagggtgtctgaaagatttgatgtgattgacctggacccctacggcagccctgccaccttcctggatgctgctgtgcaggccgtgtctgagggcggcctgctgtgtgtgacctgcacagacatggctgtgctggccggcaacagcggggagacctgctacagcaaatatggagccatggccctgaagagccgggcctgccacgagatggccctgcgcatcgtgctgcacagcctggacctgcgggccaactgctaccagagatttgtggtgcccctgctgagcatctctgctgacttctacgtgcgggtgtttgtgcgggtcttcaccggccaggccaaggtgaaggccagcgcccgggccaagttctctgctgcctgtggcccccctgtgaccccagaatgtgagcactgcggccagaggcaccagctgggcggccccatgtgggccgagcccatccatgacctggactttgtgggccgggtgctggaggccgtgtctgccaaccctggccgcttccacaccagcgagcgcatccggggcgtgctgagcgtcatcacagaggagctgcctgatgtgcccctgtactacaccctggaccagctgagcagcaccatccactgcaacacccccagcctgctgcagctgcggagcgccctgctgcatgctgacttccgggtgtccctgagccacgcctgcaagaatgctgtgaagacagatgccccagccagcgccctgtgggacatcatgcgctgctgggagaaggagtgccctgtgaagcgggagcggctgtctgagaccagccctgccttccgcatcctgtctgtggagccccggctgcaggccaacttcaccatccgggaggatgccaaccccagcagccggcagaggggcctgaagcgcttccaggccaaccctgaggccaactggggcccccggccccgggcccggcctgggggcaaggctgctgatgaggccatggaggagcggcggcggctgctgcagaacaagaggaaggagcccccagaagatgtggcccagagagctgcccggctgaagaccttcccctgcaagcgcttcaaggagggcacctgccagagaggagaccagtgctgctacagccacagcccccccaccccccgggtgtctgcagatgctgccccagactgcccagagaccagcaaccagaccccacctggccctggagctgctgctggccctggcattgattag

SEQ ID NO: 54054 - DNA, 1893 bp, Artificial Sequence
  derived and/or modified sequence
atgcagggcagcagcctgtggctgagcctgaccttccggagcgccagagtccttagtagggcaaggttcttcgagtggcagtcccctgggctgcccaacaccgcagcgatggagaatggcactggtccctacggggaagaacggccaagagaggtccaggagacgactgtcaccgagggcgcagccaaaattgcattccctagcgcaaatgaggtgttctataatcccgttcaggagtttaatagagaccttacctgcgctgttattaccgaatttgcccgaatacagttgggagccaagggaattcagatcaaggtgcctggagaaaaggatacgcagaaagtagtggtagacctttccgaacaggaagaagaaaaagtcgaacttaaggaatctgaaaatcttgcatccggggaccaaccccggacagcagcagtgggcgaaatttgtgaggaggggcttcatgtgctcgaaggacttgctgcatctgggctcaggtctatccgctttgctctggaggtccctggcctgcgctctgtggtagccaacgacgcaagcacccgggcagttgaccttatcaggaggaatgtgcagctgaatgacgtggcccatttggtgcagccatctcaggccgatgcacgcatgctgatgtatcaacatcagcgggtgtctgagcgctttgacgtgatcgatctggatccgtacgggtcaccagcaacctttttagatgctgcagtacaagcggttagtgagggaggtctgctgtgcgtgacctgcactgacatggcagtgctggctggtaacagcggcgaaacgtgctatagcaagtatggagctatggccctcaagtctcgcgcctgtcacgaaatggcgctgaggattgttctgcatagtctggaccttagagctaactgttatcagcgcttcgtcgtgccactgctgagcatcagcgccgatttttacgtgagagtgtttgtccgagtgtttacgggacaagcgaaggtcaaggcgtctgctcgtgcaaaattctctgccgcctgtggacctcccgtgacaccggagtgcgagcattgtggtcagcgacatcaactggggggccctatgtgggccgagccgatccacgatttagatttcgttggccgtgtgctggaggctgtttctgctaatccaggcagattccacacatctgaacggatacggggggtcctgagtgtaattacagaggagctgccagacgtgcctctgtactacactttggatcagctcagcagcactatccattgcaacactcccagcctgctgcagttgcgaagtgccctgctccacgccgattttagggtatctctgtcgcatgcctgtaagaacgccgtgaagactgatgcaccagcgtcagctctatgggacatcatgcgatgttgggaaaaagaatgtccagttaagagggagcggctgtctgaaacgtcccccgccttcagaattctgtccgtagaacccaggctgcaagcgaactttacaatacgggaagatgccaatccgtcgtctaggcagagagggcttaaacgcttccaggctaacccggaggccaactggggacctcggccacgtgctagaccaggcggcaaagctgccgacgaggccatggaggaaaggcgccggctgctacagaacaaacgcaaggagcccccagaagacgtagcccaacgtgccgcgagactgaaaacatttccttgcaaacggttcaaagaaggaacctgccaaaggggcgatcagtgctgttattcacactctcccccgacaccgcgcgtgtcggcggacgccgcccctgattgcccagagacaagcaaccagacaccacctggccccggagctgctgctggccccggtatcgattag

SEQ ID NO: 54055 - DNA, 1893 bp, Artificial Sequence
  derived and/or modified sequence
atgcaagggtcttccctgtggctatcgctgacattccgttcagctcgggttctcagtcgggctcgatttttcgagtggcagagtcctggcttgcccaacacagccgctatggaaaatggcactggaccatatggcgaggaacgccctcgagaagttcaggagacaacagtgaccgagggtgccgcaaagattgccttcccatccgccaatgaggtgttctacaaccctgtgcaggaattcaaccgggacctgacatgtgctgtgatcaccgaattcgccaggattcagctcggagcaaagggtattcaaatcaaggttcccggagaaaaggatacacagaaagtcgttgtagatctgtccgagcaggaagaggagaaagtggagctaaaagagagcgagaatctggcgtcaggagaccaacccaggacagctgccgtcggggaaatctgcgaggagggactgcacgttttagagggcctggccgcaagcggcttgcgatctattcgatttgctctggaagtccccggactacggtcagtggtcgctaatgatgcctctactagggcggtcgatttgattaggcgaaatgtacaactcaacgacgtggcccaccttgtgcaaccttcccaagccgacgcgaggatgttgatgtaccaacatcagcgggtgtcagaacggtttgacgtcatcgacctggacccatacgggagtcctgcaacatttttggacgccgcagtacaagccgtctcggaaggaggccttctgtgtgtgacatgtacagacatggctgttttggccggtaattccggagagacatgttacagcaagtacggagcaatggccctcaaatcccgtgcctgccacgaaatggcgctacgaatcgtgctccactccctcgacctaagggcgaattgctatcagcgttttgttgttcctttgctgtccatctctgccgatttctatgtgagagtgtttgtgagagtgttcactggccaggctaaggtcaaggcttccgctcgtgcgaagttttccgctgcttgcggtccgccagtgacacctgagtgcgagcactgcggacagcgccaccaactgggaggtcccatgtgggccgaacccattcacgaccttgactttgtagggcgtgtgctggaggccgtatctgccaaccccggtcggtttcacaccagtgagagaatacgtggggtgcttagtgttattacggaggagctgcctgatgtgcccctttactatacattagatcagctgtcctcaacaatccattgcaacaccccttctctgttacaactacggtcagcactgctgcatgcagattttagggtatctctgtcacatgcgtgcaaaaacgccgttaaaactgacgcacccgcatcagcgctctgggatataatgcgctgttgggaaaaagaatgtccggtcaaacgcgaacggctgagtgagaccagtccggcattcagaatattatcagttgaacccagacttcaggctaactttacaatcagagaggacgccaatccaagctcccgtcaacggggactgaagagatttcaggctaaccctgaggcaaactgggggccacgtccgcgagcaagacctggaggtaaggccgctgacgaggctatggaggagcgtagaagactactacagaataagaggaaggaaccaccagaagatgtagctcagcgggctgccagactaaaaaccttcccctgtaagcggttcaaggagggaacctgccaacgcggtgaccaatgttgctactctcattccccacctacacctcgggtgtcggcagatgccgctcccgactgcccagagacttcaaaccaaacacccccaggcccaggagccgctgcgggacccggtattgactag

SEQ ID NO: 54056 - DNA, 2176 bp, Artificial Sequence
  derived and/or modified sequence
aggacgggctaggcagcgcggggagggattcggactcggggcgggcctgcacgagggcatcggctccacagggaccagtcatccccaaaacgaggggatatcagcttaccgaggccgcaggttttcctagtccctacctcatagatatgtaggacatccccgggcccggaatgcggctctctgaccctctctgtgccctcccccgccccccgaaccaggcttggcgggcggaggcgccagcggatgtctcatgcaaggatcgtctctgtggctaagcctcactttccgctccgcccgggtgctctctagagcccggtttttcgagtggcagtctccagggctgccgaatacagcagcgatggagaacggcaccgggccctacggagaagaacgtccacgtgaagtccaggagacgacagtcaccgagggggctgccaaaatcgcctttcccagtgccaacgaggtcttttataacccggtgcaggaattcaatcgggacctgacatgtgctgtgatcaccgagtttgctcgcattcagcttggggccaaaggaatccagatcaaggttccaggagagaaggacacgcaaaaagtggtcgtggacttgtcagagcaagaggaggaaaaggttgaactgaaagagagtgaaaacctggcctcaggagaccaacctcgcacagcggccgtgggggagatctgtgaggaaggcctgcatgtgctggaaggcctggcagcttcaggcctacgttccattcgatttgccctagaggtgcctgggctcagatctgtggttgcaaacgatgcctccacccgggctgtggatctcatacgccggaatgtccagctcaatgacgtggcccacctggtacagccgagccaagcagatgcccggatgctgatgtaccagcaccagagggtgtcggagaggtttgacgtcatcgatctggacccctatggcagcccagccaccttcctggatgcagctgtgcaggctgtgagtgaaggagggttgctgtgtgtgacctgcacagacatggcggtgttggcggggaacagcggggagacgtgctacagcaagtacggggccatggccctcaagagccgggcctgccacgagatggccctgagaatcgtcctgcacagcctggacctccgcgccaactgctaccagcgcttcgtggtgccgctgctcagcatcagcgctgacttctacgtgcgtgtttttgtccgtgtcttcaccggccaggccaaggtcaaggcctcagccagggccaagttctctgcagcctgtggtccccctgtgacccccgagtgtgaacactgtgggcaacgacaccagcttggtggccccatgtgggcagagcccatccatgacctggattttgtgggccgtgtcctggaggctgtgagcgctaaccccggccgcttccacacctcggagcggatccgaggggtcctgagcgtcatcactgaggagctcccggacgtgcctctgtactacaccctggaccagctgagcagcaccatccactgcaacacaccaagcctcctgcagttgcggtcggccctcctccacgctgacttccgggtctcactctcccacgcctgtaagaacgctgtgaagacggatgcccctgcctctgccctctgggacatcatgcgttgctgggagaaggaatgtccggtgaaacgggagcgactatcagagactagcccagcgttccgcattctcagtgtggagcccaggctgcaggccaacttcaccatccgggaagatgccaaccccagctcccgacagcgaggactcaagcgcttccaggctaacccggaggccaactggggtccccggcctcgtgcccggccagggggcaaggcggccgacgaagctatggaggagagacgcaggctgcttcagaacaagcggaaggagccgccggaagatgtggcccagcgggctgcccggctcaagacatttccttgcaagaggtttaaggagggcacctgtcaacgcggggaccagtgctgctactcccacagccccccgacacccagggtttctgctgatgctgcccctgactgtccagagacctccaaccagaccccccctggacctggggctgccgctgggccaggcatagactgaaccaataaagagatgtcacgtcaccttctcccg

SEQ ID NO: 54057 - DNA, 1893 bp, Artificial Sequence
  derived and/or modified sequence
atgcagggcagcagcctgtggctgagcctgaccttcagaagcgccagagtgctgagcagagccagattcttcgagtggcagagccccggcctgcccaacaccgccgccatggagaacggcaccggcccctacggcgaggagagacccagagaggtgcaggagaccaccgtgaccgagggcgccgccaagatcgccttccccagcgccaacgaggtgttctacaaccccgtgcaggagttcaacagagacctgacctgcgccgtgatcaccgagttcgccagaatccagctgggcgccaagggcatccagatcaaggtgcccggcgagaaggacacccagaaggtggtggtggacctgagcgagcaggaggaggagaaggtggagctgaaggagagcgagaacctggccagcggcgaccagcccagaaccgccgccgtgggcgagatctgcgaggagggcctgcacgtgctggagggcctggccgccagcggcctgagaagcatcagattcgccctggaggtgcccggcctgagaagcgtggtggccaacgacgccagcaccagagccgtggacctgatcagaagaaacgtgcagctgaacgacgtggcccacctggtgcagcccagccaggccgacgccagaatgctgatgtaccagcaccagagagtgagcgagagattcgacgtgatcgacctggacccctacggcagccccgccaccttcctggacgccgccgtgcaggccgtgagcgagggcggcctgctgtgcgtgacctgcaccgacatggccgtgctggccggcaacagcggcgagacctgctacagcaagtacggcgccatggccctgaagagcagagcctgccacgagatggccctgagaatcgtgctgcacagcctggacctgagagccaactgctaccagagattcgtggtgcccctgctgagcatcagcgccgacttctacgtgagagtgttcgtgagagtgttcaccggccaggccaaggtgaaggccagcgccagagccaagttcagcgccgcctgcggcccccccgtgacccccgagtgcgagcactgcggccagagacaccagctgggcggccccatgtgggccgagcccatccacgacctggacttcgtgggcagagtgctggaggccgtgagcgccaaccccggcagattccacaccagcgagagaatcagaggcgtgctgagcgtgatcaccgaggagctgcccgacgtgcccctgtactacaccctggaccagctgagcagcaccatccactgcaacacccccagcctgctgcagctgagaagcgccctgctgcacgccgacttcagagtgagcctgagccacgcctgcaagaacgccgtgaagaccgacgcccccgccagcgccctgtgggacatcatgagatgctgggagaaggagtgccccgtgaagagagagagactgagcgagaccagccccgccttcagaatcctgagcgtggagcccagactgcaggccaacttcaccatcagagaggacgccaaccccagcagcagacagagaggcctgaagagattccaggccaaccccgaggccaactggggccccagacccagagccagacccggcggcaaggccgccgacgaggccatggaggagagaagaagactgctgcagaacaagagaaaggagccccccgaggacgtggcccagagagccgccagactgaagaccttcccctgcaagagattcaaggagggcacctgccagagaggcgaccagtgctgctacagccacagcccccccacccccagagtgagcgccgacgccgcccccgactgccccgagaccagcaaccagaccccccccggccccggcgccgccgccggccccggcatcgactag

SEQ ID NO: 54058 - protein, 503 aa, Artificial Sequence
  derived and/or modified sequence
MWLKVGGLLRGTGGQLGQTVGWPCGALGPGPHRWGPCGGSWAQKFYQDGPGRGLGEEDIRRAREARPRKTPRPQLSDRSRERKVPASRISRLANFGGLAVGLGLGVLAEMAKKSMPGGRLQSDNSFISPQLQHIFERVRQSADFMPRWQMLRVLEEELGRDWQAKVASLEEVPFAAASIGQVHQGLLRDGTEVAVKIQYPGIAQSIQSDVQNLLAVLKMSAALPAGLFAEQSLQALQQELAWECDYRREAACAQNFRQLLANDPFFRVPAVVKELCTTRVLGMELAGGVPLDQCQGLSQDLRNQICFQLLTLCLRELFEFRFMQTDPNWANFLYDASSHQVTLLDFGASREFGTEFTDHYIEVVKAAADGDRDCVLQKSRDLKFLTGFETKAFSDAHVEAVMILGEPFATQGPYDFGSGETARRIQDLIPVLLRHRLCPPPEETYALHRKLAGAFLACAHLRAHIACRDLFQDTYHRYWASRQPDAATAGSLPTKGDSWVDPS

SEQ ID NO: 54059 - DNA, 1512 bp, Artificial Sequence
  derived and/or modified sequence
atgtggctgaaggtgggcggcctgctgagaggcaccggcggccagctgggccagaccgtgggctggccctgcggcgccctgggccccggcccccacagatggggcccctgcggcggcagctgggcccagaagttctaccaggacggccccggcagaggcctgggcgaggaggacatcagaagagccagagaggccagacccagaaagacccccagaccccagctgagcgacagaagcagagagagaaaggtgcccgccagcagaatcagcagactggccaacttcggcggcctggccgtgggcctgggcctgggcgtgctggccgagatggccaagaagagcatgcccggcggcagactgcagagcgacaacagcttcatcagcccccagctgcagcacatcttcgagagagtgagacagagcgccgacttcatgcccagatggcagatgctgagagtgctggaggaggagctgggcagagactggcaggccaaggtggccagcctggaggaggtgcccttcgccgccgccagcatcggccaggtgcaccagggcctgctgagagacggcaccgaggtggccgtgaagatccagtaccccggcatcgcccagagcatccagagcgacgtgcagaacctgctggccgtgctgaagatgagcgccgccctgcccgccggcctgttcgccgagcagagcctgcaggccctgcagcaggagctggcctgggagtgcgactacagaagagaggccgcctgcgcccagaacttcagacagctgctggccaacgaccccttcttcagagtgcccgccgtggtgaaggagctgtgcaccaccagagtgctgggcatggagctggccggcggcgtgcccctggaccagtgccagggcctgagccaggacctgagaaaccagatctgcttccagctgctgaccctgtgcctgagagagctgttcgagttcagattcatgcagaccgaccccaactgggccaacttcctgtacgacgccagcagccaccaggtgaccctgctggacttcggcgccagcagagagttcggcaccgagttcaccgaccactacatcgaggtggtgaaggccgccgccgacggcgacagagactgcgtgctgcagaagagcagagacctgaagttcctgaccggcttcgagaccaaggccttcagcgacgcccacgtggaggccgtgatgatcctgggcgagcccttcgccacccagggcccctacgacttcggcagcggcgagaccgccagaagaatccaggacctgatccccgtgctgctgagacacagactgtgccccccccccgaggagacctacgccctgcacagaaagctggccggcgccttcctggcctgcgcccacctgagagcccacatcgcctgcagagacctgttccaggacacctaccacagatactgggccagcagacagcccgacgccgccaccgccggcagcctgcccaccaagggcgacagctgggtggaccccagctag

SEQ ID NO: 54060 - DNA, 2042 bp, Artificial Sequence
  derived and/or modified sequence
ctcggaggctgagagcagtgggcaatgtggctgaaggtggggggcctacttcgggggaccggtggacagctgggccagactgttggttggccttgtggggccctggggcctgggccccaccgctggggaccatgtggaggttcttgggcccaaaagttttaccaggatgggcctgggagaggcctgggtgaggaggacattcgcagggcacgggaggcccgtcccaggaagacaccccggccccagctgagtgaccgctctcgagaacgcaaggtgcctgcctcccgcatcagccgcttggccaactttgggggactggctgtgggcttggggctaggagtactggccgagatggctaagaagtccatgccaggaggtcgtctgcagtcagacaacagcttcatcagccctcagctgcagcacatctttgagcgggtccgccagagcgccgacttcatgccccgctggcagatgctgagagttcttgaagaggagctcggcagggactggcaggccaaggtggcctccttggaggaggtgccctttgccgctgcctcaattgggcaggtgcaccagggcctgctgagggacgggacggaggtggccgtgaagatccagtaccccggcatagcccagagcattcagagcgatgtccagaacctgctggcggtactcaagatgagcgcggccctgcccgcgggcctgtttgccgagcagagcctgcaggccttgcagcaggagctggcttgggagtgtgactaccgtcgtgaggcggcttgtgcccagaatttcaggcagctgctggcaaatgaccccttcttccgggtcccagccgtggttaaggagctgtgcacgacacgggtgctgggcatggagctggctggaggggtccccctggaccagtgccagggcctaagccaggacctgcggaaccagatttgcttccagctcctgacgctgtgtctgcgggagctgtttgagttccgattcatgcagactgaccccaactgggccaacttcctgtatgatgcctccagccaccaggtgaccctgctggactttggtgcaagccgggagtttgggacagagttcacagaccattacatcgaggtggtgaaggctgcagctgatggagacagagactgtgtcctgcagaagtccagggacctcaaattcctcacaggctttgaaaccaaggcattctccgacgcccacgtggaggcagtgatgatcctgggggagcctttcgccacccagggcccttatgactttgggtcgggggaaacggcccgccgcatacaggacctcatcccggtgctgctgcggcaccggctgtgtcccccacccgaggagacctatgccctgcaccgcaagctggcaggggctttcctggcctgtgcccacctccgagcccacatcgcctgcagggacctcttccaggacacctaccaccgctactgggccagtcgccagccagacgcagccactgccggcagcctccccaccaaaggggactcctgggtggatccctcatgacagcctccatgggggattcagtccccagagcaggccgtaccctgctgtagtgcctcttatcccttccccgtctgccctgggtcagaggagcccccttgggcttcccagtcttgcctggctctcctccttggcccaggagctcaggatccctggggctggggaactcccaacttcgtgccctagatcctgcacctccccactcgaaagtgggtatccgaaaactaagccagggaagcggttaacttatctttgccaacatttgagggagccttgggccgctgcatgtcgttatgcagatcagactcatcagggggagccctcacctctgcctcaagcctcccgtggaaggcgagatggtcctggaggcagtcctcacctctgcctccctcgctcctccaacagctgccttctcccgggttccagcctctcagtgtgttggagaggtaggggtgcggggtgggggggagctgaatcttcaatcggaataaaagcagccctccccttcc

SEQ ID NO: 54061 - DNA, 2320 bp, Artificial Sequence
  derived and/or modified sequence
tctgagcatccgaagcgcggccaggtatgcatctagggcaccggggtcctggtggcgcgccagtgggccccctccctccacccctgtgactaaaccaccctccctacacggttgaatgacaagttcaaccttccctaaaacccccggtgacgagtccagccgcgcgcccattcttcacgcaggggcgggacggactttcaaagacttggagttcccacgggtgtgggttcgagaccttcctctgccagttcccagctccgctaccctgagcaaatgacttacgctccattggattttccgcaatgtggctgaaggtggggggcctacttcgggggaccggtggacagctgggccagactgttggttggccttgtggggccctggggcctgggccccaccgctggggaccatgtggaggttcttgggcccaaaagttttaccaggatgggcctgggagaggcctgggtgaggaggacattcgcagggcacgggaggcccgtcccaggaagacaccccggccccagctgagtgaccgctctcgagaacgcaaggtgcctgcctcccgcatcagccgcttggccaactttgggggactggctgtgggcttggggctaggagtactggccgagatggctaagaagtccatgccaggaggtcgtctgcagtcagacaacagcttcatcagccctcagctgcagcacatctttgagcgggtccgccagagcgccgacttcatgccccgctggcagatgctgagagttcttgaagaggagctcggcagggactggcaggccaaggtggcctccttggaggaggtgccctttgccgctgcctcaattgggcaggtgcaccagggcctgctgagggacgggacggaggtggccgtgaagatccagtaccccggcatagcccagagcattcagagcgatgtccagaacctgctggcggtactcaagatgagcgcggccctgcccgcgggcctgtttgccgagcagagcctgcaggccttgcagcaggagctggcttgggagtgtgactaccgtcgtgaggcggcttgtgcccagaatttcaggcagctgctggcaaatgaccccttcttccgggtcccagccgtggttaaggagctgtgcacgacacgggtgctgggcatggagctggctggaggggtccccctggaccagtgccagggcctaagccaggacctgcggaaccagatttgcttccagctcctgacgctgtgtctgcgggagctgtttgagttccgattcatgcagactgaccccaactgggccaacttcctgtatgatgcctccagccaccaggtgaccctgctggactttggtgcaagccgggagtttgggacagagttcacagaccattacatcgaggtggtgaaggctgcagctgatggagacagagactgtgtcctgcagaagtccagggacctcaaattcctcacaggctttgaaaccaaggcattctccgacgcccacgtggaggcagtgatgatcctgggggagcctttcgccacccagggcccttatgactttgggtcgggggaaacggcccgccgcatacaggacctcatcccggtgctgctgcggcaccggctgtgtcccccacccgaggagacctatgccctgcaccgcaagctggcaggggctttcctggcctgtgcccacctccgagcccacatcgcctgcagggacctcttccaggacacctaccaccgctactgggccagtcgccagccagacgcagccactgccggcagcctccccaccaaaggggactcctgggtggatccctcatgacagcctccatgggggattcagtccccagagcaggccgtaccctgctgtagtgcctcttatcccttccccgtctgccctgggtcagaggagcccccttgggcttcccagtcttgcctggctctcctccttggcccaggagctcaggatccctggggctggggaactcccaacttcgtgccctagatcctgcacctccccactcgaaagtgggtatccgaaaactaagccagggaagcggttaacttatctttgccaacatttgagggagccttgggccgctgcatgtcgttatgcagatcagactcatcagggggagccctcacctctgcctcaagcctcccgtggaaggcgagatggtcctggaggcagtcctcacctctgcctccctcgctcctccaacagctgccttctcccgggttccagcctctcagtgtgttggagaggtaggggtgcggggtgggggggagctgaatcttcaatcggaataaaagcagccctccccttcc

SEQ ID NO: 54062 - DNA, 1512 bp, Artificial Sequence
  derived and/or modified sequence
atgtggcttaaagtaggagggctgcttagggggaccgggggccagctggggcagaccgtgggttggccatgtggcgctctgggcccaggaccacatagatggggtccttgcggcgggagctgggcccaaaagttctaccaggacggcccaggtaggggattgggcgaagaagacatccgtagggctcgcgaagcgcgccctcggaagacgccgcggccacaactcagtgaccgtagccgtgaacgaaaggtgcccgcttctcgcatttctagactggcaaatttcggcggactggctgtgggcctcggactgggcgtgctggccgaaatggcgaagaaatctatgcccggaggaagactgcagtcagacaactcattcataagtccccagttgcagcatatcttcgagcgcgtcaggcagagcgccgatttcatgccacggtggcagatgctacgggtgctggaagaagagctcggcagggattggcaagcaaaggtagcatcactcgaagaagtgccattcgcggctgccagtattggacaagtgcaccaagggctgttaagagacggcaccgaggttgcagtgaaaatccagtaccctgggatagctcagtccatacaatccgatgtacagaacctcctcgcagtgttgaagatgtccgcggccctgcccgctggcctttttgctgaacagagcctccaagccctgcaacaggaactggcttgggagtgtgattaccggcgggaggctgcttgtgcacagaactttcgtcagctgctggctaacgatcccttctttagagttcctgcggttgttaaggagctttgcactacaagggtgctgggaatggagctggctggtggggtgccacttgatcagtgtcaagggctttctcaggatctccggaatcagatttgctttcagctcttgactctgtgtcttagggaactgtttgagttccgatttatgcagaccgaccctaattgggcaaactttctatatgatgcttcgtcgcatcaggtgactctgctggatttcggagcaagccgcgagttcggcactgagttcaccgatcattacatcgaggttgttaaggctgcagcagatggtgaccgggactgcgttctacaaaaaagcagggatcttaagttcctaactgggttcgagaccaaggcctttagcgacgcacacgtggaggcagtcatgatcctgggcgagccgttcgccacacaaggaccgtacgactttggaagcggggaaaccgcacggcgaatccaagacttgattcccgttctcctccgtcatcgcctatgtcctccgcccgaggagacctacgcccttcaccgcaaactggcaggcgcctttctggcatgcgctcacttgagggctcacattgcctgtcgtgaccttttccaagacacttaccatagatactgggccagcaggcagccggacgcagccacggccggctctttgccaactaaaggtgatagctgggtggatccgtcgtag

SEQ ID NO: 54063 - DNA, 1512 bp, Artificial Sequence
  derived and/or modified sequence
atgtggctcaaggtgggcggtctgttgcgcggcacgggcggccaactaggacagacagttgggtggccctgcggggccttaggtcccggtccccaccgctggggaccatgcggaggctcttgggctcagaagttctaccaggatggcccgggtagaggtctcggtgaggaggacattagacgggccagggaggctaggcctcgcaaaaccccccggccccagttgtcggaccgctctagagaaagaaaagtgcccgctagccgcatatctcggctcgccaatttcggggggctagctgtcggattaggactgggggtacttgctgagatggccaaaaagtccatgccgggaggtcgcctgcaatccgataatagtttcatttctccacagttacagcatattttcgagagagtccgccagagtgccgacttcatgcccaggtggcaaatgctgcgagttctcgaggaagaactgggtcgggactggcaagccaaggtcgcatccttagaggaggtcccttttgcggccgcttccatcggacaagttcaccagggacttctgagggacggcacagaagtagcggttaagatacagtacccgggaattgcgcaaagcatccaaagcgacgttcagaatctcctcgccgtgctgaaaatgtcagccgcccttcctgcgggcttattcgccgaacaaagtttacaggctctgcaacaggagttggcttgggagtgcgattatagacgcgaggctgcttgcgcccagaactttcggcagctgttagctaacgatccattttttcgggtgcctgcggtcgtgaaagaactctgtacgactagggtcctcggcatggagctcgcgggaggcgtccctcttgaccagtgccagggtctatctcaagacctaaggaaccagatctgctttcagttgctgacactgtgcctgcgcgagctctttgaattccggttcatgcaaaccgatcccaattgggcgaattttctgtacgacgcaagttcacatcaggtcactctacttgatttcggcgccagccgggagttcggcaccgaattcacagaccactacattgaagtcgtcaaggctgccgctgatggggatagggactgcgttcttcagaaatcacgcgatctgaagtttttgaccgggtttgagacaaaagcttttagcgacgcccacgtcgaggcagtgatgatcctaggggaacctttcgccacacaaggtccatatgactttggttccggtgagaccgcaaggcggatccaggaccttatccctgtgttgctgagacacaggttgtgcccaccgccagaggagacatacgctctacatcgcaaactggccggggctttcctagcctgtgcccaccttagggctcacattgcatgtagggacctttttcaggatacatatcaccgctactgggcatcaaggcagccagatgcggcgaccgcagggtcattacctactaagggtgactcatgggttgacccctcttag

SEQ ID NO: 54064 - DNA, 1512 bp, Artificial Sequence
  derived and/or modified sequence
atgtggctgaaggtgggcggcctgctgcggggcaccggcggccagctgggccagacagtgggctggccctgtggggccctgggccctggcccccaccgctggggcccctgtggcggctcctgggcccagaagttctaccaggacggccctggccggggcctgggggaggaggacatccggcgggcccgggaggcccggcccaggaagaccccccggccccagctgagtgacaggagccgggagaggaaggtgcctgccagccgcatcagccggctggccaactttggaggcctggccgtgggcctgggcctgggcgtgctggccgagatggccaagaagtccatgcctgggggccgcctgcagagcgacaacagcttcatcagcccccagctgcagcacatctttgagcgggtgcggcagagcgctgacttcatgccccgctggcagatgctgcgggtgctggaggaggagctgggccgggactggcaggccaaggtggccagcctggaggaggtgccctttgctgctgccagcatcggccaggtgcaccagggcctgctgagagatggaacagaggtggccgtgaagatccagtacccaggcatcgcccagagcatccagagtgatgtgcagaacctgctggccgtgctgaagatgtctgctgccctgcctgctggcctgtttgctgagcagagcctgcaggccctgcagcaggagctggcctgggagtgtgactacagaagagaggccgcctgtgcccagaacttccggcagctgctggccaatgaccccttcttccgggtgcctgctgtggtgaaggagctgtgcaccaccagggtgctgggcatggagctggccggcggcgtgcccctggaccagtgccagggcctgagccaggacctgaggaaccagatctgcttccagctgctgaccctgtgcctgcgggagctgtttgagttccgcttcatgcagacagaccccaactgggccaacttcctgtatgatgccagcagccaccaggtgaccctgctggactttggagccagccgggagtttggaacagagttcacagaccactacatcgaggtggtgaaggctgctgctgatggagaccgggactgtgtgctgcagaagagccgggacctgaagttcctgaccggctttgagaccaaggccttcagtgatgcccacgtggaggccgtgatgatcctgggggagccctttgccacccagggcccctatgactttggcagcggggagacagcccggcgcatccaggacctgatccctgtgctgctgcggcaccggctgtgccccccacctgaggagacctacgccctgcacaggaagctggccggggccttcctggcctgtgcccacctgcgggcccacatcgcctgccgggacctcttccaggacacctaccaccgctactgggccagccggcagccagatgctgccacagctggcagcctgcccaccaagggggacagctgggtggaccccagctag

SEQ ID NO: 54065 - DNA, 1512 bp, Artificial Sequence
  derived and/or modified sequence
atgtggctgaaggtgggcggcctgctgcggggcaccggcggccagcttgggcaaactgtcgggtggccatgcggggcattgggaccagggccccaccgctggggaccgtgcggggggagctgggcacagaagttttaccaggatggacctgggaggggcctaggcgaggaagatataaggagagcccgtgaagcccggccccgcaagacaccccgcccgcagttaagtgatagatctagggaacggaaagtgcccgcctccaggatttctcggctagcgaactttggagggcttgcagtgggactgggactgggcgtgctcgctgaaatggcaaagaagagcatgcctggaggcaggctccagtcagataattcctttatcagccctcaacttcaacacatttttgagcgtgtacgacaaagcgcggattttatgccaagatggcagatgcttcgcgtccttgaggaggagctgggacgggactggcaagctaaggttgcctcacttgaggaggtgccattcgccgctgccagcatcggtcaagtgcatcagggactgctcagggatggaacagaggtcgccgtcaagatccagtatcctggtattgctcagagcatccagtccgacgtgcagaacctcctggccgttcttaagatgtctgccgcattgccagccggcttgttcgccgagcagagcttgcaggctctccagcaggaactggcttgggagtgcgattatcgccgtgaagccgcctgtgcacagaactttcgccagctgcttgccaacgaccctttttttcgggttccagctgtggtgaaggaactctgtacgaccagagttctcggcatggagctcgcaggtggagttcctctggaccaatgtcaggggcttagccaggacttaaggaaccaaatatgcttccagctactgactctgtgtctgagagagctcttcgagttcaggtttatgcagacggacccgaactgggctaatttcctttatgacgcttcttctcaccaggtcacccttttggactttggcgccagtcgcgagttcggaactgaatttacagaccactacatcgaagtggtgaaggctgccgctgatggggatcgggactgtgtgcttcagaagagccgggacctcaagtttttaacggggttcgaaaccaaggctttcagtgacgcacatgtcgaggccgtgatgattctcggggaaccttttgctacacaaggcccctacgactttggctctggcgagaccgcacggaggatccaggatctgattcctgtgctgttaaggcataggctatgtccaccaccggaggagacatacgcacttcacaggaagctggcaggggcatttcttgcctgcgcccacttgcgcgctcatatcgcatgccgggacctctttcaagacacatatcatagatattgggcatccagacagcccgacgccgccaccgcagggagtctgcctactaagggtgatagctgggttgacccctcctag

SEQ ID NO: 54066 - DNA, 1512 bp, Artificial Sequence
  derived and/or modified sequence
atgtggctgaaggtgggcggcctgctgcggggcaccggcggccagttaggacagaccgttggttggccctgcggagccctcggtcccggcccccataggtgggggccatgtggaggttcgtgggctcaaaagttctatcaggatggtccgggacgcggcttgggtgaagaagacattaggcgggctagagaggcccgtccccggaagacccctagaccccagctctccgatcgcagtagggagaggaaggttccagccagccgtatcagccgcctggctaattttgggggcctagctgtgggattgggactgggggtcctggcggaaatggccaagaagtccatgcctggcggtcggctgcagagtgataactcttttattagtcctcagctgcagcatattttcgaaagggtaaggcagagcgcggatttcatgccccggtggcagatgctgcgagtccttgaagaggaactcggacgtgattggcaggccaaggtcgccagcctggaagaagtgccattcgctgcagccagtattgggcaggtacatcaagggctgctgagagatgggacggaagtggcggtgaagattcagtatcccggcatcgcccagtctattcaaagtgacgttcagaacctgctggcagtgctcaaaatgtcagctgccctccctgccggccttttcgccgaacagtccttacaagcccttcagcaggagctcgcctgggaatgtgattacagacgggaggcagcgtgtgcgcagaactttcggcagctccttgccaatgatccattctttcgggtacctgccgttgtgaaggagctttgtacaacaagggtcctcgggatggagctggctgggggggtccccttagaccagtgtcagggcctgtctcaagacctgaggaaccaaatttgttttcagctattgaccttgtgtttacgcgagctctttgagttccggtttatgcagaccgatcctaattgggcgaactttctgtatgacgcgtcatcccaccaggtcactctgctggacttcggagcaagtcgggaattcggcactgagtttaccgatcattatattgaagtcgtaaaggccgctgccgatggcgacagggattgtgtcctacaaaaatcacgcgacctgaagttcttaaccggctttgagaccaaagcttttagcgatgcccacgtcgaagcagtgatgattctcggggaaccgttcgccactcagggaccatatgatttcggatccggtgaaacagcccggcgtattcaagacctgatccccgtgcttcttcggcataggctgtgcccccctccggaggaaacatacgcactacataggaagctggcaggcgcctttcttgcttgcgcacatctcagagcccacattgcctgcagagatttgtttcaggacacttatcaccgctattgggcctctcgacagcccgacgccgctaccgccggatcgctgcccaccaagggggatagctgggtggatcctagttag

SEQ ID NO: 54067 - DNA, 1512 bp, Artificial Sequence
  derived and/or modified sequence
atgtggctgaaggtcggcggactgcttaggggcactgggggacagttgggccagacagtcgggtggccttgcggggctctgggaccgggaccacatcggtggggaccatgcggtggaagttgggcccagaagttctaccaggatggaccgggtagaggcttgggggaggaggatatccgcagagccagagaagcgaggccccgaaaaacgcctcggcctcagttgtccgatcgctcacgggagcgcaaggtgccagcttcaagaatttctagattagctaactttggcggactcgcagtcggcctcggcttaggagttcttgccgagatggcgaagaaatcaatgcctggaggtaggctccagagcgataattcctttatctccccccagctgcagcatatctttgagcgcgtccgtcagtccgccgactttatgcctcgctggcagatgctgcgcgtccttgaggaagaactcggtagggattggcaggcaaaggtggcatccctggaagaggtcccatttgcggctgcttcgataggccaggtccaccaggggttactacgcgacggaactgaggtggccgtgaagatccagtatcccggaattgcccagtctattcagagtgatgttcagaacctgctggccgtgctgaaaatgtctgctgcgcttccggcagggctattcgccgagcagtctctgcaagcgttgcagcaagagctagcctgggagtgtgattaccgccgagaagcagcatgcgcacaaaattttaggcagctgctggctaatgatccattctttcgggttcctgcggtggtgaaggagctctgtactacacgggtcctgggcatggaactcgccggtggcgtgcctctcgaccagtgccaaggactgagtcaggacttgcgcaatcagatttgtttccagctccttacactttgcctgcgggagctgtttgaatttagattcatgcagaccgaccccaattgggccaactttctttacgatgcctcttcacaccaagtgacccttctggacttcggggcaagccgagagtttgggacagagttcactgatcactacattgaagtggtgaaggctgctgccgatggagaccgcgattgcgtgcttcagaagtctcgggatcttaagtttctgactggattcgaaactaaggctttcagtgacgctcacgttgaggctgtcatgatcctgggcgagccctttgccacccaggggccatatgactttggttctggcgaaaccgccaggcgaatccaggatctcattcctgtgctattgcggcatcgcctgtgtccaccccctgaagaaacatacgccctgcaccgaaagttggcaggggctttcttggcgtgtgctcacctgcgagcccacatcgcttgccgagatctctttcaagacacatatcacagatattgggctagccgccagccggatgcagctaccgcagggtctcttcccaccaaaggcgactcctgggtggaccccagctag

SEQ ID NO: 54068 - DNA, 1512 bp, Artificial Sequence
  derived and/or modified sequence
atgtggctgaaagtcggcggactgcttagaggaacaggtggacagctggggcaaacagtaggctggccatgtggcgcactcggcccagggccacacaggtggggcccttgtggcggttcatgggcacaaaagttttatcaggacggacctggccgtggtctcggcgaagaggacatccggagggcgagggaagccagaccacggaagacaccacggcctcagttgagcgacagatcacgggagaggaaggtgcccgcttcccgcatctctcggttggccaattttggtgggctggccgtgggcctcgggttgggggtgttggcagaaatggccaagaaaagcatgccaggcggtcggcttcagagcgataatagcttcatatcaccgcagctgcagcacatattcgagagggtgcggcaaagcgccgacttcatgccaaggtggcaaatgttgcgtgtgttagaggaagagttaggaagggactggcaggcaaaagtggcttctctggaagaggtcccctttgcagctgccagtattgggcaagtccaccaggggctgctgcgagacgggaccgaggttgcggtgaagatacaataccctggcattgcccagagtatccagtcagacgtgcaaaatctgctagctgtgttaaaaatgtcggcggcactgccagctggactgtttgcggagcaatccctgcaagctctacaacaagagctggcctgggaatgcgattacagaagggaagccgcttgtgctcagaacttcagacagttactggccaacgaccccttctttcgagtccctgcagtagttaaagaattgtgtactaccagagttctgggaatggagcttgccggaggggttcccctcgatcagtgccagggactgtcccaggatctgcgtaatcagatctgcttccaactgctaacactctgtcttcgcgagctgttcgagttccggttcatgcaaacagatcctaactgggccaactttctctatgatgccagctcacaccaggtgacgctactggacttcggagcctcccgcgagttcggtacggagttcaccgaccactatattgaagtggtgaaagccgctgctgacggtgacagggactgcgtgctgcaaaagtcccgggatctgaaatttcttactggtttcgaaaccaaggcctttagcgacgcccacgtagaagccgtcatgattctcggggagccattcgccacccagggaccctacgactttggatcgggcgagaccgcacgcaggattcaagatctgatccccgtactgttgcgccaccgcctctgtcctccaccggaagaaacttacgcactccatcgaaagctggctggggcttttcttgcctgcgcccacctgcgcgctcacatcgcctgtcgagaccttttccaggacacatatcacaggtattgggcttcgcgccagcctgatgcagctaccgctggctcattgcccacgaagggggactcctgggtggatccttcctag

SEQ ID NO: 54069 - protein, 725 aa, Artificial Sequence
  derived and/or modified sequence
MSFPKAPLKRFNDPSGCAPSPGAYDVKTLEVLKGPVSFQKSQRFKQQKESKQNLNVDKDTTLPASARKVKSSESKKESQKNDKDLKILEKEIRVLLQERGAQDRRIQDLETELEKMEARLNAALREKTSLSANNATLEKQLIELTRTNELLKSKFSENGNQKNLRILSLELMKLRNKRETKMRGMMAKQEGMEMKLQVTQRSLEESQGKIAQLEGKLVSIEKEKIDEKSETEKLLEYIEEISCASDQVEKYKLDIAQLEENLKEKNDEILSLKQSLEENIVILSKQVEDLNVKCQLLEKEKEDHVNRNREHNENLNAEMQNLKQKFILEQQEREKLQQKELQIDSLLQQEKELSSSLHQKLCSFQEEMVKEKNLFEEELKQTLDELDKLQQKEEQAERLVKQLEEEAKSRAEELKLLEEKLKGKEAELEKSSAAHTQATLLLQEKYDSMVQSLEDVTAQFESYKALTASEIEDLKLENSSLQEKAAKAGKNAEDVQHQILATESSNQEYVRMLLDLQTKSALKETEIKEITVSFLQKITDLQNQLKQQEEDFRKQLEDEEGRKAEKENTTAELTEEINKWRLLYEELYNKTKPFQLQLDAFEVEKQALLNEHGAAQEQLNKIRDSYAKLLGHQNLKQKIKHVVKLKDENSQLKSEVSKLRCQLAKKKQSETKLQEELNKVLGIKHFDPSKAFHHESKENFALKTPLKEGNTNCYRAPMECQESWK

SEQ ID NO: 54070 - protein, 701 aa, Artificial Sequence
  derived and/or modified sequence
MSFPKAPLKRFNDPSGCAPSPGAYDVKTLEVLKGPVSFQKSQRFKQQKESKQNLNVDKDTTLPASARKVKSSESKKESQKNDKDLKILEKEIRVLLQERGAQDRRIQDLETELEKQLIELTRTNELLKSKFSENGNQKNLRILSLELMKLRNKRETKMRGMMAKQEGMEMKLQVTQRSLEESQGKIAQLEGKLVSIEKEKIDEKSETEKLLEYIEEISCASDQVEKYKLDIAQLEENLKEKNDEILSLKQSLEENIVILSKQVEDLNVKCQLLEKEKEDHVNRNREHNENLNAEMQNLKQKFILEQQEREKLQQKELQIDSLLQQEKELSSSLHQKLCSFQEEMVKEKNLFEEELKQTLDELDKLQQKEEQAERLVKQLEEEAKSRAEELKLLEEKLKGKEAELEKSSAAHTQATLLLQEKYDSMVQSLEDVTAQFESYKALTASEIEDLKLENSSLQEKAAKAGKNAEDVQHQILATESSNQEYVRMLLDLQTKSALKETEIKEITVSFLQKITDLQNQLKQQEEDFRKQLEDEEGRKAEKENTTAELTEEINKWRLLYEELYNKTKPFQLQLDAFEVEKQALLNEHGAAQEQLNKIRDSYAKLLGHQNLKQKIKHVVKLKDENSQLKSEVSKLRCQLAKKKQSETKLQEELNKVLGIKHFDPSKAFHHESKENFALKTPLKEGNTNCYRAPMECQESWK

SEQ ID NO: 54071 - DNA, 2178 bp, Artificial Sequence
  derived and/or modified sequence
atgagcttccccaaggcccccctgaagagattcaacgaccccagcggctgcgcccccagccccggcgcctacgacgtgaagaccctggaggtgctgaagggccccgtgagcttccagaagagccagagattcaagcagcagaaggagagcaagcagaacctgaacgtggacaaggacaccaccctgcccgccagcgccagaaaggtgaagagcagcgagagcaagaaggagagccagaagaacgacaaggacctgaagatcctggagaaggagatcagagtgctgctgcaggagagaggcgcccaggacagaagaatccaggacctggagaccgagctggagaagatggaggccagactgaacgccgccctgagagagaagaccagcctgagcgccaacaacgccaccctggagaagcagctgatcgagctgaccagaaccaacgagctgctgaagagcaagttcagcgagaacggcaaccagaagaacctgagaatcctgagcctggagctgatgaagctgagaaacaagagagagaccaagatgagaggcatgatggccaagcaggagggcatggagatgaagctgcaggtgacccagagaagcctggaggagagccagggcaagatcgcccagctggagggcaagctggtgagcatcgagaaggagaagatcgacgagaagagcgagaccgagaagctgctggagtacatcgaggagatcagctgcgccagcgaccaggtggagaagtacaagctggacatcgcccagctggaggagaacctgaaggagaagaacgacgagatcctgagcctgaagcagagcctggaggagaacatcgtgatcctgagcaagcaggtggaggacctgaacgtgaagtgccagctgctggagaaggagaaggaggaccacgtgaacagaaacagagagcacaacgagaacctgaacgccgagatgcagaacctgaagcagaagttcatcctggagcagcaggagagagagaagctgcagcagaaggagctgcagatcgacagcctgctgcagcaggagaaggagctgagcagcagcctgcaccagaagctgtgcagcttccaggaggagatggtgaaggagaagaacctgttcgaggaggagctgaagcagaccctggacgagctggacaagctgcagcagaaggaggagcaggccgagagactggtgaagcagctggaggaggaggccaagagcagagccgaggagctgaagctgctggaggagaagctgaagggcaaggaggccgagctggagaagagcagcgccgcccacacccaggccaccctgctgctgcaggagaagtacgacagcatggtgcagagcctggaggacgtgaccgcccagttcgagagctacaaggccctgaccgccagcgagatcgaggacctgaagctggagaacagcagcctgcaggagaaggccgccaaggccggcaagaacgccgaggacgtgcagcaccagatcctggccaccgagagcagcaaccaggagtacgtgagaatgctgctggacctgcagaccaagagcgccctgaaggagaccgagatcaaggagatcaccgtgagcttcctgcagaagatcaccgacctgcagaaccagctgaagcagcaggaggaggacttcagaaagcagctggaggacgaggagggcagaaaggccgagaaggagaacaccaccgccgagctgaccgaggagatcaacaagtggagactgctgtacgaggagctgtacaacaagaccaagcccttccagctgcagctggacgccttcgaggtggagaagcaggccctgctgaacgagcacggcgccgcccaggagcagctgaacaagatcagagacagctacgccaagctgctgggccaccagaacctgaagcagaagatcaagcacgtggtgaagctgaaggacgagaacagccagctgaagagcgaggtgagcaagctgagatgccagctggccaagaagaagcagagcgagaccaagctgcaggaggagctgaacaaggtgctgggcatcaagcacttcgaccccagcaaggccttccaccacgagagcaaggagaacttcgccctgaagacccccctgaaggagggcaacaccaactgctacagagcccccatggagtgccaggagagctggaagtag

SEQ ID NO: 54072 - DNA, 2106 bp, Artificial Sequence
  derived and/or modified sequence
atgagcttccccaaggcccccctgaagagattcaacgaccccagcggctgcgcccccagccccggcgcctacgacgtgaagaccctggaggtgctgaagggccccgtgagcttccagaagagccagagattcaagcagcagaaggagagcaagcagaacctgaacgtggacaaggacaccaccctgcccgccagcgccagaaaggtgaagagcagcgagagcaagaaggagagccagaagaacgacaaggacctgaagatcctggagaaggagatcagagtgctgctgcaggagagaggcgcccaggacagaagaatccaggacctggagaccgagctggagaagcagctgatcgagctgaccagaaccaacgagctgctgaagagcaagttcagcgagaacggcaaccagaagaacctgagaatcctgagcctggagctgatgaagctgagaaacaagagagagaccaagatgagaggcatgatggccaagcaggagggcatggagatgaagctgcaggtgacccagagaagcctggaggagagccagggcaagatcgcccagctggagggcaagctggtgagcatcgagaaggagaagatcgacgagaagagcgagaccgagaagctgctggagtacatcgaggagatcagctgcgccagcgaccaggtggagaagtacaagctggacatcgcccagctggaggagaacctgaaggagaagaacgacgagatcctgagcctgaagcagagcctggaggagaacatcgtgatcctgagcaagcaggtggaggacctgaacgtgaagtgccagctgctggagaaggagaaggaggaccacgtgaacagaaacagagagcacaacgagaacctgaacgccgagatgcagaacctgaagcagaagttcatcctggagcagcaggagagagagaagctgcagcagaaggagctgcagatcgacagcctgctgcagcaggagaaggagctgagcagcagcctgcaccagaagctgtgcagcttccaggaggagatggtgaaggagaagaacctgttcgaggaggagctgaagcagaccctggacgagctggacaagctgcagcagaaggaggagcaggccgagagactggtgaagcagctggaggaggaggccaagagcagagccgaggagctgaagctgctggaggagaagctgaagggcaaggaggccgagctggagaagagcagcgccgcccacacccaggccaccctgctgctgcaggagaagtacgacagcatggtgcagagcctggaggacgtgaccgcccagttcgagagctacaaggccctgaccgccagcgagatcgaggacctgaagctggagaacagcagcctgcaggagaaggccgccaaggccggcaagaacgccgaggacgtgcagcaccagatcctggccaccgagagcagcaaccaggagtacgtgagaatgctgctggacctgcagaccaagagcgccctgaaggagaccgagatcaaggagatcaccgtgagcttcctgcagaagatcaccgacctgcagaaccagctgaagcagcaggaggaggacttcagaaagcagctggaggacgaggagggcagaaaggccgagaaggagaacaccaccgccgagctgaccgaggagatcaacaagtggagactgctgtacgaggagctgtacaacaagaccaagcccttccagctgcagctggacgccttcgaggtggagaagcaggccctgctgaacgagcacggcgccgcccaggagcagctgaacaagatcagagacagctacgccaagctgctgggccaccagaacctgaagcagaagatcaagcacgtggtgaagctgaaggacgagaacagccagctgaagagcgaggtgagcaagctgagatgccagctggccaagaagaagcagagcgagaccaagctgcaggaggagctgaacaaggtgctgggcatcaagcacttcgaccccagcaaggccttccaccacgagagcaaggagaacttcgccctgaagacccccctgaaggagggcaacaccaactgctacagagcccccatggagtgccaggagagctggaagtag

SEQ ID NO: 54073 - DNA, 2178 bp, Artificial Sequence
  derived and/or modified sequence
atgtccttccccaaagccccattgaaaagatttaacgacccttctgggtgcgccccaagccccggggcatatgatgtgaaaaccttagaggtcctcaagggacctgtgtcctttcagaaaagccagcggtttaagcagcaaaaagaatcgaaacagaacctgaacgtggacaaggacaccacgttgcctgcctcagcccgcaaggtgaaatcgtcagagagtaagaaagaaagccagaagaatgacaaagatctgaagattctagaaaaagaaattcgagttctgttgcaagagcgtggagcccaagatagacggatccaggacctggaaacagagctggagaagatggaagcaaggctaaacgctgccctgcgagaaaagacatctctgagtgcaaacaatgccactttggagaagcagcttatcgagctcacccggaccaacgagctcctaaagagcaagttcagtgaaaatggcaatcagaaaaatcttcgaatcctaagtctcgagttgatgaagctcaggaataaacgggagaccaaaatgcgtgggatgatggccaagcaggagggcatggagatgaagctgcaggtgactcaacgctccctcgaagagtcacaaggtaagatagcacagctcgagggtaaactcgtgtcgatcgaaaaagagaaaatagacgagaagtccgaaactgagaaactcctggagtacatagaggagatctcctgcgcatcagaccaggtagaaaaatacaagctagacatcgctcagctggaggagaatctcaaggagaaaaatgatgagatactatcccttaagcaatcactggaagagaacatcgtgatactatctaaacaggtagaagatctgaacgtgaaatgccagctactggagaaagagaaagaggaccacgtgaatcgcaaccgagagcataacgaaaatctaaacgccgagatgcagaatctgaagcagaagttcatattggagcagcaagagcgagagaagctgcagcagaaggagctgcagatcgattctttactccagcaggagaaggaactgtcctctagcctccaccagaagttgtgttcattccaagaggagatggtgaaggagaagaatcttttcgaggaggaactcaagcagactctcgacgaactggacaaactgcagcagaaggaggagcaagctgaacggctcgtcaagcagctagaggaggaggctaagtcaagggctgaggagctcaagctgctggaggaaaagttgaaagggaaggaagctgagttggagaagagttctgcagcacatactcaggccaccttactcctgcaggagaagtacgactctatggtccagtccttggaggacgtgactgcccaattcgaaagctataaggccctgaccgcgtccgagattgaggacctcaaactggaaaatagttctctgcaggagaaggcagctaaggcaggaaagaatgcagaagatgtgcagcatcagatcctcgccaccgagagctcaaaccaggagtacgtacgtatgctgctagatctgcagacaaaatcggccctgaaggagaccgaaatcaaagagattacagtatcctttcttcagaaaattacagatctccaaaaccagcttaagcagcaagaagaggacttccgaaagcagctggaggatgaagaaggcaggaaagcggaaaaagagaacacaacagccgagctgacagaagagataaacaagtggcgcctgctctacgaggaactgtacaacaaaactaagccttttcaactacaacttgacgccttcgaggtagagaaacaagcccttctgaatgaacatggtgccgcccaggaacagcttaataaaattcgagactcctacgcgaagctgctgggccatcagaatttgaagcagaagatcaaacatgttgtgaagctcaaggacgaaaactctcagctaaagtccgaagtctccaagctcagatgccagctcgcaaagaagaagcaatcggaaactaaactgcaggaggagctcaacaaggtgctcggcatcaaacattttgacccatcaaaggccttccaccacgagagcaaagaaaattttgccctgaagactcccctgaaagaaggtaacacaaattgctatcgggctccaatggagtgccaggagagttggaaatag

SEQ ID NO: 54074 - DNA, 2106 bp, Artificial Sequence
  derived and/or modified sequence
atgtcctttcctaaggcaccactcaagcgctttaacgatcccagcggctgtgcgccgagtccgggggcatatgacgtcaagactctggaggttctgaaagggccagtgagctttcagaagtctcaaagatttaagcagcagaaggagtccaagcagaatctaaacgttgataaagataccacactgcctgcgtccgccagaaaagtgaagtcgtccgagagcaaaaaggagtcacaaaaaaatgataaggatctgaaaatattagagaaggaaatcagggtgttgctgcaggagagaggagcccaagaccgtcggatacaggatctggagactgagctcgagaaacaattgatagaactgacgagaacaaacgagcttcttaaatctaaattctctgagaacggcaaccagaaaaaccttagaattctgtctctggaactgatgaaactgcggaacaagagagagacaaagatgcgggggatgatggctaagcaggaaggaatggagatgaaactccaggtgacgcagagatcactggaagagtcacaggggaagatcgctcagctggagggcaaactggtctccatagaaaaggaaaaaatcgacgagaaaagcgagacagagaagttactggagtatattgaggagatttcctgtgcctctgaccaggtggagaaatacaagctcgacattgcccagctggaggagaacttaaaagagaaaaacgacgagattctctccttgaagcaatcactcgaggagaacattgtgattctctccaagcaggtggaggaccttaacgtcaagtgtcagttgctggaaaaagagaaggaggaccatgtcaaccggaacagggaacataatgagaacttgaatgccgagatgcaaaacctaaaacaaaagttcattctggaacagcaggaaagggaaaaactccagcagaaagaactacaaatcgattctttgcttcagcaggaaaaggaattgtcatcgtcattacatcagaaactgtgctcttttcaggaggaaatggtgaaggaaaaaaaccttttcgaggaggagctgaaacaaaccctggacgaacttgataagctccagcagaaagaggagcaggcggaaaggctcgtaaagcaactcgaggaagaggcaaagagccgtgccgaagagcttaagctgctggaagaaaagctgaaaggcaaggaagctgaacttgagaagtccagtgcagcgcacacgcaagccacacttctcctgcaggaaaaatacgattctatggtgcagagcctagaggacgtgaccgcacagttcgaatcctataaggctcttaccgcgtcagaaatcgaggacctgaaattggaaaattcatcattgcaggaaaaagccgcaaaagccgggaaaaacgcggaggacgtgcagcaccagatcttggctacagagtcctctaatcaagagtacgtacgcatgctgctcgacctgcagactaagtccgctttgaaggaaaccgagattaaggagattactgtttcctttttgcagaagatcacagacttacaaaaccagttgaaacagcaggaagaggactttcggaaacagcttgaggatgaggaagggagaaaagccgagaaagagaacaccacggcagagttaacagaagaaatcaataaatggcgcctgttgtatgaggagctgtataacaagacgaagccttttcagctgcagttggatgctttcgaggtcgagaagcaagctctgcttaacgagcacggtgcagcccaagaacagctcaacaagattagagacagctatgctaagctcttggggcatcagaacctgaagcagaaaattaagcacgttgtcaaactgaaggatgaaaattcccagctgaaatctgaagtcagcaaacttcgttgccaactcgcgaagaagaagcagtcagaaacgaagttgcaggaggaactaaacaaggttctggggattaagcattttgatccttccaaagcgttccaccatgagagcaaggaaaattttgcgctgaagactcccttaaaggaggggaatacgaattgctacagggctcctatggagtgccaggagtcatggaaatag

SEQ ID NO: 54075 - DNA, 3098 bp, Artificial Sequence
  derived and/or modified sequence
ggggtttggctttccaattggctaacgccggggtgggtggggaatgtggggagatttgaatttgaaaccggtagggagtgataatccgcattcagttgtcgaggagtgccagtcaccttcagtttctggagctggccgtcaacatgtcctttcctaaggcgcccttgaaacgattcaatgacccttctggttgtgcaccatctccaggtgcttatgatgttaaaactttagaagtattgaaaggaccagtatcctttcagaaatcacaaagatttaaacagcaaaaagaatctaaacaaaatcttaatgttgacaaagatactaccttgcctgcttcagctagaaaagttaagtcttcggaatcaaagaaggaatctcaaaagaatgataaagatttgaagatattagagaaagagattcgtgttcttctacaggaacgtggtgcccaggacaggcggatccaggatctggaaactgagttggaaaagatggaagcaaggctaaatgctgcactaagggaaaaaacatctctctctgcaaataatgctacactggaaaaacaacttattgaattgaccaggactaatgaactactaaaatctaagttttctgaaaatggtaaccagaagaatttgagaattctaagcttggagttgatgaaacttagaaacaaaagagaaacaaagatgaggggtatgatggctaagcaagaaggcatggagatgaagctgcaggtcacccaaaggagtctcgaagagtctcaagggaaaatagcccaactggagggaaaacttgtttcaatagagaaagaaaagattgatgaaaaatctgaaacagaaaaactcttggaatacatcgaagaaattagttgtgcttcagatcaagtggaaaaatacaagctagatattgcccagttagaagaaaatttgaaagagaagaatgatgaaattttaagccttaagcagtctcttgaggagaatattgttatattatctaaacaagtagaagatctaaatgtgaaatgtcagctgcttgaaaaagaaaaagaagaccatgtcaacaggaatagagaacacaacgaaaatctaaatgcagagatgcaaaacttaaaacagaagtttattcttgaacaacaggaacgtgaaaagcttcaacaaaaagaattacaaattgattcacttctgcaacaagagaaagaattatcttcgagtcttcatcagaagctctgttcttttcaagaggaaatggttaaagagaagaatctgtttgaggaagaattaaagcaaacactggatgagcttgataaattacagcaaaaggaggaacaagctgaaaggctggtcaagcaattggaagaggaagcaaaatctagagctgaagaattaaaactcctagaagaaaagctgaaagggaaggaggctgaactggagaaaagtagtgctgctcatacccaggccaccctgcttttgcaggaaaagtatgacagtatggtgcaaagccttgaagatgttactgctcaatttgaaagctataaagcgttaacagccagtgagatagaagatcttaagctggagaactcatcattacaggaaaaagcggccaaggctgggaaaaatgcagaggatgttcagcatcagattttggcaactgagagctcaaatcaagaatatgtaaggatgcttctagatctgcagaccaagtcagcactaaaggaaacagaaattaaagaaatcacagtttcttttcttcaaaaaataactgatttgcagaaccaactcaagcaacaggaggaagactttagaaaacagctggaagatgaagaaggaagaaaagctgaaaaagaaaatacaacagcagaattaactgaagaaattaacaagtggcgtctcctctatgaagaactatataataaaacaaaaccttttcagctacaactagatgcttttgaagtagaaaaacaggcattgttgaatgaacatggtgcagctcaggaacagctaaataaaataagagattcatatgctaaattattgggtcatcagaatttgaaacaaaaaatcaagcatgttgtgaagttgaaagatgaaaatagccaactcaaatcggaagtatcaaaactccgctgtcagcttgctaaaaaaaaacaaagtgagacaaaacttcaagaggaattgaataaagttctaggtatcaaacactttgatccttcaaaggcttttcatcatgaaagtaaagaaaattttgccctgaagaccccattaaaagaaggcaatacaaactgttaccgagctcctatggagtgtcaagaatcatggaagtaaacatctgagaaacctgttgaagattatttcattcgtcttgttgttattgatgttgctgttattatatttgacatgggtattttataatgttgtatttaattttaactgccaatccttaaatatgtgaaaggaacattttttaccaaagtgtcttttgacattttattttttcttgcaaatacctcctccctaatgctcacctttatcacctcattctgaaccctttcgctggctttccagcttagaatgcatctcatcaacttaaaagtcagtatcatattattatcctcctgttctgaaaccttagtttcaagagtctaaaccccagattcttcagcttgatcctggaggtcttttctagtctgagcttctttagctaggctaaaacaccttggcttgttattgcctctactttgattctgataatgctcacttggtcctacctattatccttctacttgtccagttcaaataagaaataaggacaagcctaacttcatagaaacctctctatttttaatcagttgtttaataatttacaggttcttaggctccatcctgtttgtatgaaattataatctgtggattggcctttaagcctgcattcttaacaaactcttcagttaattcttagatacactaaaaatctgagaaactctacatgtaactatttcttcagagtttgtcatatactgcttgtcatctgcatgtctactcagcatttgattaacatttgtgtaatatgaaataaaattacacagtaagtcatttaaccaa

SEQ ID NO: 54076 - DNA, 2468 bp, Artificial Sequence
  derived and/or modified sequence
aatccgcattcagttgtcgaggagtgccagtcaccttcagtttctggagctggccgtcaacatgtcctttcctaaggcgcccttgaaacgattcaatgacccttctggttgtgcaccatctccaggtgcttatgatgttaaaactttagaagtattgaaaggaccagtatcctttcagaaatcacaaagatttaaacagcaaaaagaatctaaacaaaatcttaatgttgacaaagatactaccttgcctgcttcagctagaaaagttaagtcttcggaatcaaagaaggaatctcaaaagaatgataaagatttgaagatattagagaaagagattcgtgttcttctacaggaacgtggtgcccaggacaggcggatccaggatctggaaactgagttggaaaaacaacttattgaattgaccaggactaatgaactactaaaatctaagttttctgaaaatggtaaccagaagaatttgagaattctaagcttggagttgatgaaacttagaaacaaaagagaaacaaagatgaggggtatgatggctaagcaagaaggcatggagatgaagctgcaggtcacccaaaggagtctcgaagagtctcaagggaaaatagcccaactggagggaaaacttgtttcaatagagaaagaaaagattgatgaaaaatctgaaacagaaaaactcttggaatacatcgaagaaattagttgtgcttcagatcaagtggaaaaatacaagctagatattgcccagttagaagaaaatttgaaagagaagaatgatgaaattttaagccttaagcagtctcttgaggagaatattgttatattatctaaacaagtagaagatctaaatgtgaaatgtcagctgcttgaaaaagaaaaagaagaccatgtcaacaggaatagagaacacaacgaaaatctaaatgcagagatgcaaaacttaaaacagaagtttattcttgaacaacaggaacgtgaaaagcttcaacaaaaagaattacaaattgattcacttctgcaacaagagaaagaattatcttcgagtcttcatcagaagctctgttcttttcaagaggaaatggttaaagagaagaatctgtttgaggaagaattaaagcaaacactggatgagcttgataaattacagcaaaaggaggaacaagctgaaaggctggtcaagcaattggaagaggaagcaaaatctagagctgaagaattaaaactcctagaagaaaagctgaaagggaaggaggctgaactggagaaaagtagtgctgctcatacccaggccaccctgcttttgcaggaaaagtatgacagtatggtgcaaagccttgaagatgttactgctcaatttgaaagctataaagcgttaacagccagtgagatagaagatcttaagctggagaactcatcattacaggaaaaagcggccaaggctgggaaaaatgcagaggatgttcagcatcagattttggcaactgagagctcaaatcaagaatatgtaaggatgcttctagatctgcagaccaagtcagcactaaaggaaacagaaattaaagaaatcacagtttcttttcttcaaaaaataactgatttgcagaaccaactcaagcaacaggaggaagactttagaaaacagctggaagatgaagaaggaagaaaagctgaaaaagaaaatacaacagcagaattaactgaagaaattaacaagtggcgtctcctctatgaagaactatataataaaacaaaaccttttcagctacaactagatgcttttgaagtagaaaaacaggcattgttgaatgaacatggtgcagctcaggaacagctaaataaaataagagattcatatgctaaattattgggtcatcagaatttgaaacaaaaaatcaagcatgttgtgaagttgaaagatgaaaatagccaactcaaatcggaagtatcaaaactccgctgtcagcttgctaaaaaaaaacaaagtgagacaaaacttcaagaggaattgaataaagttctaggtatcaaacactttgatccttcaaaggcttttcatcatgaaagtaaagaaaattttgccctgaagaccccattaaaagaaggcaatacaaactgttaccgagctcctatggagtgtcaagaatcatggaagtaaacatctgagaaacctgttgaagattatttcattcgtcttgttgttattgatgttgctgttattatatttgacatgggtattttataatgttgtatttaattttaactgccaatccttaaatatgtgaaaggaacattttttaccaaagtgtcttttgacattttattttttcttgcaaatacctcctccctaatgctcacctttatcacctcattctgaaccctttcgctggctttccagcttagaatgcatctcatcaacttaaaagtcagtatcatattattatcctcctgttctgaaa

SEQ ID NO: 54077 - DNA, 2178 bp, Artificial Sequence
  derived and/or modified sequence
atgtccttccccaaggcccccctgaagcgcttcaatgaccccagcggctgtgcccccagccctggggcctatgatgtgaagaccctggaggtgctgaagggccctgtgtccttccagaagagccagcgcttcaagcagcagaaggagagcaagcagaacctgaatgtggacaaggacaccaccctgcctgccagcgccaggaaggtgaagagcagcgagagcaagaaggagagccagaagaatgacaaggacctgaagatcctggagaaggagatccgggtgctgctgcaggagcggggggcccaggaccggcgcatccaggacctggagacagagctggagaagatggaggcccggctgaatgctgccctgcgggagaagaccagcctgagcgccaacaatgccaccctggagaagcagctgattgagctgaccaggaccaatgagctgctgaagagcaagttctctgaaaatggaaaccagaagaacctgcgcatcctgagcctggagctgatgaagctgaggaacaagcgggagaccaagatgaggggcatgatggccaagcaggagggcatggagatgaagctgcaggtgacccagaggagcctggaggagagccagggcaagatcgcccagctggagggcaagctggtgtccattgagaaggagaagattgatgagaagtcagaaacagagaagctgctggagtacatcgaggagatcagctgtgccagtgaccaggtggagaagtacaagctggacatcgcccagctggaggagaacctgaaggagaagaatgatgagatcctgagcctgaagcagagcctggaggagaacatcgtcatcctgagcaagcaggtggaggacctgaatgtgaagtgccagctgctggagaaggagaaggaggaccacgtgaacagaaaccgggagcacaatgaaaacctgaatgctgagatgcagaacctgaagcagaagttcatcctggagcagcaggagcgggagaagctgcagcagaaggagctgcagattgacagcctgctgcagcaggagaaggagctgagcagcagcctgcaccagaagctgtgcagcttccaggaggagatggtgaaggagaagaacctgtttgaggaggagctgaagcagaccctggatgagctggacaagctgcagcagaaggaggagcaggccgagcggctggtgaagcagctggaggaggaggccaagagcagagctgaggagctgaagctgctggaggagaagctgaagggcaaggaggccgagctggagaagagcagcgctgcccacacccaggccaccctgctgctgcaggagaagtatgacagcatggtgcagagcctggaggatgtgacagcccagtttgagagctacaaggccctgacagccagcgagattgaggacctgaagctggagaacagcagcctgcaggagaaggccgccaaggccggcaagaatgcagaagatgtgcagcaccagatcctggccacagagagcagcaaccaggagtatgtgaggatgctgctggacctgcagaccaagagcgccctgaaggagacagagatcaaggagatcaccgtgtccttcctgcagaagatcacagacctgcagaaccagctgaagcagcaggaggaggacttcaggaagcagctggaggatgaggagggcaggaaggccgagaaggagaacaccacagctgagctgacagaggagatcaacaagtggaggctgctgtatgaggagctgtacaacaagaccaagcccttccagctgcagctggatgcctttgaggtggagaagcaggccctgctgaatgagcacggggccgcccaggagcagctgaacaagatccgggacagctatgccaagctgctgggccaccagaacctgaagcagaagatcaagcacgtggtgaagctgaaggatgagaacagccagctgaagtctgaggtgtccaagctgcgctgccagctggccaagaagaagcagagcgagaccaagctgcaggaggagctgaacaaggtgctgggcatcaagcactttgaccccagcaaggccttccaccacgagagcaaggagaactttgccctgaagacccccctgaaggagggcaacaccaactgctaccgggcccccatggagtgccaggagagctggaagtag

SEQ ID NO: 54078 - DNA, 2106 bp, Artificial Sequence
  derived and/or modified sequence
atgtccttccccaaggcccccctgaagcgcttcaatgaccccagcggctgtgcccccagccctggggcctatgatgtgaagaccctggaggtgctgaagggccctgtgtccttccagaagagccagcgcttcaagcagcagaaggagagcaagcagaacctgaatgtggacaaggacaccaccctgcctgccagcgccaggaaggtgaagagcagcgagagcaagaaggagagccagaagaatgacaaggacctgaagatcctggagaaggagatccgggtgctgctgcaggagcggggggcccaggaccggcgcatccaggacctggagacagagctggagaagcagctgattgagctgaccaggaccaatgagctgctgaagagcaagttctctgaaaatggaaaccagaagaacctgcgcatcctgagcctggagctgatgaagctgaggaacaagcgggagaccaagatgaggggcatgatggccaagcaggagggcatggagatgaagctgcaggtgacccagaggagcctggaggagagccagggcaagatcgcccagctggagggcaagctggtgtccattgagaaggagaagattgatgagaagtcagaaacagagaagctgctggagtacatcgaggagatcagctgtgccagtgaccaggtggagaagtacaagctggacatcgcccagctggaggagaacctgaaggagaagaatgatgagatcctgagcctgaagcagagcctggaggagaacatcgtcatcctgagcaagcaggtggaggacctgaatgtgaagtgccagctgctggagaaggagaaggaggaccacgtgaacagaaaccgggagcacaatgaaaacctgaatgctgagatgcagaacctgaagcagaagttcatcctggagcagcaggagcgggagaagctgcagcagaaggagctgcagattgacagcctgctgcagcaggagaaggagctgagcagcagcctgcaccagaagctgtgcagcttccaggaggagatggtgaaggagaagaacctgtttgaggaggagctgaagcagaccctggatgagctggacaagctgcagcagaaggaggagcaggccgagcggctggtgaagcagctggaggaggaggccaagagcagagctgaggagctgaagctgctggaggagaagctgaagggcaaggaggccgagctggagaagagcagcgctgcccacacccaggccaccctgctgctgcaggagaagtatgacagcatggtgcagagcctggaggatgtgacagcccagtttgagagctacaaggccctgacagccagcgagattgaggacctgaagctggagaacagcagcctgcaggagaaggccgccaaggccggcaagaatgcagaagatgtgcagcaccagatcctggccacagagagcagcaaccaggagtatgtgaggatgctgctggacctgcagaccaagagcgccctgaaggagacagagatcaaggagatcaccgtgtccttcctgcagaagatcacagacctgcagaaccagctgaagcagcaggaggaggacttcaggaagcagctggaggatgaggagggcaggaaggccgagaaggagaacaccacagctgagctgacagaggagatcaacaagtggaggctgctgtatgaggagctgtacaacaagaccaagcccttccagctgcagctggatgcctttgaggtggagaagcaggccctgctgaatgagcacggggccgcccaggagcagctgaacaagatccgggacagctatgccaagctgctgggccaccagaacctgaagcagaagatcaagcacgtggtgaagctgaaggatgagaacagccagctgaagtctgaggtgtccaagctgcgctgccagctggccaagaagaagcagagcgagaccaagctgcaggaggagctgaacaaggtgctgggcatcaagcactttgaccccagcaaggccttccaccacgagagcaaggagaactttgccctgaagacccccctgaaggagggcaacaccaactgctaccgggcccccatggagtgccaggagagctggaagtag

SEQ ID NO: 54079 - DNA, 2178 bp, Artificial Sequence
  derived and/or modified sequence
atgagcttccccaaggcccccctgaagcggttcaacgaccccagcggctgcgcaccatctccaggggcctatgacgtgaaaacactggaggtcctcaagggccctgtgtcgtttcaaaaatcccagagattcaaacagcagaaggaatccaagcagaaccttaacgtggataaagacacaaccttaccagcgagcgcccgtaaggtcaagagcagtgagagcaagaaggagagccaaaaaaacgataaggacttgaaaatcctggaaaaggaaatccgggtcctgctccaggagcgcggcgctcaagaccgaagaattcaggacctggagacggaactggaaaaaatggaggctcgcctgaatgccgccctgagggagaaaacttccctttccgccaacaacgccacactcgagaaacagctcatcgagctgaccaggacgaatgagctgctgaaaagtaaatttagcgagaacgggaaccagaagaatcttcgcatactctctctcgagcttatgaaactccgcaataaaagggaaacaaaaatgaggggcatgatggctaaacaggagggcatggagatgaagctgcaggtgacacagcgctccctcgaagagtcacagggtaagatcgcacagcttgaaggcaagttggtgtctattgagaaggagaagatcgacgaaaaatcggagactgaaaagttgctcgagtacattgaagagatatcttgcgcttctgaccaggtggaaaagtacaagcttgacatcgcgcaacttgaggagaatttgaaggagaagaatgacgaaatcctcagtttaaagcagtccctcgaagagaatatcgtaatcttgagcaagcaggtagaagacctgaatgtcaaatgccaacttctggagaaagagaaggaggaccatgtgaacaggaaccgcgaacacaacgaaaacctgaacgcggagatgcagaatctgaagcaaaagttcatcctggagcagcaggagagggaaaaactgcagcaaaaggaactacagatcgacagcctgctgcagcaggagaaggaactctcctcctccttgcatcagaagctgtgtagcttccaagaggagatggtgaaggagaagaacctttttgaggaggagctgaaacaaacgctggacgaactggataaactgcagcaaaaagaggagcaggccgagcgcctggttaagcaactggaggaggaggcaaaatcgcgggctgaggagctgaagctgctagaggaaaaactgaagggtaaagaggcagaattagaaaagagcagcgccgcccatacacaggctactcttctcctgcaagagaagtacgattccatggtacagtcactggaggatgtgacagcacagttcgagagctacaaagccttaaccgcatctgagatcgaagatctcaaactggagaattccagcttgcaggagaaagcagccaaagctggaaaaaatgcagaggacgtacagcaccaaattttagccacggaatcatctaaccaggaatatgtgagaatgctgctggacctgcagactaaatccgccttgaaagagactgagatcaaggaaatcacagtgagcttcctgcagaagatcaccgaccttcagaatcagctcaagcaacaggaagaagacttcaggaagcagctcgaggatgaggaaggacgcaaagcagagaaagagaacacaactgctgagctgaccgaagaaatcaataagtggcgattattatatgaggagctgtataacaagacaaaaccctttcagctccagctcgacgccttcgaggtggaaaagcaggccctgctgaatgagcacggcgccgcgcaggagcagcttaacaagatccgggattcatatgccaaactgctcggccatcagaacctcaaacagaagattaagcatgtggtcaaactgaaggatgagaattcacagctaaagagcgaggtgagcaaactgcggtgccagctggcaaagaagaaacaatctgagacaaagctacaggaggaattgaataaggttcttggcatcaagcacttcgatccgagcaaggcttttcaccacgagtctaaggaaaacttcgccctgaaaacgcccttgaaggaagggaatactaattgctatcgggctcctatggaatgtcaggaaagttggaagtag

SEQ ID NO: 54080 - DNA, 2106 bp, Artificial Sequence
  derived and/or modified sequence
atgagcttccccaaggcccccctgaagcggttcaacgaccccagcgggtgtgctcctagtcccggcgcctatgacgtgaaaacgttagaggttttaaagggacccgtatccttccagaagtcccagcgattcaagcagcaaaaagaatctaagcagaatctcaatgtggataaggataccaccctgcctgcaagcgcccgcaaggttaagagcagtgaatccaaaaaggaaagccagaaaaatgacaaggacctcaagatactcgaaaaggagatacgcgtgctgctccaggaacgtggagcacaggacaggaggatccaggatctggaaacagaactggagaaacagcttattgagctgactaggacgaatgaactgctgaagagcaaattttccgagaacgggaatcaaaagaatctgaggatcttaagcctggaactgatgaaactcagaaataaacgggaaactaagatgcgagggatgatggctaagcaggagggtatggagatgaaactccaggtgacccagcgatcgttggaagagagtcaaggcaagattgcacagctggaaggtaaactggtctctattgagaaagagaagatcgatgaaaaatctgagacagagaagctgttagagtatatcgaagaaatctcttgtgcctctgaccaagtggagaagtacaagttggacattgctcagctggaggagaatctcaaagaaaagaatgatgagatactgtccctgaagcagagtttagaggagaatatagtgatactgagcaaacaagttgaggatcttaatgtcaaatgccagctgcttgaaaaggaaaaggaggaccatgtgaatcgaaaccgggaacacaatgaaaacctcaacgccgagatgcaaaacttgaagcagaagtttatcctcgagcaacaggagcgagagaagctgcaacagaaagaactccagattgattcactgctgcagcaggagaaagagctcagctcctctctccaccagaagctgtgctcctttcaggaggagatggtgaaggagaagaatctcttcgaagaggagctgaagcagaccttggatgagctagacaagctccaacagaaagaggagcaggcagagcgcctcgtgaagcaactagaagaggaagccaaaagcagggctgaagagctgaagctacttgaggaaaagttgaaaggaaaagaggcagagctggagaagtcttccgccgcacatacgcaggccaccctgctccttcaggagaagtacgattctatggtccagtccctggaagatgttaccgcacaattcgaaagctacaaagccctgactgcttccgaaattgaagatctgaagctggagaactcttctttgcaggagaaagctgcaaaagctggcaaaaacgcagaagacgtgcagcaccagatccttgccacagagtcctccaatcaagagtatgtgaggatgctgttggacctccagactaaaagcgcactgaaagagacggaaatcaaggaaatcacagtgtcctttctgcagaaaataaccgacctccagaatcaattaaagcaacaggaggaagacttcagaaaacagttggaagatgaagaaggcaggaaggcggagaaggagaacacaactgcggaactaaccgaggaaataaataagtggcgcctcctctacgaagaactgtataataagaccaaaccttttcagcttcagctagacgcatttgaagtggagaaacaggctctgctcaacgaacacggtgccgcccaggagcagttaaataagattagggattcctatgcaaagctgcttggccatcagaacctcaagcagaaaatcaaacatgtggttaaactgaaagatgaaaacagccagctgaaaagcgaagttagcaagttaaggtgccagctggccaaaaaaaagcagtccgaaactaagctccaggaagaactgaataaagtccttgggatcaaacactttgacccatcaaaagcatttcatcacgagtcaaaggaaaatttcgcactgaaaaccccactaaaagaaggcaatactaattgttatagagctcctatggagtgtcaggaaagttggaaatag

SEQ ID NO: 54081 - DNA, 2178 bp, Artificial Sequence
  derived and/or modified sequence
atgtctttccccaaggccccactgaaaagattcaatgatccctctgggtgtgctccttctccgggtgcctacgatgtaaagaccctggaggtcttgaaaggtcctgtctctttccaaaagtctcagcgttttaaacaacaaaaagagagtaaacagaacctcaacgttgataaggacacaacactgcctgcctctgcccgtaaagtgaaatcttctgaatcaaagaaggaaagccagaagaacgacaaagacttgaagattctggagaaggaaattcgcgtgctgctacaggaacggggagcccaagatagaagaattcaggacctggaaacagagctggagaaaatggaagctaggttgaatgctgcactgcgggagaagaccagtctgtcggctaacaatgccacgttggaaaagcagctgatagagctcacacgcacaaacgagcttctcaaatctaagttttcagaaaacggaaaccagaagaacttaagaattctgtcccttgagttgatgaaactgaggaacaaaagagaaaccaaaatgcggggtatgatggccaagcaggaggggatggagatgaaactccaggtgacacaacgatctttagaggagtctcagggtaagattgcccagctcgagggtaaactcgtgagcattgagaaggagaaaatagacgagaagagcgagactgaaaagctgctcgagtacattgaggagataagttgtgcatccgaccaggtagaaaaatacaaacttgacatcgcccagctggaggagaatctgaaagagaagaatgacgagattctgtccctgaaacagagccttgaagagaacattgtcatcttatccaagcaggtcgaggatctgaacgtgaaatgccagctccttgagaaggagaaagaggaccatgtcaaccgtaatagggagcataatgaaaacctcaacgctgaaatgcagaatcttaagcagaaattcatcctagaacagcaggaacgggaaaaacttcaacagaaggagctgcagatcgatagtctgctgcaacaggagaaagagcttagcagcagtctccaccagaagttgtgtagttttcaagaagagatggtcaaggagaagaatctgtttgaagaggaactgaaacagacgctcgatgagttggacaaactacagcaaaaggaggaacaggccgagagacttgtaaagcagctggaagaagaggcaaaaagtagagcggaggaactcaaacttctggaagagaaattgaaaggtaaagaggccgagctggagaaatcgtccgccgctcatacacaggccacactgctcttgcaagagaagtacgattccatggtacagtcacttgaagacgtcaccgcacagtttgagtcttacaaagccctcacagcctccgagatagaggatctgaagctggagaattcttccttgcaggagaaagcagcgaaggcgggtaaaaatgcggaagacgttcagcatcaaattcttgccacggagagctctaaccaggagtacgttaggatgctactggacctacagactaagagtgcactgaaagagactgagatcaaggagattaccgtgagtttcctccagaagattactgacttacaaaaccagttaaagcagcaagaagaagactttcgcaagcaactggaggatgaggaaggccgaaaggctgaaaaagagaatactaccgccgagttaactgaggagatcaacaaatggcggctgctgtatgaagaactttacaacaaaaccaagccttttcagctgcagctagatgccttcgaagtggaaaagcaggcactcctgaacgaacacggcgcagcgcaggagcagttgaacaagatcagagatagttatgctaaactgttaggccaccagaacctgaagcagaagatcaagcacgtcgtgaagcttaaggacgaaaatagccagctcaagtctgaggtcagcaagctccgatgtcagctagcaaagaaaaagcagagcgagacaaaattgcaagaggaattaaacaaggtactgggtatcaagcacttcgacccatcaaaagcatttcatcacgaatccaaggaaaattttgcactgaaaaccccactaaaggaggggaacacaaattgctaccgagcacccatggagtgccaggagtcctggaagtag

SEQ ID NO: 54082 - DNA, 2106 bp, Artificial Sequence
  derived and/or modified sequence
atgtcgtttcccaaagcgccactgaagaggtttaacgatccaagcggctgcgcaccaagccccggtgcatatgatgttaaaacgttggaggtgctgaaaggaccggttagtttccagaaaagtcagcggttcaagcagcaaaaagagagcaagcaaaatttaaacgtcgataaagatacaactctgcccgctagcgccaggaaggtaaagagctccgagtcaaagaaggaatcacagaagaacgataaagaccttaagatcctggaaaaggagatcagagtactgctgcaggaacggggagctcaagatagacggatccaagatctcgagaccgagctggaaaaacagttgattgaactgacccgcaccaatgagctgctgaaatccaagttcagcgaaaacggaaaccagaagaatttgcggattctgtcccttgaacttatgaaactgcgcaacaaacgggagacaaagatgcgcggaatgatggccaagcaagaggggatggagatgaagctgcaggttacgcagaggtccctggaagagtcccagggtaaaatagcgcagttggaagggaaattagtaagcatcgaaaaagagaagatcgacgagaagtccgaaactgagaagcttctagaatacatcgaggaaatttcgtgtgcctcagaccaggtggagaaatataaactggacattgctcaactggaagagaacctgaaagaaaaaaacgacgaaattctctcattgaaacagagtctcgaagagaacattgtaatactgagtaagcaggtagaggacttgaacgttaaatgccagcttctcgaaaaagaaaaagaggatcatgtcaaccgcaacagggaacataacgaaaatctaaatgcagagatgcagaatctaaagcagaagtttattctcgaacagcaggaacgggagaaactccagcagaaagagcttcagatcgactccttgctccagcaggagaaagagctctcttcctctttgcaccaaaaactgtgctccttccaggaagaaatggtgaaagagaaaaacctgtttgaggaggagttgaagcagactttggacgagttagacaagctccagcaaaaggaggaacaggccgagaggctcgtgaagcagctggaagaagaagcaaaatccagggcagaagagctgaaactcctcgaggagaaactcaagggtaaggaggcagagttagagaagtccagcgccgctcacactcaggcgaccttgctgctacaggagaagtatgacagtatggtccaatctctggaagacgtgacggcccagttcgaatcatacaaagctctcacagcatccgagattgaggatttgaagctggaaaattcttcacttcaggagaaggctgctaaagccggaaagaacgccgaagatgtccagcaccaaatcctggctacagagtctagcaaccaggaatatgtacgcatgctcttggatctgcagaccaagtccgccctgaaggagaccgaaattaaggaaattaccgtgtcattcctccagaagatcaccgatctccagaatcagctgaaacaacaagaggaggatttcaggaaacagctggaggatgaggaaggcagaaaagctgagaaggagaataccacagccgaattgacagaagagatcaataagtggaggctcctttatgaggagctctataataaaacgaagccgttccagctccaactggatgccttcgaggtggaaaagcaagccctcctcaacgaacacggagccgctcaagagcagctgaataagatacgtgactcttatgctaagctgttgggccaccagaatttaaagcagaagattaagcatgtggtgaagttgaaagacgagaacagccaactaaaatcagaggtgtctaagttaagatgccagcttgcaaagaaaaagcagtccgaaactaaactccaggaggaattaaataaggtcctcggcattaagcattttgacccctccaaagctttccaccatgaatcaaaagagaactttgcattaaagacaccacttaaggaggggaatacaaactgctatagagcgcctatggagtgtcaagaaagttggaaatag

SEQ ID NO: 54083 - protein, 638 aa, Artificial Sequence
  derived and/or modified sequence
MTLLIRVLLQERGAQDRRIQDLETELEKMEARLNAALREKTSLSANNATLEKQLIELTRTNELLKSKFSENGNQKNLRILSLELMKLRNKRETKMRGMMAKQEGMEMKLQVTQRSLEESQGKIAQLEGKLVSIEKEKIDEKSETEKLLEYIEEISCASDQVEKYKLDIAQLEENLKEKNDEILSLKQSLEENIVILSKQVEDLNVKCQLLEKEKEDHVNRNREHNENLNAEMQNLKQKFILEQQEREKLQQKELQIDSLLQQEKELSSSLHQKLCSFQEEMVKEKNLFEEELKQTLDELDKLQQKEEQAERLVKQLEEEAKSRAEELKLLEEKLKGKEAELEKSSAAHTQATLLLQEKYDSMVQSLEDVTAQFESYKALTASEIEDLKLENSSLQEKAAKAGKNAEDVQHQILATESSNQEYVRMLLDLQTKSALKETEIKEITVSFLQKITDLQNQLKQQEEDFRKQLEDEEGRKAEKENTTAELTEEINKWRLLYEELYNKTKPFQLQLDAFEVEKQALLNEHGAAQEQLNKIRDSYAKLLGHQNLKQKIKHVVKLKDENSQLKSEVSKLRCQLAKKKQSETKLQEELNKVLGIKHFDPSKAFHHESKENFALKTPLKEGNTNCYRAPMECQESWK

SEQ ID NO: 54084 - DNA, 1917 bp, Artificial Sequence
  derived and/or modified sequence
atgaccctgctgatcagagtgctgctgcaggagagaggcgcccaggacagaagaatccaggacctggagaccgagctggagaagatggaggccagactgaacgccgccctgagagagaagaccagcctgagcgccaacaacgccaccctggagaagcagctgatcgagctgaccagaaccaacgagctgctgaagagcaagttcagcgagaacggcaaccagaagaacctgagaatcctgagcctggagctgatgaagctgagaaacaagagagagaccaagatgagaggcatgatggccaagcaggagggcatggagatgaagctgcaggtgacccagagaagcctggaggagagccagggcaagatcgcccagctggagggcaagctggtgagcatcgagaaggagaagatcgacgagaagagcgagaccgagaagctgctggagtacatcgaggagatcagctgcgccagcgaccaggtggagaagtacaagctggacatcgcccagctggaggagaacctgaaggagaagaacgacgagatcctgagcctgaagcagagcctggaggagaacatcgtgatcctgagcaagcaggtggaggacctgaacgtgaagtgccagctgctggagaaggagaaggaggaccacgtgaacagaaacagagagcacaacgagaacctgaacgccgagatgcagaacctgaagcagaagttcatcctggagcagcaggagagagagaagctgcagcagaaggagctgcagatcgacagcctgctgcagcaggagaaggagctgagcagcagcctgcaccagaagctgtgcagcttccaggaggagatggtgaaggagaagaacctgttcgaggaggagctgaagcagaccctggacgagctggacaagctgcagcagaaggaggagcaggccgagagactggtgaagcagctggaggaggaggccaagagcagagccgaggagctgaagctgctggaggagaagctgaagggcaaggaggccgagctggagaagagcagcgccgcccacacccaggccaccctgctgctgcaggagaagtacgacagcatggtgcagagcctggaggacgtgaccgcccagttcgagagctacaaggccctgaccgccagcgagatcgaggacctgaagctggagaacagcagcctgcaggagaaggccgccaaggccggcaagaacgccgaggacgtgcagcaccagatcctggccaccgagagcagcaaccaggagtacgtgagaatgctgctggacctgcagaccaagagcgccctgaaggagaccgagatcaaggagatcaccgtgagcttcctgcagaagatcaccgacctgcagaaccagctgaagcagcaggaggaggacttcagaaagcagctggaggacgaggagggcagaaaggccgagaaggagaacaccaccgccgagctgaccgaggagatcaacaagtggagactgctgtacgaggagctgtacaacaagaccaagcccttccagctgcagctggacgccttcgaggtggagaagcaggccctgctgaacgagcacggcgccgcccaggagcagctgaacaagatcagagacagctacgccaagctgctgggccaccagaacctgaagcagaagatcaagcacgtggtgaagctgaaggacgagaacagccagctgaagagcgaggtgagcaagctgagatgccagctggccaagaagaagcagagcgagaccaagctgcaggaggagctgaacaaggtgctgggcatcaagcacttcgaccccagcaaggccttccaccacgagagcaaggagaacttcgccctgaagacccccctgaaggagggcaacaccaactgctacagagcccccatggagtgccaggagagctggaagtag

SEQ ID NO: 54085 - DNA, 1917 bp, Artificial Sequence
  derived and/or modified sequence
atgactctgcttatccgggtgttactccaggaacggggtgcccaagatagacggattcaggatctcgagactgaactggagaaaatggaggcgcgtctgaacgctgcccttagagagaaaactagcctcagcgccaataacgcgactttagagaaacaactcatagagctaactcgcaccaatgaactcttaaaaagtaagttttctgaaaacgggaatcaaaagaacctgcggatcctcagtttagagctcatgaaactaaggaataaacgcgaaaccaagatgcgcggtatgatggctaagcaagaaggcatggagatgaagcttcaggttacacaaaggtcgctggaggaaagccagggcaaaatagcgcagctggaaggcaagctggtgtctatagagaaggaaaagattgacgaaaagagcgagacagagaagctcttggagtacatcgaagaaatctcttgtgccagcgatcaggttgaaaaatacaaactcgacattgctcagttggaggaaaatctgaaggaaaaaaatgatgagatcttgtcactgaaacagtccttagaagagaacattgttatcctgagcaagcaggtggaggatcttaatgtcaagtgtcagctgctcgagaaggagaaggaggaccacgtcaatcggaaccgggagcacaatgagaacctaaacgcagaaatgcagaacctgaaacaaaaatttattctggagcagcaggaaagggaaaaattacaacagaaggagctgcagatcgattctcttctccagcaagaaaaggagctgtcatcttctctgcatcagaaattgtgctcattccaagaagaaatggtgaaggaaaagaatctcttcgaggaggagctaaagcagaccctggatgaactggataaattgcagcagaaagaagagcaggcggagagactcgttaaacagctcgaggaggaagccaaatctagagcggaggagctgaagctgctagaggaaaagcttaaagggaaagaagccgagttagaaaaatcaagcgccgctcacacccaggcaacattgcttctgcaagagaagtacgactccatggtgcagtccctcgaggatgtgacagcacaattcgaatcctacaaggctctaactgcatccgaaatcgaagatcttaaactggagaacagttcgcttcaggagaaagcggccaaagccggaaaaaatgcggaagatgtccaacatcagatcctggcaacagaatctagcaaccaagaatacgtgcgcatgctccttgatctccaaaccaagagcgccctcaaggagacggaaattaaggaaatcacagtgagcttcttgcagaaaattaccgacctgcaaaaccagctgaagcagcaggaggaggacttcaggaagcagctggaagatgaagaaggccggaaggctgagaaagaaaatactacagctgagctcacggaggagattaataagtggaggttgttatacgaagagctctataataaaacaaagccttttcagttgcagttggatgcctttgaggtggagaagcaggcgcttctgaatgagcatggagcagcccaggaacagctgaacaagattagggactcctatgcgaagttactcggccatcagaatctgaaacaaaaaatcaagcacgtggtgaaactgaaggatgaaaatagtcagctgaaatccgaagtatctaaactcaggtgtcagctggctaaaaagaagcagtcggagaccaagctccaagaagaactaaataaggtcctgggcattaaacatttcgatccttcgaaggctttccaccacgagagtaaagagaactttgcccttaagacaccactgaaagaaggcaataccaattgctatagggctccaatggagtgtcaagagtcttggaagtag

SEQ ID NO: 54086 - DNA, 2084 bp, Artificial Sequence
  derived and/or modified sequence
tccgcattcagttgtcgaggagtgccagtcaccttcagtttctggagctggccgtcaacatgtcctttcctaaggcgcccttgaaacgattcaatgacccttctgattcgtgttcttctacaggaacgtggtgcccaggacaggcggatccaggatctggaaactgagttggaaaagatggaagcaaggctaaatgctgcactaagggaaaaaacatctctctctgcaaataatgctacactggaaaaacaacttattgaattgaccaggactaatgaactactaaaatctaagttttctgaaaatggtaaccagaagaatttgagaattctaagcttggagttgatgaaacttagaaacaaaagagaaacaaagatgaggggtatgatggctaagcaagaaggcatggagatgaagctgcaggtcacccaaaggagtctcgaagagtctcaagggaaaatagcccaactggagggaaaacttgtttcaatagagaaagaaaagattgatgaaaaatctgaaacagaaaaactcttggaatacatcgaagaaattagttgtgcttcagatcaagtggaaaaatacaagctagatattgcccagttagaagaaaatttgaaagagaagaatgatgaaattttaagccttaagcagtctcttgaggagaatattgttatattatctaaacaagtagaagatctaaatgtgaaatgtcagctgcttgaaaaagaaaaagaagaccatgtcaacaggaatagagaacacaacgaaaatctaaatgcagagatgcaaaacttaaaacagaagtttattcttgaacaacaggaacgtgaaaagcttcaacaaaaagaattacaaattgattcacttctgcaacaagagaaagaattatcttcgagtcttcatcagaagctctgttcttttcaagaggaaatggttaaagagaagaatctgtttgaggaagaattaaagcaaacactggatgagcttgataaattacagcaaaaggaggaacaagctgaaaggctggtcaagcaattggaagaggaagcaaaatctagagctgaagaattaaaactcctagaagaaaagctgaaagggaaggaggctgaactggagaaaagtagtgctgctcatacccaggccaccctgcttttgcaggaaaagtatgacagtatggtgcaaagccttgaagatgttactgctcaatttgaaagctataaagcgttaacagccagtgagatagaagatcttaagctggagaactcatcattacaggaaaaagcggccaaggctgggaaaaatgcagaggatgttcagcatcagattttggcaactgagagctcaaatcaagaatatgtaaggatgcttctagatctgcagaccaagtcagcactaaaggaaacagaaattaaagaaatcacagtttcttttcttcaaaaaataactgatttgcagaaccaactcaagcaacaggaggaagactttagaaaacagctggaagatgaagaaggaagaaaagctgaaaaagaaaatacaacagcagaattaactgaagaaattaacaagtggcgtctcctctatgaagaactatataataaaacaaaaccttttcagctacaactagatgcttttgaagtagaaaaacaggcattgttgaatgaacatggtgcagctcaggaacagctaaataaaataagagattcatatgctaaattattgggtcatcagaatttgaaacaaaaaatcaagcatgttgtgaagttgaaagatgaaaatagccaactcaaatcggaagtatcaaaactccgctgtcagcttgctaaaaaaaaacaaagtgagacaaaacttcaagaggaattgaataaagttctaggtatcaaacactttgatccttcaaaggcttttcatcatgaaagtaaagaaaattttgccctgaagaccccattaaaagaaggcaatacaaactgttaccgagctcctatggagtgtcaagaatcatggaagtaaacatctgagaaacctgttgaagattatttcattcgtcttgttgttattgatgttgctgttattatatttgacat

SEQ ID NO: 54087 - DNA, 1917 bp, Artificial Sequence
  derived and/or modified sequence
atgaccctgctgatccgggtgctgctgcaggagcggggggcccaggaccggcgcatccaggacctggagacagagctggagaagatggaggcccggctgaatgctgccctgcgggagaagaccagcctgagcgccaacaatgccaccctggagaagcagctgattgagctgaccaggaccaatgagctgctgaagagcaagttctctgaaaatggaaaccagaagaacctgcgcatcctgagcctggagctgatgaagctgaggaacaagcgggagaccaagatgaggggcatgatggccaagcaggagggcatggagatgaagctgcaggtgacccagaggagcctggaggagagccagggcaagatcgcccagctggagggcaagctggtgtccattgagaaggagaagattgatgagaagtcagaaacagagaagctgctggagtacatcgaggagatcagctgtgccagtgaccaggtggagaagtacaagctggacatcgcccagctggaggagaacctgaaggagaagaatgatgagatcctgagcctgaagcagagcctggaggagaacatcgtcatcctgagcaagcaggtggaggacctgaatgtgaagtgccagctgctggagaaggagaaggaggaccacgtgaacagaaaccgggagcacaatgaaaacctgaatgctgagatgcagaacctgaagcagaagttcatcctggagcagcaggagcgggagaagctgcagcagaaggagctgcagattgacagcctgctgcagcaggagaaggagctgagcagcagcctgcaccagaagctgtgcagcttccaggaggagatggtgaaggagaagaacctgtttgaggaggagctgaagcagaccctggatgagctggacaagctgcagcagaaggaggagcaggccgagcggctggtgaagcagctggaggaggaggccaagagcagagctgaggagctgaagctgctggaggagaagctgaagggcaaggaggccgagctggagaagagcagcgctgcccacacccaggccaccctgctgctgcaggagaagtatgacagcatggtgcagagcctggaggatgtgacagcccagtttgagagctacaaggccctgacagccagcgagattgaggacctgaagctggagaacagcagcctgcaggagaaggccgccaaggccggcaagaatgcagaagatgtgcagcaccagatcctggccacagagagcagcaaccaggagtatgtgaggatgctgctggacctgcagaccaagagcgccctgaaggagacagagatcaaggagatcaccgtgtccttcctgcagaagatcacagacctgcagaaccagctgaagcagcaggaggaggacttcaggaagcagctggaggatgaggagggcaggaaggccgagaaggagaacaccacagctgagctgacagaggagatcaacaagtggaggctgctgtatgaggagctgtacaacaagaccaagcccttccagctgcagctggatgcctttgaggtggagaagcaggccctgctgaatgaacatggagctgcccaggagcagctgaacaagatccgggacagctatgccaagctgctgggccaccagaacctgaagcagaagatcaagcacgtggtgaagctgaaggatgagaacagccagctgaagtctgaggtgtccaagctgcgctgccagctggccaagaagaagcagagcgagaccaagctgcaggaggagctgaacaaggtgctgggcatcaagcactttgaccccagcaaggccttccaccacgagagcaaagaaaattttgccctgaagacccccctgaaggagggcaacaccaactgctaccgggcccccatggagtgccaggagagctggaagtag

SEQ ID NO: 54088 - DNA, 1917 bp, Artificial Sequence
  derived and/or modified sequence
atgaccctgctgatccgggtgctgctgcaggagcggggcgcccaggacagaaggattcaggacctggagactgagctggagaaaatggaagccagactcaacgccgccctcagggagaagacctctctgagcgctaataacgctacgctagagaagcaattgatcgagttgacccgtacgaacgagctcctgaaatccaagttcagtgaaaatggcaaccagaagaatcttcggatattgtcccttgagcttatgaagcttcggaataagcgggagaccaaaatgcgcggcatgatggccaagcaggaggggatggaaatgaaactacaggtgacccagcggtcactcgaagagtcacagggcaagattgctcagctcgaaggcaagctcgtatcgatcgaaaaggaaaaaatcgacgaaaagtcggaaacagaaaaactcctcgagtacatcgaggagattagttgtgcatccgaccaagtagaaaagtataagctcgatatcgcccagctggaggaaaatctgaaagaaaagaacgacgagattctctccctgaagcagagcttagaagagaatatcgtgatcctgagtaaacaagtcgaagacttgaacgtcaaatgccaactattggagaaggagaaagaggatcacgttaacagaaatcgagagcataacgagaacctgaatgccgaaatgcaaaatctcaaacagaagttcatcttggaacagcaggagagagagaagctccaacagaaggagcttcaaatcgacagtctactgcaacaggaaaaggagctgagttcgagccttcaccagaaactgtgctcctttcaagaggagatggttaaggaaaaaaacctctttgaggaagagttgaaacagactctcgacgagctagacaaactccagcagaaagaggaacaggcagagcgcctggtgaagcagctcgaagaggaggccaaaagcagagctgaggagcttaagctgcttgaagagaagttaaagggaaaagaggccgagcttgaaaaaagctccgccgcacatacgcaggccaccctgttactgcaggaaaaatacgactccatggttcaatcacttgaggatgtgaccgcccagtttgagtcttacaaagccctgaccgcaagcgaaatcgaagatctaaagcttgagaacagttcactgcaagagaaggctgccaaggcgggcaagaatgccgaagacgtgcagcaccaaatattggccacggagtcttctaaccaagaatacgtgaggatgttgctcgatttgcagaccaagtcagcattgaaggagactgagattaaggagattaccgtgtcgttcctgcagaaaattaccgacctgcagaatcagttgaagcagcaggaggaggacttcagaaagcagctcgaagatgaggaaggaagaaaagctgagaaagaaaacacaaccgcagagttgaccgaggagattaataagtggcggctgctgtatgaagagctatataacaagactaaacctttccagctgcagctggacgcctttgaggtcgagaagcaggctctcctcaatgaacacggcgcggctcaggagcagcttaacaaaatccgcgactcctacgccaagctgctggggcatcaaaacctcaagcagaagatcaagcacgtcgtcaagctcaaggatgaaaatagccagctgaagtccgaggtgagcaagctcagatgccagctcgctaaaaaaaagcaaagcgaaacaaaattgcaggaggagctaaacaaggtactcggcattaagcacttcgacccttctaaggcgttccaccacgagtctaaagagaactttgctctgaagactcccctgaaggaaggcaacacgaattgttaccgcgcgccaatggaatgccaggagtcttggaagtag

SEQ ID NO: 54089 - DNA, 1917 bp, Artificial Sequence
  derived and/or modified sequence
atgacactgttgatcagagtgctgcttcaggagcggggagctcaggatcggcgaatccaagatctggagacagagctggagaagatggaagcacgcctgaatgctgctttgagagagaaaaccagcttgagtgctaacaacgccactctggagaagcagctgatcgagctaaccaggactaacgagctcctgaagtcaaagttctcagagaacgggaatcagaagaacctgagaatcctatccctggagctgatgaagctcaggaataagcgcgagactaaaatgcgcggaatgatggcaaagcaagagggaatggagatgaagctgcaggtcacccaacgctctctggaggagtcacagggcaagattgcgcagctggaaggaaagctggttagcattgaaaaggaaaaaattgacgagaaaagtgaaaccgaaaaactactggagtacattgaagagatttcatgtgccagtgaccaggttgagaaatataagctagacattgctcagctggaggagaacctcaaagaaaagaacgatgaaatcctttcattgaagcaaagccttgaagagaatatcgtgatcttgagcaagcaggttgaagacttgaacgtgaagtgtcagctgctcgagaaggagaaagaggaccatgtgaacaggaatcgtgagcataacgaaaatctgaacgccgaaatgcaaaacctgaagcagaagttcattctggaacagcaggaacgcgaaaaactgcagcagaaagagctgcagatcgattcgcttcttcagcaggagaaggagctgtcgagctcactccaccagaaactgtgctccttccaggaggaaatggtcaaggagaagaaccttttcgaagaggagttaaagcaaacgctggatgagttggacaaattgcagcagaaggaggaacaggctgagcggttggttaagcagctggaagaagaggctaaatcgcgggctgaggagctgaaactgctcgaggagaagctgaaagggaaagaggctgagctcgagaaatcttctgccgctcatacacaggccaccctactgctccaagaaaaatacgacagtatggtgcagagtctcgaggacgtaaccgcccagttcgagtcatacaaggcgcttacagcgagcgagatcgaagaccttaaactggagaacagtagcctccaggagaaggctgcaaaagccggtaaaaacgccgaggacgttcagcaccagattttggcgaccgaaagttcaaatcaggagtacgttcgcatgctgttggatctccaaactaagagcgccctgaaagaaactgagattaaagagattacagtctcctttctgcagaagataaccgacctacagaaccagctcaaacagcaggaggaagatttccgaaaacagctggaagacgaagaaggaaggaaagccgagaaggaaaacacaactgcagagttgacagaagagataaataaatggcgcctactctacgaagaactttacaacaagactaaaccgtttcagttgcaacttgatgccttcgaagtggaaaagcaggctctgctgaatgaacacggcgctgcacaggagcagttgaacaagatccgggatagctatgccaagctgctcggccatcagaacctgaagcagaagataaaacatgtcgtgaagctgaaagacgagaatagccaactgaagagcgaggtgtctaaactcagatgccagctagcaaaaaagaaacagagcgagactaaactccaggaggagctgaataaggtcctcggaattaagcactttgacccgtctaaagccttccatcatgaatccaaggagaattttgccctgaaaactcctctgaaggaaggcaataccaattgctaccgggcacccatggagtgccaggagagttggaagtag

SEQ ID NO: 54090 - protein, 277 aa, Artificial Sequence
  derived and/or modified sequence
MPGISARGLSHEGRKQLAVNLTRVLALYRSILDAYIIEFFTDNLWDTLPCSWQEALDGLKPPQLATMLLGMPGEGEVVRYRSVWPLTLLALKSTACALAFTRMPGFQTPSEFLENPSQSSRLTAPFRKHVRPKKQHEIRRLGELVKKLSDFTGCTQVVDVGSGQGHLSRFMALGLGLMVKSIEGDQRLVERAQRLDQELLQALEKEEKRNPQICAAGATASGARSPAATESGCPSGPRGPGEPCGGLLQPGSTACPTGGDAYSTGPAAVPSGTGFPC

SEQ ID NO: 54091 - DNA, 834 bp, Artificial Sequence
  derived and/or modified sequence
atgcccggcatcagcgccagaggcctgagccacgagggcagaaagcagctggccgtgaacctgaccagagtgctggccctgtacagaagcatcctggacgcctacatcatcgagttcttcaccgacaacctgtgggacaccctgccctgcagctggcaggaggccctggacggcctgaagcccccccagctggccaccatgctgctgggcatgcccggcgagggcgaggtggtgagatacagaagcgtgtggcccctgaccctgctggccctgaagagcaccgcctgcgccctggccttcaccagaatgcccggcttccagacccccagcgagttcctggagaaccccagccagagcagcagactgaccgcccccttcagaaagcacgtgagacccaagaagcagcacgagatcagaagactgggcgagctggtgaagaagctgagcgacttcaccggctgcacccaggtggtggacgtgggcagcggccagggccacctgagcagattcatggccctgggcctgggcctgatggtgaagagcatcgagggcgaccagagactggtggagagagcccagagactggaccaggagctgctgcaggccctggagaaggaggagaagagaaacccccagatctgcgccgccggcgccaccgccagcggcgccagaagccccgccgccaccgagagcggctgccccagcggccccagaggccccggcgagccctgcggcggcctgctgcagcccggcagcaccgcctgccccaccggcggcgacgcctacagcaccggccccgccgccgtgcccagcggcaccggcttcccctgctag

SEQ ID NO: 54092 - DNA, 834 bp, Artificial Sequence
  derived and/or modified sequence
atgcccggtatctctgctagagggcttagtcacgagggacgaaaacagctggcagttaacctgacccgcgttctggctttgtatcggagcattctggatgcctatattatcgagttctttactgacaacctgtgggatacactcccttgctcatggcaagaggcactggatggactgaagcctccccagctcgctaccatgctgttggggatgcccggcgagggtgaggtcgtcagataccgctctgtgtggccgttaactctgctggcactgaaatccaccgcttgcgcgctcgccttcacaagaatgccggggtttcaaactccaagcgagtttctggaaaacccatcgcaaagcagccgtctcaccgccccctttcgaaaacatgtgagacccaagaaacagcacgagatccgtagactcggggagttagtgaagaaactcagcgatttcaccgggtgtacccaggtcgttgacgtgggatccggtcagggccacctgagccgatttatggccctcggcctgggcttgatggtcaagagtattgaaggcgatcagcgactggttgagcgtgcccagcgtcttgaccaggagttactccaagcactggaaaaggaggagaagaggaatccgcagatctgcgccgcgggggccaccgcctccggtgctagatcccctgctgccacagagtccggttgtccctctggaccccgaggaccaggggagccctgcggcggcttgttacaaccagggtcaacggcttgccctacgggaggggatgcttatagtactggacctgctgctgtcccatcaggcaccgggtttccctgctag

SEQ ID NO: 54093 - DNA, 834 bp, Artificial Sequence
  derived and/or modified sequence
atgcctggcatcagcgcccggggcctgagccatgagggcaggaagcagctggccgtgaacctgaccagggtgctggccctgtaccgcagcatcctggatgcctacatcatcgagttcttcacagacaacctgtgggacaccctgccctgctcctggcaggaggccctggatggcctgaagccaccccagctggccaccatgctgctgggcatgcctggagagggggaggtggtgcgctacagatctgtgtggcccctgaccctgctggccctgaagagcacagcctgtgccctggccttcaccaggatgcctggcttccagacccccagcgagttcctggagaaccccagccagagcagccggctgacagcccccttcaggaagcacgtgcggcccaagaagcagcacgagatccggcggctgggggagctggtgaagaagctgagtgacttcaccggctgcacccaggtggtggatgtgggcagcggccagggccacctgagccgcttcatggccctgggcctgggcctgatggtgaagagcattgaaggagaccagaggctggtggagcgggcccagaggctggaccaggagctgctgcaggccctggagaaggaggagaagaggaacccccagatctgtgccgccggggccacagccagcggggcccggagccctgctgccacagaaagtggctgccccagcggcccccggggccctggagagccctgtggcggcctgctgcagcccggcagcacagcctgccccactggaggagatgcctacagcacaggccctgctgctgtgcccagcggcaccggcttcccctgctag

SEQ ID NO: 54094 - DNA, 834 bp, Artificial Sequence
  derived and/or modified sequence
atgcccggcatcagcgcccggggcctgagccacgagggccggaagcagctcgccgtgaacctgacacgggttttggcactgtatcgatctattctcgatgcttacataatcgagttcttcactgacaatttgtgggatacattaccttgcagctggcaggaggcacttgatggactgaaacctccgcagctcgcaacaatgttgctgggcatgcctggggaaggcgaagtcgtgcgctatcgctccgtttggcctctgacccttctggccctgaagtcaaccgcctgcgcgctggcgtttacacgcatgcccggattccagacgcctagtgaatttcttgaaaatccctctcaatcgtccaggttgaccgcgccctttcgaaaacacgtgcgacccaagaaacagcatgagattaggagacttggtgaattggtaaagaaactgagcgatttcacagggtgtactcaggtggtggatgtcggctccgggcaggggcatctcagccgattcatggccctaggacttggcctgatggttaaatcaatcgagggcgaccagaggctcgtggaacgcgcacagaggctggaccaggagctccttcaggccctggagaaagaggaaaagcgcaacccacagatttgcgcagctggagctacagcctcgggcgccaggagccctgccgctaccgagtccggctgtccaagtgggccccgcgggcccggagagccctgtggagggctcctacaaccgggctcaacagcctgtcccaccggcggagacgcttactctacaggtccagccgccgtgccttccggaacaggtttcccttgctag

SEQ ID NO: 54095 - DNA, 834 bp, Artificial Sequence
  derived and/or modified sequence
atgccgggtatctccgctcgtggtctgtcacacgaggggcgaaagcaactggcggtgaacctcacccgcgtgctggcgctgtaccgctctattttggacgcatacatcatcgagttctttacagataatctgtgggacaccctgccttgctcctggcaggaggcgctcgatggtttgaagccaccccaactggccacaatgctgctcgggatgcccggagagggtgaagtggtgaggtaccgcagcgtctggccactcacgcttcttgcactgaaaagcactgcatgtgctctggctttcactagaatgcccggattccagaccccatccgagttcctggagaacccctcacagagttcacgactgacggctccatttagaaagcacgttaggcccaagaaacagcatgagatccggagattaggagagttggtcaaaaaactctccgacttcacaggctgtacacaggtggtggacgtaggcagcggccagggtcatcttagtagattcatggcactgggattaggcctcatggttaagtccatcgaaggagatcagagactggtggaaagagctcagcgactcgaccaggagctgctgcaggctctcgaaaaggaagaaaaaagaaatcctcagatctgtgccgctggtgctaccgcttcgggcgctaggtctccagctgccaccgagtctggctgtccatctggcccacggggacccggtgagccatgtggaggtttattgcagcctggaagcaccgcctgtcccactggtggggatgcgtactcgacaggccctgccgcagttccatccggtacgggcttcccatgttag

SEQ ID NO: 54096 - DNA, 1802 bp, Artificial Sequence
  derived and/or modified sequence
aagcgtccggagccggatgcggaaatcggtgcgcgccgacgaagcccgggaaggcaggcgcgcgggttagaacgcgccagaggtcggcgcgcgcacacccgcaccgccccgaccccaggtagtgaggccagtgattccgagtgtgtgaggagcggcagtggcggcggaggagggggcggcgtgggtgggggcgggggcgggatgcgctccccggcccctctagccccgtggtggtacaacgcgaaggtgtgggaaggccgcgataaaccggaactgcagcccgccggacacctccggcttcacttccgtaagaggagaggagtgtacggcaaggggcgggaactggaacttggcccgcctcgttgtgagctgagctcagcggcacgcttttgtggcgtcactgcactgttaccccgccctacgtgtctctgacgctgacaccttctcactgtgaaacgtcgcgacctgtgacgtctggggggcgcctcaaatcttccactccagcatcggatcccggaaaggcagcgtcggagactggacccaaaactcttcctgttctgcctgcagagttgagccccgtccgggtcctggacccgcgtagtactgaccctggatccctgttcactgcgttctcgctccccgcgctccctgctggaccccgggatgccgggcatctccgcccgaggcctctctcatgaggggaggaagcagctagctgttaacctcacccgtgtcctggcactctaccgttccatcttggatgcctacatcatcgaatttttcacagacaacctatgggacacactcccttgctcatggcaggaagcattggatggactgaaaccaccacagctggccacaatgctgctggggatgcctggggaaggggaggtcgtcaggtacaggtcagtgtggccactcaccctgctggccctgaagtccacggcgtgtgccctggcctttacccggatgcctggctttcagaccccctcagaattcctggagaaccccagccagagctcccgactaacagctccattccggaaacatgtcaggcccaagaagcagcatgagatccggaggctgggagagttggtgaagaagctgagtgatttcacaggctgcacccaggttgtagacgtgggctcaggccagggccatctctcccgcttcatggctcttggcctggggttgatggtgaagagcatcgaaggggatcagagactggtggagagagcccagcgcctggaccaggagcttctgcaggctctggagaaagaggagaagaggaacccgcagatatgtgcagcgggggctacagcgagtggggctagatccccagctgccactgaatctggctgcccttcaggcccacgtggcccaggagaaccgtgtggtggccttcttcagcctggctctactgcttgccccactggtggagacgcttattctactggaccggctgctgtaccttcaggaacagggtttccatgctgagctcctgcccatcttcagtcctgaactctctcccagaaacctggttctggtggccaccaagatgcccctgggtcaggctctttctgttctggagactgaagacagctgatgcagcctgaggaaacatctcagaccccatcatctgaaagtgcccagagagcacagtggcagagtacatctcatccagagaaacagcatcctgcatcctccagagtcctggttccttcagtttcatcccctttctctccttccatggattatgtaatacattgtaaagttttaattaattaaaaattggatatctg

SEQ ID NO: 54097 - protein, 690 aa, Artificial Sequence
  derived and/or modified sequence
MKLSMKNNIINTQQSFVTMPNVIVPDIEKEIRRMENGACSSFSEDDDSASTSEESENENPHARGSFSYKSLRKGGPSQREQYLPGAIALFNVNNSSNKDQEPEEKKKKKKEKKSKSDDKNENKNDPEKKKKKKDKEKKKKEEKSKDKKEEEKKEVVVIDPSGNTYYNWLFCITLPVMYNWTMVIARACFDELQSDYLEYWLILDYVSDIVYLIDMFVRTRTGYLEQGLLVKEELKLINKYKSNLQFKLDVLSLIPTDLLYFKLGWNYPEIRLNRLLRFSRMFEFFQRTETRTNYPNIFRISNLVMYIVIIIHWNACVFYSISKAIGFGNDTWVYPDINDPEFGRLARKYVYSLYWSTLTLTTIGETPPPVRDSEYVFVVVDFLIGVLIFATIVGNIGSMISNMNAARAEFQARIDAIKQYMHFRNVSKDMEKRVIKWFDYLWTNKKTVDEKEVLKYLPDKLRAEIAINVHLDTLKKVRIFADCEAGLLVELVLKLQPQVYSPGDYICKKGDIGREMYIIKEGKLAVVADDGVTQFVVLSDGSYFGEISILNIKGSKAGNRRTANIKSIGYSDLFCLSKDDLMEALTEYPDAKTMLEEKGKQILMKDGLLDLNIANAGSDPKDLEEKVTRMEGSVDLLQTRFARILAEYESMQQKLKQRLTKVEKFLKPLIDTEFSSIEGPGAESGPIDST

SEQ ID NO: 54098 - protein, 759 aa, Artificial Sequence
  derived and/or modified sequence
MESRSSPRLECSGAISAHCSLHLPDSSDFQLIFVFLVEMGFHHVGQAGLELLISSDLPTSASQSAGITDMKLSMKNNIINTQQSFVTMPNVIVPDIEKEIRRMENGACSSFSEDDDSASTSEESENENPHARGSFSYKSLRKGGPSQREQYLPGAIALFNVNNSSNKDQEPEEKKKKKKEKKSKSDDKNENKNDPEKKKKKKDKEKKKKEEKSKDKKEEEKKEVVVIDPSGNTYYNWLFCITLPVMYNWTMVIARACFDELQSDYLEYWLILDYVSDIVYLIDMFVRTRTGYLEQGLLVKEELKLINKYKSNLQFKLDVLSLIPTDLLYFKLGWNYPEIRLNRLLRFSRMFEFFQRTETRTNYPNIFRISNLVMYIVIIIHWNACVFYSISKAIGFGNDTWVYPDINDPEFGRLARKYVYSLYWSTLTLTTIGETPPPVRDSEYVFVVVDFLIGVLIFATIVGNIGSMISNMNAARAEFQARIDAIKQYMHFRNVSKDMEKRVIKWFDYLWTNKKTVDEKEVLKYLPDKLRAEIAINVHLDTLKKVRIFADCEAGLLVELVLKLQPQVYSPGDYICKKGDIGREMYIIKEGKLAVVADDGVTQFVVLSDGSYFGEISILNIKGSKAGNRRTANIKSIGYSDLFCLSKDDLMEALTEYPDAKTMLEEKGKQILMKDGLLDLNIANAGSDPKDLEEKVTRMEGSVDLLQTRFARILAEYESMQQKLKQRLTKVEKFLKPLIDTEFSSIEGPGAESGPIDST

SEQ ID NO: 54099 - protein, 128 aa, Artificial Sequence
  derived and/or modified sequence
MKLSMKNNIINTQQSFVTMPNVIVPDIEKEIRRMENGACSSFSEDDDSASTSEESENENPHARGSFSYKSLRKGGPSQREQYLPGAIALFNVNNSSNKDQEPEEKKKKKKEKKSKSDDKNENKNDPEK

SEQ ID NO: 54100 - DNA, 2280 bp, Artificial Sequence
  derived and/or modified sequence
atggaaagccgcagttccccgcggttggaatgtagcggggcaatttcagctcactgctcactgcatctgcccgattcatcagactttcaactgattttcgtatttcttgttgagatgggattccaccatgtagggcaagcggggctggaactgctaatttcaagtgatctgccaacctccgctagccagtccgcaggcatcacggacatgaaattaagcatgaagaataatatcataaatactcagcaatctttcgtgaccatgcctaacgtgatagtacccgatatagaaaaggaaatcagaagaatggagaacggcgcctgttcctcattctccgaagatgacgattcagccagtacttccgaagaaagcgagaacgagaatccacacgcgagaggcagttttagctacaaaagtttgcggaaaggcggacccagtcagagagagcagtacctccctggcgcgatcgccttgttcaacgttaataatagtagtaataaagaccaagaaccagaggaaaagaagaagaagaaaaaggagaagaaatcaaagtccgacgataagaatgagaacaaaaacgacccagagaaaaagaaaaaaaagaaggataaagagaagaaaaaaaaggaggagaagtcgaaagataagaaggaggaggagaagaaggaagtggtggtgatcgacccgtctggcaacacatactacaactggttgttttgcataacactgcctgtcatgtacaattggacgatggttattgcaagagcctgctttgatgaactccagtccgactatctcgagtactggctgatactcgattacgtgagcgacatcgtgtatcttatagatatgtttgtcagaacccgcactggttaccttgagcagggccttcttgtgaaggaagagctgaagctaattaacaagtataaatccaacctccagttcaaactggacgttcttagcctaataccaacagacctgctgtactttaagctgggatggaattatcccgagatccgcttaaatagattgttgcggttctctaggatgtttgaattcttccagcggaccgaaacccggacaaattaccccaatatcttccggatcagcaacctcgtgatgtatatcgttattattattcattggaatgcctgcgttttctactcaatcagtaaggccatcggcttcggcaatgatacatgggtttatcctgacattaacgatcctgagtttggaagactggcacggaaatatgtttactccctgtattggagcaccttgactttgactaccatcggggaaactccacctcccgtgcgtgactccgaatatgtattcgtggtggtggacttcctgatcggcgtgctcatctttgccactattgtcggcaacattggatctatgatttcaaatatgaacgcagcacgcgccgagttccaggcgcgaattgatgccataaaacagtacatgcattttcgtaatgtttcaaaggacatggaaaagagagttatcaaatggttcgactacctatggaccaacaagaaaacagtagacgagaaggaagttctgaaatacctgccagacaagctgagggccgaaatcgctatcaacgtgcacctggatacactgaagaaggtcaggatatttgccgattgtgaagccggactgcttgtggaactggtgcttaagctccaacctcaagtgtacagtcctggcgactacatctgtaagaagggagacatcggtcgcgaaatgtatattatcaaggaagggaaactcgccgtggtggccgatgacggcgtcacacagtttgtggttttatccgatgggtcctacttcggggaaatttctatcctgaatattaagggaagtaaggccggcaatcggcggacagccaatataaagtctattggatactcagatctattctgcttgagtaaagatgacctgatggaagcattgactgagtaccccgacgctaagactatgcttgaggaaaaaggtaaacagatcctgatgaaagatggacttctggacctgaacatcgctaacgctgggagcgacccaaaagacctcgaggagaaagtgacacggatggagggcagtgtggacttgctgcagacacgtttcgctcggatcttggcagaatacgaatcaatgcaacaaaagctgaagcagaggctgaccaaggtggagaagtttctgaaaccattgatcgacactgaattttcctctattgagggtcccggagcagagtccgggcccatcgactcgacatag

SEQ ID NO: 54101 - DNA, 2280 bp, Artificial Sequence
  derived and/or modified sequence
atggagagccgcagcagcccccggctggagtgcagcggggccatcagcgcccactgcagcctgcacctgcctgacagcagtgacttccagctgatctttgtgttcctggtggagatgggcttccaccacgtgggccaggccggcctggagctgctgatcagcagtgacctgcccaccagcgccagccagagcgctggcatcacagacatgaagctgtccatgaagaacaacatcatcaacacccagcagagctttgtgaccatgcccaacgtcatcgtgcctgacatcgagaaggagatccggaggatggagaatggagcctgcagcagcttctctgaagatgatgattctgccagcaccagcgaggagagtgaaaatgaaaacccccacgcccggggcagcttctcctacaagagcctgaggaagggcggccccagccagcgggagcagtacctgcccggggccatcgccctcttcaacgtgaacaacagcagcaacaaggaccaggagcctgaggagaagaagaagaagaagaaggagaagaagagcaagagtgatgacaagaatgaaaacaagaatgaccctgagaagaagaagaagaagaaggacaaggagaagaagaagaaggaggagaagagcaaggacaagaaggaggaggagaagaaggaggtggtggtgattgaccccagcggcaacacctactacaactggctgttctgcatcaccctgcctgtgatgtacaactggaccatggtgattgcccgggcctgctttgatgagctgcagagcgactacctggagtactggctgatcctggactatgtgtctgacatcgtgtacctgattgacatgtttgtgaggaccaggacaggctacctggagcagggcctgctggtgaaggaggagctgaagctgatcaacaagtacaagagcaacctgcagttcaagctggatgtgctgagcctcatccccacagacctgctgtacttcaagctgggctggaactacccagagatccggctgaaccggctgctgcgcttcagcaggatgtttgagttcttccagaggacagagaccaggaccaactaccccaacatcttccgcatcagcaacctggtgatgtacatcgtcatcatcatccactggaatgcctgtgtgttctacagcatcagcaaggccatcggctttggaaatgacacctgggtgtacccagacatcaatgaccctgagtttggccgcctggccaggaaatatgtgtacagcctgtactggagcaccctgaccctgaccaccatcggggagaccccacctcctgtgcgggacagtgaatatgtgtttgtggtggtggacttcctgattggagtgctgatctttgccaccatcgtgggcaacatcggctccatgatcagcaacatgaatgctgcccgggcagagttccaggccagaattgatgccatcaagcagtacatgcacttcagaaatgtgtccaaggacatggagaagagggtcatcaagtggtttgactacctgtggaccaacaagaagacagtggatgagaaggaggtgctgaagtacctgcctgacaagctgcgggcagagatcgccatcaacgtgcacctggacaccctgaagaaggtgcgcatctttgctgactgtgaggccggcctgctggtggagctggtgctgaagctgcagccccaggtgtacagccctggggactacatctgcaagaagggggacatcggccgggagatgtacatcatcaaggagggcaagctggccgtggtggctgatgatggagtgacccagtttgtggtgctgagtgatggcagctactttggagagatcagcatcctgaacatcaagggcagcaaggccggcaacagaagaacagccaacatcaagagcatcggctacagcgacctcttctgcctgagcaaggatgacctgatggaggccctgacagagtacccagatgccaagaccatgctggaggagaagggcaagcagatcctgatgaaggatggcctgctggacctgaacatcgccaatgccggcagtgaccccaaggacctggaggagaaggtgaccaggatggagggctctgtggacctgctgcagaccaggtttgcccgcatcctggccgagtatgaatccatgcagcagaagctgaagcagaggctgaccaaggtggagaagttcctgaagcccctgattgacacagagttcagcagcattgagggccctggagctgagagcggccccatcgacagcacctag

SEQ ID NO: 54102 - DNA, 2280 bp, Artificial Sequence
  derived and/or modified sequence
atggagagccggagcagcccccggctggagtgcagcggcgccatctctgcccactgctctcttcacttgcccgattcctctgacttccagctcatttttgtgtttctggttgagatggggttccatcacgtggggcaggctggattagagttgctgatcagttccgacctgcctacatctgcttcccaaagcgccggcatcaccgacatgaaactgtccatgaaaaataacattattaacacccagcaaagcttcgtgaccatgccaaatgtgatcgtgcccgacatagagaaagaaattcggaggatggagaatggagcctgttcttctttctcggaggacgatgatagcgcctccacctccgaggagtcagagaatgagaatccacacgcccgtggatcattcagttacaaatccctgcgaaagggtgggccttcccagcgggaacagtatcttcccggagcaatagccctttttaatgtgaacaactccagcaataaggatcaagagcctgaagagaagaaaaagaaaaagaaggagaaaaaaagcaagtctgatgataagaacgagaacaaaaacgatcctgagaagaaaaagaaaaagaaggataaagagaaaaagaaaaaagaagagaagagcaaagacaaaaaagaggaagaaaagaaagaagtcgttgtgattgacccaagcggtaacacatattacaattggcttttctgtataaccttgccagtgatgtacaattggacaatggtgattgccagggcttgtttcgatgagctccaaagcgattatctggaatactggttgatcttggactatgtctccgatatcgtgtacctgattgatatgtttgtcaggacgcggaccgggtacctggagcaggggctactcgtgaaggaagagttaaagctgataaataagtacaagtctaatctgcaatttaagctggatgtgctgtcactgattcctactgacctgctctatttcaagctcggatggaactaccctgaaattaggttaaatcgtttactgaggttttctaggatgtttgaattcttccagcggaccgaaacgcgaacaaactaccccaacatattccgcatcagcaacctggttatgtacatcgtgatcattattcactggaacgcctgcgtattctactccatttctaaggccattgggtttgggaacgatacatgggtgtaccccgacataaatgaccctgaatttggacgcctagctaggaagtatgtctactcactgtactggtctaccttgacacttacaacaataggagaaaccccaccacccgtccgtgacagcgagtacgtgttcgtggtcgtggatttcctgataggggtgcttattttcgccactatagtaggtaacatcggatctatgatttcaaatatgaatgccgcaagggcagagttccaggctcgaattgatgccatcaagcagtacatgcactttaggaacgtgtcaaaagatatggaaaagcgagtgataaaatggttcgattatctctggacaaataagaagaccgttgatgaaaaagaagtgttgaagtatcttcctgataagcttcgggctgagatcgccatcaatgttcacctggacactctgaagaaggtcagaatttttgccgactgcgaggcaggactcctcgtggagttagtactgaagctgcagccacaagtgtactcacctggtgactacatttgcaaaaagggggacattggaagagagatgtacattataaaggaaggtaaactcgctgtagtggccgatgacggtgtaactcagttcgttgtgcttagtgacggctcatattttggagaaatcagcatcctaaacatcaagggcagcaaagctggcaaccggcgcactgcaaatattaaatccattgggtattccgatttgttttgcctaagcaaggatgatctcatggaagccttaactgaatatcctgacgctaagacaatgctggaggaaaaaggcaagcagatcctcatgaaggacgggctattagatctgaatatcgcaaacgcgggtagtgatccaaaagacctcgaggaaaaagtaacccgtatggaaggcagcgtggatctcctacagaccaggtttgcgcgaattctcgccgaatacgaatccatgcagcagaagttaaaacaacgtctgacgaaggttgaaaagtttctcaaacccttaatcgataccgagttttccagtatagaagggccaggtgctgaatccggcccaatcgattcaacctag

SEQ ID NO: 54103 - DNA, 2280 bp, Artificial Sequence
  derived and/or modified sequence
atggagagccgctcatctccacggcttgagtgcagtggggctatctccgcacattgttctttacacctgcccgacagcagcgacttccagctgatttttgtgttcctggtggagatgggtttccaccacgtgggacaggcaggcctggagttgctgatttcctccgatctccctacatctgcctcacagagcgccggaatcacagatatgaaattgagtatgaaaaataacattatcaatacacaacagagcttcgtcaccatgccaaatgtcattgtgcccgatatcgaaaaggagatccgaaggatggagaacggagcctgttcaagtttctccgaggacgatgacagtgcctccacttctgaggaaagcgagaacgagaacccacacgcgcgtggctcattcagctataaatcccttagaaaggggggacccagccagcgcgaacagtacttgccaggagctatcgccctgttcaatgtaaacaatagtagtaacaaggaccaggagcctgaagagaagaagaaaaaaaagaaagaaaaaaagtctaagtccgatgataagaacgagaataaaaatgacccagagaagaagaaaaagaaaaaagataaggaaaaaaaaaagaaagaagagaaatccaaagataagaaagaagaggagaaaaaggaggtggtcgtgatcgaccccagtgggaatacttactataactggctgttctgtataaccttgccagtaatgtacaattggactatggtgatcgcgagagcttgttttgacgaactacagtcggattacttggagtactggttgatactggattacgttagtgatattgtgtacctcatcgacatgttcgtgcgtacccggactggctatctggagcaaggcctgctcgtgaaagaggagctcaagctgattaataagtacaaatccaaccttcagtttaagctggacgttctaagcctgatcccaaccgacctactgtatttcaaactaggttggaattatcccgagatacgcctgaatagattgctgaggttctcccggatgttcgaatttttccagcgtaccgagacacggactaactatcccaatatcttcagaatttcaaacctggttatgtacatagttattatcatccactggaatgcatgcgttttctactcaatctctaaagccatcgggttcggcaatgacacctgggtttaccctgacatcaacgatccagagttcggccgactcgctaggaaatatgtctacagtctgtattggtccaccctgacattgacgactatcggcgagactccccctcctgtccgtgattcagagtacgtcttcgtcgtcgtagacttcctgatcggcgttttgattttcgccacaattgtggggaacattggttctatgatttccaacatgaatgctgccagggccgaattccaggcccgtatcgacgccattaaacaatacatgcacttcaggaacgtctccaaggatatggagaagagggtcatcaagtggtttgattatctgtggactaataagaagacagtggacgaaaaggaggttctgaagtacttgccagataagctcagagctgagattgcgatcaacgtccatctcgacaccctgaagaaggtgaggatctttgccgattgcgaggcaggtctgttagtggaacttgtgctcaagctgcaaccacaggtctattcacccggagattacatctgcaaaaaaggcgatataggcagggaaatgtatatcataaaagagggtaaactggctgtcgtggctgatgacggcgtgacccagttcgtggtattaagtgacgggagctattttggcgagatatctattctgaatatcaaggggagcaaagcaggaaaccgccgaacagctaacattaagtccatcggatactcagatctattctgcttgtccaaagacgacctgatggaggcattaaccgaataccccgatgccaagaccatgctcgaggagaagggcaaacagatcctcatgaaggatggtctgctggatctgaacattgcaaatgcgggatccgacccaaaagatctggaggaaaaagtgaccaggatggaaggaagcgtggatctgttgcaaactcgctttgccaggatcttggccgaatatgagtccatgcagcagaaattaaagcagaggttgaccaaagtcgaaaagttccttaaaccactgatcgacactgagttcagctccattgagggccctggggctgaaagcggcccaatcgattcaacttag

SEQ ID NO: 54104 - DNA, 2627 bp, Artificial Sequence
  derived and/or modified sequence
agggcctggattttgacaatgtcaagatttaccgtatatccctgtttgtttggatacaccagtgacgtccacttctagaagacaaagttatattacttaaacaaccaaagatatgaaactatccatgaagaacaatattatcaatacacagcagtcttttgtaaccatgcccaatgtgattgtaccagatattgaaaaggaaatacgaaggatggaaaatggagcatgcagctccttttctgaggatgatgacagtgcctctacatctgaagaatcagagaatgaaaaccctcatgcaaggggttcctttagttataagtcactcagaaagggaggaccatcacagagggagcagtacctgcctggtgccattgcactttttaatgtgaacaacagcagcaataaggaccaggaaccagaagaaaaaaagaaaaagaaaaaagaaaagaagagcaagtcagatgataaaaacgaaaataaaaacgacccagagaagaaaaagaagaaaaaggacaaagagaagaaaaagaaagaggagaaaagcaaagataagaaagaagaggagaagaaagaagttgtggttattgatccctcgggaaacacatattacaactggctgttttgcatcacattacctgttatgtacaactggacaatggttattgccagagcatgttttgatgaacttcaatctgattacctagaatattggctcattttggattacgtatcagacatagtctatttaatcgatatgtttgtacgaacaaggacaggttacctagaacaaggactgctggtaaaggaagaacttaaactcataaataaatataaatccaacttgcaatttaaacttgatgttctgtcactgataccaactgatttgctgtattttaagttagggtggaactatccagaaattagattaaacaggttgttacggttctctcgtatgtttgagttcttccagagaacagaaacaaggacaaactatccaaacatcttcaggatttccaaccttgttatgtatatcgtcatcattatccactggaatgcatgtgtgttctactctatttctaaagctattggatttggaaatgatacatgggtctaccctgatattaatgatcctgaatttggccgtttggctagaaaatacgtatacagcctttactggtctacactgactttgactaccattggtgaaacaccccctcccgtgagggattctgagtatgtctttgtggtggttgatttcctaattggagtgttaatttttgctaccatcgttggtaacataggttctatgatttccaacatgaatgcagccagagcagaatttcaagcaagaattgatgctatcaagcaatatatgcattttcgaaatgtaagcaaagatatggaaaagagggttattaaatggtttgactacctgtggaccaacaaaaaaacagttgatgagaaagaagtcttaaagtatctacctgataaactaagagcagaaattgccatcaacgttcacttagacacattaaaaaaggtacgcatttttgctgattgtgaagctggtctgttggtggagttggtcttgaaattgcaaccccaagtctacagtcctggagattatatttgcaagaaaggggatatcggacgagagatgtacattatcaaggaaggcaaactcgctgtggtggcagatgatggagtcactcagtttgtggtattgagcgatggcagctacttcggtgagatcagcattcttaacattaaagggagcaaagctggcaatcgaagaacggccaatattaaaagtattggctactcagacctgttctgtctctcaaaagatgacctcatggaagctctaactgagtacccagatgccaaaactatgctggaagagaaagggaagcagattttaatgaaagatggtctactggatctaaacattgcaaatgctggcagtgatcctaaagatcttgaagagaaggttactcgaatggaggggtcagtagacctcctgcaaaccaggtttgcccgaatcttggctgagtatgagtccatgcagcagaaactgaaacaaagattaaccaaggttgagaaatttctgaaaccgcttattgacacagaattttcaagtattgagggacctggagcggaaagtgggcccatcgactctacatagaaccgaaaagctggtcattaacagggacatgcctcatgatccttttgatcctatgactgacatcaactaaaatttaaaagaagaggaagactcagttgggaaatttttccatgaggaaaatgtgctttggtgcaaggtacaaggcccacaccctctctgagagatactatgattaaaaaagctttatatcttgggatttttcacaactgataatgtgcaaagatataaactgattaacttgtcagtgtctgtattttctgattttttcacatacgctcattttatgtaatattcttcataaaaatgaataagtagccctcactttcatgccatttccattgttgagtgaagcgtatttgaagtaactgagaattaccatgtacatcatatttgggataacatttttaaaaattagactgcaataaagtaaaattaattatgc

SEQ ID NO: 54105 - DNA, 2867 bp, Artificial Sequence
  derived and/or modified sequence
aaaaatcagcatgtttattatttttaaaaaattagggcctggattttgacaatgtcaagatttaccgtatatccctgtttgtttggatacaccagtgacgtccacttctagaagacaaagttatattacttaaacaaccaaagatggagtctcgctcttcgcccaggctggagtgcagtggcgcgatctcggctcactgcagtcttcacctcccagattcaagcgatttccagctaatttttgtatttttagtagagatgggatttcaccatgttggccaagctggacttgaactcctgatctcaagtgatctgcccacctcagcctcccaaagtgctggtattacagatatgaaactatccatgaagaacaatattatcaatacacagcagtcttttgtaaccatgcccaatgtgattgtaccagatattgaaaaggaaatacgaaggatggaaaatggagcatgcagctccttttctgaggatgatgacagtgcctctacatctgaagaatcagagaatgaaaaccctcatgcaaggggttcctttagttataagtcactcagaaagggaggaccatcacagagggagcagtacctgcctggtgccattgcactttttaatgtgaacaacagcagcaataaggaccaggaaccagaagaaaaaaagaaaaagaaaaaagaaaagaagagcaagtcagatgataaaaacgaaaataaaaacgacccagagaagaaaaagaagaaaaaggacaaagagaagaaaaagaaagaggagaaaagcaaagataagaaagaagaggagaagaaagaagttgtggttattgatccctcgggaaacacatattacaactggctgttttgcatcacattacctgttatgtacaactggacaatggttattgccagagcatgttttgatgaacttcaatctgattacctagaatattggctcattttggattacgtatcagacatagtctatttaatcgatatgtttgtacgaacaaggacaggttacctagaacaaggactgctggtaaaggaagaacttaaactcataaataaatataaatccaacttgcaatttaaacttgatgttctgtcactgataccaactgatttgctgtattttaagttagggtggaactatccagaaattagattaaacaggttgttacggttctctcgtatgtttgagttcttccagagaacagaaacaaggacaaactatccaaacatcttcaggatttccaaccttgttatgtatatcgtcatcattatccactggaatgcatgtgtgttctactctatttctaaagctattggatttggaaatgatacatgggtctaccctgatattaatgatcctgaatttggccgtttggctagaaaatacgtatacagcctttactggtctacactgactttgactaccattggtgaaacaccccctcccgtgagggattctgagtatgtctttgtggtggttgatttcctaattggagtgttaatttttgctaccatcgttggtaacataggttctatgatttccaacatgaatgcagccagagcagaatttcaagcaagaattgatgctatcaagcaatatatgcattttcgaaatgtaagcaaagatatggaaaagagggttattaaatggtttgactacctgtggaccaacaaaaaaacagttgatgagaaagaagtcttaaagtatctacctgataaactaagagcagaaattgccatcaacgttcacttagacacattaaaaaaggtacgcatttttgctgattgtgaagctggtctgttggtggagttggtcttgaaattgcaaccccaagtctacagtcctggagattatatttgcaagaaaggggatatcggacgagagatgtacattatcaaggaaggcaaactcgctgtggtggcagatgatggagtcactcagtttgtggtattgagcgatggcagctacttcggtgagatcagcattcttaacattaaagggagcaaagctggcaatcgaagaacggccaatattaaaagtattggctactcagacctgttctgtctctcaaaagatgacctcatggaagctctaactgagtacccagatgccaaaactatgctggaagagaaagggaagcagattttaatgaaagatggtctactggatctaaacattgcaaatgctggcagtgatcctaaagatcttgaagagaaggttactcgaatggaggggtcagtagacctcctgcaaaccaggtttgcccgaatcttggctgagtatgagtccatgcagcagaaactgaaacaaagattaaccaaggttgagaaatttctgaaaccgcttattgacacagaattttcaagtattgagggacctggagcggaaagtgggcccatcgactctacatagaaccgaaaagctggtcattaacagggacatgcctcatgatccttttgatcctatgactgacatcaactaaaatttaaaagaagaggaagactcagttgggaaatttttccatgaggaaaatgtgctttggtgcaaggtacaaggcccacaccctctctgagagatactatgattaaaaaagctttatatcttgggatttttcacaactgataatgtgcaaagatataaactgattaacttgtcagtgtctgtattttctgattttttcacatacgctcattttatgtaatattcttcataaaaatgaataagtagccctcactttcatgccatttccattgttgagtgaagcgtatttgaagtaactgagaattaccatgtacatcatatttgggataacatttttaaaaattagactgcaataaagtaaaattaattatgcaa

SEQ ID NO: 54106 - DNA, 2746 bp, Artificial Sequence
  derived and/or modified sequence
tttttcctgcttcttgaatggtagagagcagtctatagccagagactcgtccctagctcgagctgagctttcgcttgccgtccaccactgcccaccactgtcgtttgctgccatcgcagacctgctgctgacttccatccctctggatccggcaagggcctggattttgacaatgtcaagatttaccgtatatccctgtttgtttggatacaccagtgacgtccacttctagaagacaaagttatattacttaaacaaccaaagatatgaaactatccatgaagaacaatattatcaatacacagcagtcttttgtaaccatgcccaatgtgattgtaccagatattgaaaaggaaatacgaaggatggaaaatggagcatgcagctccttttctgaggatgatgacagtgcctctacatctgaagaatcagagaatgaaaaccctcatgcaaggggttcctttagttataagtcactcagaaagggaggaccatcacagagggagcagtacctgcctggtgccattgcactttttaatgtgaacaacagcagcaataaggaccaggaaccagaagaaaaaaagaaaaagaaaaaagaaaagaagagcaagtcagatgataaaaacgaaaataaaaacgacccagagaagaaaaagaagaaaaaggacaaagagaagaaaaagaaagaggagaaaagcaaagataagaaagaagaggagaagaaagaagttgtggttattgatccctcgggaaacacatattacaactggctgttttgcatcacattacctgttatgtacaactggacaatggttattgccagagcatgttttgatgaacttcaatctgattacctagaatattggctcattttggattacgtatcagacatagtctatttaatcgatatgtttgtacgaacaaggacaggttacctagaacaaggactgctggtaaaggaagaacttaaactcataaataaatataaatccaacttgcaatttaaacttgatgttctgtcactgataccaactgatttgctgtattttaagttagggtggaactatccagaaattagattaaacaggttgttacggttctctcgtatgtttgagttcttccagagaacagaaacaaggacaaactatccaaacatcttcaggatttccaaccttgttatgtatatcgtcatcattatccactggaatgcatgtgtgttctactctatttctaaagctattggatttggaaatgatacatgggtctaccctgatattaatgatcctgaatttggccgtttggctagaaaatacgtatacagcctttactggtctacactgactttgactaccattggtgaaacaccccctcccgtgagggattctgagtatgtctttgtggtggttgatttcctaattggagtgttaatttttgctaccatcgttggtaacataggttctatgatttccaacatgaatgcagccagagcagaatttcaagcaagaattgatgctatcaagcaatatatgcattttcgaaatgtaagcaaagatatggaaaagagggttattaaatggtttgactacctgtggaccaacaaaaaaacagttgatgagaaagaagtcttaaagtatctacctgataaactaagagcagaaattgccatcaacgttcacttagacacattaaaaaaggtacgcatttttgctgattgtgaagctggtctgttggtggagttggtcttgaaattgcaaccccaagtctacagtcctggagattatatttgcaagaaaggggatatcggacgagagatgtacattatcaaggaaggcaaactcgctgtggtggcagatgatggagtcactcagtttgtggtattgagcgatggcagctacttcggtgagatcagcattcttaacattaaagggagcaaagctggcaatcgaagaacggccaatattaaaagtattggctactcagacctgttctgtctctcaaaagatgacctcatggaagctctaactgagtacccagatgccaaaactatgctggaagagaaagggaagcagattttaatgaaagatggtctactggatctaaacattgcaaatgctggcagtgatcctaaagatcttgaagagaaggttactcgaatggaggggtcagtagacctcctgcaaaccaggtttgcccgaatcttggctgagtatgagtccatgcagcagaaactgaaacaaagattaaccaaggttgagaaatttctgaaaccgcttattgacacagaattttcaagtattgagggacctggagcggaaagtgggcccatcgactctacatagaaccgaaaagctggtcattaacagggacatgcctcatgatccttttgatcctatgactgacatcaactaaaatttaaaagaagaggaagactcagttgggaaatttttccatgaggaaaatgtgctttggtgcaaggtacaaggcccacaccctctctgagagatactatgattaaaaaagctttatatcttgggatttttcacaactgataatgtgcaaagatataaactgattaacttgtcagtgtctgtattttctgattttttcacatacgctcattttatgtaatattcttcataaaaatgaataagtagccctcactttcatgccatttccattgttgagtgaagcgtatttgaagtaactgagaattaccatgtacatcatatttgggataacattttta

SEQ ID NO: 54107 - DNA, 543 bp, Artificial Sequence
  derived and/or modified sequence
tttttcctgcttcttgaatggtagagagcagtctatagccagagactcgtccctagctcgagctgagctttcgcttgccgtccaccactgcccaccactgtcgtttgctgccatcgcagacctgctgctgacttccatccctctggatccggcaagatatgaaactatccatgaagaacaatattatcaatacacagcagtcttttgtaaccatgcccaatgtgattgtaccagatattgaaaaggaaatacgaaggatggaaaatggagcatgcagctccttttctgaggatgatgacagtgcctctacatctgaagaatcagagaatgaaaaccctcatgcaaggggttcctttagttataagtcactcagaaagggaggaccatcacagagggagcagtacctgcctggtgccattgcactttttaatgtgaacaacagcagcaataaggaccaggaaccagaagaaaaaaagaaaaagaaaaaagaaaagaagagcaagtcagatgataaaaacgaaaataaaaacgacccagagaaga

SEQ ID NO: 54108 - DNA, 589 bp, Artificial Sequence
  derived and/or modified sequence
cgagccctgctgcccggggcttgttgcgaattctcagggcccccgcaggcctgggagcggcctgtgataactggtgtatctggcaggagtagcagctgccccttggcgcgactgctggagccgcgaactagagaaacacagacacgcctcatagagcaacagcgtctctcggagcgtggagcccgccaagctcgagctgagctttcgcttgccgtccaccactgcccaccactgtcgtttgctgccatcgcagacctgctgctgacttccatccctctggatccggcaagatatgaaactatccatgaagaacaatattatcaatacacagcagtcttttgtaaccatgcccaatgtgattgtaccagatattgaaaaggaaatacgaaggatggaaaatggagcatgcagctccttttctgaggatgatgacagtgcctctacatctgaagaatcagagaatgaaaaccctcatgcaaggggttcctttagttataagtcactcagaaagggaggaccatcacagagggagcagtacctgcctggtgccattgcactttttaatgtgaacaacagcagcaataaggac

SEQ ID NO: 54109 - DNA, 2837 bp, Artificial Sequence
  derived and/or modified sequence
tggcaggagtagcagctgccccttggcgcgactgctggagccgcgaactagagaaacacagacacgcctcatagagcaacagcgtctctcggagcgtggagcccgccaagctcgagctgagctttcgcttgccgtccaccactgcccaccactgtcgtttgctgccatcgcagacctgctgctgacttccatccctctggatccggcaagggcctggattttgacaatgtcaagatttaccgtatatccctgtttgtttggatacaccagtgacgtccacttctagaagacaaagttatattacttaaacaaccaaagatatgaaactatccatgaagaacaatattatcaatacacagcagtcttttgtaaccatgcccaatgtgattgtaccagatattgaaaaggaaatacgaaggatggaaaatggagcatgcagctccttttctgaggatgatgacagtgcctctacatctgaagaatcagagaatgaaaaccctcatgcaaggggttcctttagttataagtcactcagaaagggaggaccatcacagagggagcagtacctgcctggtgccattgcactttttaatgtgaacaacagcagcaataaggaccaggaaccagaagaaaaaaagaaaaagaaaaaagaaaagaagagcaagtcagatgataaaaacgaaaataaaaacgacccagagaagaaaaagaagaaaaaggacaaagagaagaaaaagaaagaggagaaaagcaaagataagaaagaagaggagaagaaagaagttgtggttattgatccctcgggaaacacatattacaactggctgttttgcatcacattacctgttatgtacaactggacaatggttattgccagagcatgttttgatgaacttcaatctgattacctagaatattggctcattttggattacgtatcagacatagtctatttaatcgatatgtttgtacgaacaaggacaggttacctagaacaaggactgctggtaaaggaagaacttaaactcataaataaatataaatccaacttgcaatttaaacttgatgttctgtcactgataccaactgatttgctgtattttaagttagggtggaactatccagaaattagattaaacaggttgttacggttctctcgtatgtttgagttcttccagagaacagaaacaaggacaaactatccaaacatcttcaggatttccaaccttgttatgtatatcgtcatcattatccactggaatgcatgtgtgttctactctatttctaaagctattggatttggaaatgatacatgggtctaccctgatattaatgatcctgaatttggccgtttggctagaaaatacgtatacagcctttactggtctacactgactttgactaccattggtgaaacaccccctcccgtgagggattctgagtatgtctttgtggtggttgatttcctaattggagtgttaatttttgctaccatcgttggtaacataggttctatgatttccaacatgaatgcagccagagcagaatttcaagcaagaattgatgctatcaagcaatatatgcattttcgaaatgtaagcaaagatatggaaaagagggttattaaatggtttgactacctgtggaccaacaaaaaaacagttgatgagaaagaagtcttaaagtatctacctgataaactaagagcagaaattgccatcaacgttcacttagacacattaaaaaaggtacgcatttttgctgattgtgaagctggtctgttggtggagttggtcttgaaattgcaaccccaagtctacagtcctggagattatatttgcaagaaaggggatatcggacgagagatgtacattatcaaggaaggcaaactcgctgtggtggcagatgatggagtcactcagtttgtggtattgagcgatggcagctacttcggtgagatcagcattcttaacattaaagggagcaaagctggcaatcgaagaacggccaatattaaaagtattggctactcagacctgttctgtctctcaaaagatgacctcatggaagctctaactgagtacccagatgccaaaactatgctggaagagaaagggaagcagattttaatgaaagatggtctactggatctaaacattgcaaatgctggcagtgatcctaaagatcttgaagagaaggttactcgaatggaggggtcagtagacctcctgcaaaccaggtttgcccgaatcttggctgagtatgagtccatgcagcagaaactgaaacaaagattaaccaaggttgagaaatttctgaaaccgcttattgacacagaattttcaagtattgagggacctggagcggaaagtgggcccatcgactctacatagaaccgaaaagctggtcattaacagggacatgcctcatgatccttttgatcctatgactgacatcaactaaaatttaaaagaagaggaagactcagttgggaaatttttccatgaggaaaatgtgctttggtgcaaggtacaaggcccacaccctctctgagagatactatgattaaaaaagctttatatcttgggatttttcacaactgataatgtgcaaagatataaactgattaacttgtcagtgtctgtattttctgattttttcacatacgctcattttatgtaatattcttcataaaaatgaataagtagccctcactttcatgccatttccattgttgagtgaagcgtatttgaagtaactgagaattaccatgtacatcatatttgggataacatttttaaaaattagactgcaataaagtaaaattaattatgcaa

SEQ ID NO: 54110 - DNA, 405 bp, Artificial Sequence
  derived and/or modified sequence
tattagcagcatgaggacagactaatacatagggtgaaacttttgattatatatgtaaatatataaaaatagcctttccactaataagacttctttctcctcagatatgaaactatccatgaagaacaatattatcaatacacagcagtcttttgtaaccatgcccaatgtgattgtaccagatattgaaaaggaaatacgaaggatggaaaatggagcatgcagctccttttctgaggatgatgacagtgcctctacatctgaagaatcagagaatgaaaaccctcatgcaaggggttcctttagttataagtcactcagaaagggaggaccatcacagagggagcagtacctgcctggtgccattgcactttttaatgtgaacaacagcagcaataaggacca

SEQ ID NO: 54111 - DNA, 2863 bp, Artificial Sequence
  derived and/or modified sequence
aaatcagcatgtttattatttttaaaaaattagggcctggattttgacaatgtcaagatttaccgtatatccctgtttgtttggatacaccagtgacgtccacttctagaagacaaagttatattacttaaacaaccaaagatggagtctcgctcttcgcccaggctggagtgcagtggcgcgatctcggctcactgcagtcttcacctcccagattcaagcgatttccagctaatttttgtatttttagtagagatgggatttcaccatgttggccaagctggacttgaactcctgatctcaagtgatctgcccacctcagcctcccaaagtgctggtattacagatatgaaactatccatgaagaacaatattatcaatacacagcagtcttttgtaaccatgcccaatgtgattgtaccagatattgaaaaggaaatacgaaggatggaaaatggagcatgcagctccttttctgaggatgatgacagtgcctctacatctgaagaatcagagaatgaaaaccctcatgcaaggggttcctttagttataagtcactcagaaagggaggaccatcacagagggagcagtacctgcctggtgccattgcactttttaatgtgaacaacagcagcaataaggaccaggaaccagaagaaaaaaagaaaaagaaaaaagaaaagaagagcaagtcagatgataaaaacgaaaataaaaacgacccagagaagaaaaagaagaaaaaggacaaagagaagaaaaagaaagaggagaaaagcaaagataagaaagaagaggagaagaaagaagttgtggttattgatccctcgggaaacacatattacaactggctgttttgcatcacattacctgttatgtacaactggacaatggttattgccagagcatgttttgatgaacttcaatctgattacctagaatattggctcattttggattacgtatcagacatagtctatttaatcgatatgtttgtacgaacaaggacaggttacctagaacaaggactgctggtaaaggaagaacttaaactcataaataaatataaatccaacttgcaatttaaacttgatgttctgtcactgataccaactgatttgctgtattttaagttagggtggaactatccagaaattagattaaacaggttgttacggttctctcgtatgtttgagttcttccagagaacagaaacaaggacaaactatccaaacatcttcaggatttccaaccttgttatgtatatcgtcatcattatccactggaatgcatgtgtgttctactctatttctaaagctattggatttggaaatgatacatgggtctaccctgatattaatgatcctgaatttggccgtttggctagaaaatacgtatacagcctttactggtctacactgactttgactaccattggtgaaacaccccctcccgtgagggattctgagtatgtctttgtggtggttgatttcctaattggagtgttaatttttgctaccatcgttggtaacataggttctatgatttccaacatgaatgcagccagagcagaatttcaagcaagaattgatgctatcaagcaatatatgcattttcgaaatgtaagcaaagatatggaaaagagggttattaaatggtttgactacctgtggaccaacaaaaaaacagttgatgagaaagaagtcttaaagtatctacctgataaactaagagcagaaattgccatcaacgttcacttagacacattaaaaaaggtacgcatttttgctgattgtgaagctggtctgttggtggagttggtcttgaaattgcaaccccaagtctacagtcctggagattatatttgcaagaaaggggatatcggacgagagatgtacattatcaaggaaggcaaactcgctgtggtggcagatgatggagtcactcagtttgtggtattgagcgatggcagctacttcggtgagatcagcattcttaacattaaagggagcaaagctggcaatcgaagaacggccaatattaaaagtattggctactcagacctgttctgtctctcaaaagatgacctcatggaagctctaactgagtacccagatgccaaaactatgctggaagagaaagggaagcagattttaatgaaagatggtctactggatctaaacattgcaaatgctggcagtgatcctaaagatcttgaagagaaggttactcgaatggaggggtcagtagacctcctgcaaaccaggtttgcccgaatcttggctgagtatgagtccatgcagcagaaactgaaacaaagattaaccaaggttgagaaatttctgaaaccgcttattgacacagaattttcaagtattgagggacctggagcggaaagtgggcccatcgactctacatagaaccgaaaagctggtcattaacagggacatgcctcatgatccttttgatcctatgactgacatcaactaaaatttaaaagaagaggaagactcagttgggaaatttttccatgaggaaaatgtgctttggtgcaaggtacaaggcccacaccctctctgagagatactatgattaaaaaagctttatatcttgggatttttcacaactgataatgtgcaaagatataaactgattaacttgtcagtgtctgtattttctgattttttcacatacgctcattttatgtaatattcttcataaaaatgaataagtagccctcactttcatgccatttccattgttgagtgaagcgtatttgaagtaactgagaattaccatgtacatcatatttgggataacatttttaaaaattagactgcaataaagtaaaattaattatgc

SEQ ID NO: 54112 - DNA, 2280 bp, Artificial Sequence
  derived and/or modified sequence
atggagagcagaagcagccccagactggagtgcagcggcgccatcagcgcccactgcagcctgcacctgcccgacagcagcgacttccagctgatcttcgtgttcctggtggagatgggcttccaccacgtgggccaggccggcctggagctgctgatcagcagcgacctgcccaccagcgccagccagagcgccggcatcaccgacatgaagctgagcatgaagaacaacatcatcaacacccagcagagcttcgtgaccatgcccaacgtgatcgtgcccgacatcgagaaggagatcagaagaatggagaacggcgcctgcagcagcttcagcgaggacgacgacagcgccagcaccagcgaggagagcgagaacgagaacccccacgccagaggcagcttcagctacaagagcctgagaaagggcggccccagccagagagagcagtacctgcccggcgccatcgccctgttcaacgtgaacaacagcagcaacaaggaccaggagcccgaggagaagaagaagaagaagaaggagaagaagagcaagagcgacgacaagaacgagaacaagaacgaccccgagaagaagaagaagaagaaggacaaggagaagaagaagaaggaggagaagagcaaggacaagaaggaggaggagaagaaggaggtggtggtgatcgaccccagcggcaacacctactacaactggctgttctgcatcaccctgcccgtgatgtacaactggaccatggtgatcgccagagcctgcttcgacgagctgcagagcgactacctggagtactggctgatcctggactacgtgagcgacatcgtgtacctgatcgacatgttcgtgagaaccagaaccggctacctggagcagggcctgctggtgaaggaggagctgaagctgatcaacaagtacaagagcaacctgcagttcaagctggacgtgctgagcctgatccccaccgacctgctgtacttcaagctgggctggaactaccccgagatcagactgaacagactgctgagattcagcagaatgttcgagttcttccagagaaccgagaccagaaccaactaccccaacatcttcagaatcagcaacctggtgatgtacatcgtgatcatcatccactggaacgcctgcgtgttctacagcatcagcaaggccatcggcttcggcaacgacacctgggtgtaccccgacatcaacgaccccgagttcggcagactggccagaaagtacgtgtacagcctgtactggagcaccctgaccctgaccaccatcggcgagacccccccccccgtgagagacagcgagtacgtgttcgtggtggtggacttcctgatcggcgtgctgatcttcgccaccatcgtgggcaacatcggcagcatgatcagcaacatgaacgccgccagagccgagttccaggccagaatcgacgccatcaagcagtacatgcacttcagaaacgtgagcaaggacatggagaagagagtgatcaagtggttcgactacctgtggaccaacaagaagaccgtggacgagaaggaggtgctgaagtacctgcccgacaagctgagagccgagatcgccatcaacgtgcacctggacaccctgaagaaggtgagaatcttcgccgactgcgaggccggcctgctggtggagctggtgctgaagctgcagccccaggtgtacagccccggcgactacatctgcaagaagggcgacatcggcagagagatgtacatcatcaaggagggcaagctggccgtggtggccgacgacggcgtgacccagttcgtggtgctgagcgacggcagctacttcggcgagatcagcatcctgaacatcaagggcagcaaggccggcaacagaagaaccgccaacatcaagagcatcggctacagcgacctgttctgcctgagcaaggacgacctgatggaggccctgaccgagtaccccgacgccaagaccatgctggaggagaagggcaagcagatcctgatgaaggacggcctgctggacctgaacatcgccaacgccggcagcgaccccaaggacctggaggagaaggtgaccagaatggagggcagcgtggacctgctgcagaccagattcgccagaatcctggccgagtacgagagcatgcagcagaagctgaagcagagactgaccaaggtggagaagttcctgaagcccctgatcgacaccgagttcagcagcatcgagggccccggcgccgagagcggccccatcgacagcacctag

SEQ ID NO: 54113 - protein, 205 aa, Artificial Sequence
  derived and/or modified sequence
MSEGVDLIDIYADEEFNQDPEFNNTDQIDLYDDVLTATSQPSDDRSSSTEPPPPVRQEPSPKPNNKTPAILYTYSGLRNRRAAVYVGSFSWWTTDQQLIQVIRSIGVYDVVELKFAENRANGQSKGYAEVVVASENSVHKLLELLPGKVLNGEKVDVRPATRQNLSQFEAQARKRIPPRAHSRDSSDSADGRATPSENLVPSSAR

SEQ ID NO: 54114 - protein, 288 aa, Artificial Sequence
  derived and/or modified sequence
MSEGVDLIDIYADEEFNQDPEFNNTDQIDLYDDVLTATSQPSDDRSSSTEPPPPVRQEPSPKPNNKTPAILYTYSGLRNRRAAVYVGSFSWWTTDQQLIQVIRSIGVYDVVELKFAENRANGQSKGYAEVVVASENSVHKLLELLPGKVLNGEKVDVRPATRQNLSQFEAQARKRIPPRAHSRDSSDSADGRATPSENLVPSSARVDKPPSVLPYFNRPPSALPLMGLPPPPIPPPPPLSSSFGVPPPPPGIHYQHLMPPPPRLPPHLAVPPPGAIPPALHLNPAFFP

SEQ ID NO: 54115 - DNA, 618 bp, Artificial Sequence
  derived and/or modified sequence
atgtcagaaggagtggatcttattgacatctacgccgatgaggagttcaatcaggatcctgagttcaacaacaccgaccaaatcgatctgtacgacgatgtgcttactgctactagtcagccatcggacgacaggagcagcagcaccgagcctcctccgcccgtgagacaggagccgtcacctaaacctaacaacaaaacgccagctattttatacacgtacagcggcctacgtaaccgtcgtgccgctgtgtacgtcggaagtttcagttggtggaccactgaccagcagctcatccaagtcattaggtccatcggggtgtatgatgtggtggagctgaagttcgccgagaacagagccaatggtcaatccaaaggctacgccgaggttgttgtggcctcagagaacagtgtgcacaaactgcttgagctgttgccaggaaaagtgctgaacggggagaaagtggacgttagacctgcaacacggcaaaacttgtcacagtttgaggcccaagcgcggaagaggattccacccagggcgcatagccgcgattccagcgactccgccgacgggcgcgcaacgccatcagagaatctcgtccctagtagtgcccggtag

SEQ ID NO: 54116 - DNA, 1389 bp, Artificial Sequence
  derived and/or modified sequence
atgtcagagggagttgatctgattgatatatacgccgatgaagaatttaatcaagatcctgaattcaacaatactgatcagattgacctctacgatgacgtgctcacagccacctcacagccatccgatgatagaagttcctccaccgaaccccctcctccggttaggcaggagccctctcctaagcccaacaataagactccagcaatcctgtatacatattctggcctgcggaacaggagggccgcagtgtacgtggggagtttctcctggtggacgactgatcagcaactgattcaggtgatccggtccattggagtttacgatgttgtagagttgaagttcgcagaaaatagggccaacgggcagtctaagggctacgcggaggtggtggtcgcaagcgagaatagtgtacacaaactgctcgagcttttacccggtaaagtgctgaacggcgagaaggtggatgtgcggccggcaacacgacaaaacctgagtcagttcgaagctcaggccagaaagagaattcccccacgtgctcactctcgcgatagctccgacagcgctgacggacgggcgacccctagcgagaatctcgtacccagttcggctcgcgtggataaacctccctccgttttgccttactttaacagacctccttcagccctgcccttaatggggttgccacctccccctatccctcctccccctcctctgagttcttcattcggcgtgccacctcccccaccaggaatccattaccaacacctgatgcctccaccacccagattgcctccccaccttgctgtgccaccgccaggggccattccaccagcactgcatctcaatccagcattctttcctcctcccaacgctacagtgggcccgccaccagacacctacatgaaagcgtccgccccctataaccatcatgggagcagagacagcggcccaccgcctagcacggtgtccgaggctgagttcgaggatatcatgaagaggaaccgtgccattagtagttccgcaatttctaaagcagtgtctggcgcgtctgcaggcgactattcagatgccattgagacactcctgaccgcaatcgccgtcatcaaacagagtcgggtagccaacgacgagaggtgtcgcgtgctcatctcatcactaaaagactgccttcacggcatagaggcaaaaagttattcagttggagccagcggcagcagcagcagaaaaaggcatcgctccagagagagatcccctagccggtccagggaaagtagtagacggcacagagacttgcttcataatgaggacagacacgatgattatttccaggagaggaacagggaacacgaacggcacagggacagagaacgcgatagacaccactag

SEQ ID NO: 54117 - DNA, 1389 bp, Artificial Sequence
  derived and/or modified sequence
atgtcagaaggggtggaccttatagatatctacgccgacgaagagttcaaccaggaccccgagttcaacaacacagatcagatcgacctctacgacgacgtgctgacagctacatcccagccctctgacgacagaagcagttccactgaaccccccccacccgtcaggcaagaaccaagtcctaaaccaaataacaaaacccctgcaattctgtacacgtactctggattgaggaatagacgggccgctgtctacgtgggaagtttttcttggtggactacagatcagcagctcatccaggttattcggtctatcggagtctacgacgtcgtagagctcaagttcgctgagaaccgggcgaacggacagtctaaaggctatgctgaagtagtcgtagcctctgagaattcagtgcacaaactcttagagctgctgccaggtaaggtgctgaatggcgagaaagtcgacgtgaggccagccaccagacagaatctgtcacagttcgaggcccaggcgaggaagaggatccccccacgagctcattcacgggacagcagcgattcagccgatggcagagccacaccatcggagaatctggtaccttccagtgcccgagtggataaaccaccatccgttcttccctattttaataggcccccatcagccctcccgcttatgggcctccctccaccacccattcctcctcccccacccctgtcctcttcgttcggggttccacccccccctcctggcatacactatcagcaccttatgccaccgcccccccggctgccgccccatctcgcagtgccccctccaggcgctatcccacccgcactgcacctgaatcctgcattttttcctccaccaaacgctaccgttggtcctccccctgatacatacatgaaggccagcgcaccttataaccatcatggatcacgcgactcaggacccccacccagtaccgttagtgaagcggagtttgaggacatcatgaaacggaaccgagctattagttcttccgctatttccaaagccgtgtcaggcgcatcagcaggagactattcggatgccattgaaactttattgacagctatcgccgtaatcaagcagagccgtgttgccaacgacgagcggtgccgcgtcctcatctccagcttgaaggattgcttgcacggtattgaagccaagagctattctgttggcgccagcgggtcttccagcaggaaacgacacaggagtagggagcggtcaccctctcgctcaagggagagttccaggagacaccgggacctgctgcacaatgaggaccggcacgacgattattttcaggagagaaaccgggaacacgaacgccatcgagatcgggaaagggaccgccaccattag

SEQ ID NO: 54118 - DNA, 867 bp, Artificial Sequence
  derived and/or modified sequence
atgtcagaaggagtggacctcatagacatctacgcagacgaggagttcaatcaggacccagagttcaataatactgatcagatagatctttatgacgacgtacttaccgctacatctcagccttctgatgataggtctagctcgactgagcctcctccaccagttcgccaagagccaagcccaaaaccaaataataaaacaccagccatcctatatacttactccggcttgcggaacaggagagcggccgtatacgtagggtcgtttagctggtggaccactgatcaacagctgattcaggtaatccgtagcattggcgtctacgatgtggtcgagctgaagtttgccgagaacagagccaacggacagtccaaagggtacgccgaagtagtggtggcctccgagaacagcgtccataaactccttgaattgcttccaggcaaagtactgaacggagagaaagtagacgtccggcccgcaacgcgacaaaatctgagtcagttcgaggcccaagcccgcaagagaatcccaccacgagcgcattctcgcgatagcagcgactctgccgacggccgggccacacccagtgagaatctcgtgccttcttccgcgagggtcgacaaaccaccttcagtgctgccatatttcaatcgcccaccctctgcgcttccgctgatgggtctaccccctccaccaatcccaccgccacctcccctctcaagttctttcggagtgccacctccgcctcccgggatccactaccaacatctcatgccccccccaccacgcctaccccctcacctggcggtcccaccccctggagccatcccacctgctctccacctcaacccagctttttttccgtag

SEQ ID NO: 54119 - DNA, 618 bp, Artificial Sequence
  derived and/or modified sequence
atgtctgagggcgtggacctgattgacatctatgcagatgaggagttcaaccaggaccctgagttcaacaacacagaccagattgacctgtatgatgatgtgctgacagccaccagccagcccagtgatgacaggagcagcagcacagagcccccacctcctgtgcggcaggagcccagccccaagcccaacaacaagaccccagccatcctgtacacctacagcggcctgaggaacagaagagctgctgtgtatgtgggcagcttctcctggtggaccacagaccagcagctgatccaggtgatccgcagcattggagtgtatgatgtggtggagctgaagtttgctgaaaatagagccaacggccagagcaagggctacgccgaggtggtggtggcctctgaaaattctgtgcacaagctgctggagctgctgcccgggaaggtgctgaatggagagaaggtggatgtgcggcctgccacccggcagaacctgagccagtttgaggcccaggccaggaagagaattcctccccgggcccacagccgggacagcagtgacagcgcagatggccgggccacccccagcgagaacctggtgcccagcagcgccaggtag

SEQ ID NO: 54120 - DNA, 1389 bp, Artificial Sequence
  derived and/or modified sequence
atgtctgagggcgtggacctgattgacatctatgcagatgaggagttcaaccaggaccctgagttcaacaacacagaccagattgacctgtatgatgatgtgctgacagccaccagccagcccagtgatgacaggagcagcagcacagagcccccacctcctgtgcggcaggagcccagccccaagcccaacaacaagaccccagccatcctgtacacctacagcggcctgaggaacagaagagctgctgtgtatgtgggcagcttctcctggtggaccacagaccagcagctgatccaggtgatccgcagcattggagtgtatgatgtggtggagctgaagtttgctgaaaatagagccaacggccagagcaagggctacgccgaggtggtggtggcctctgaaaattctgtgcacaagctgctggagctgctgcccgggaaggtgctgaatggagagaaggtggatgtgcggcctgccacccggcagaacctgagccagtttgaggcccaggccaggaagagaattcctccccgggcccacagccgggacagcagtgacagcgcagatggccgggccacccccagcgagaacctggtgcccagcagcgcccgggtggacaagcccccatctgtgctgccctacttcaacagacctccttctgccctgcccctgatgggcctgcccccaccacccatccccccacctccacccctgagcagcagctttggagtgcccccacctcctcctggcatccactaccagcacctgatgcctcctccaccccggctgcccccccacctggccgtgcccccacctggggccatccccccagccctgcacctgaacccagccttcttccccccaccaaatgccaccgtgggccccccaccagacacctacatgaaggccagcgccccctacaaccaccacggcagccgggacagcggccccccacccagcacagtgtctgaggccgagtttgaggacatcatgaagaggaacagagccatcagcagcagcgccatcagcaaggctgtgtctggggccagcgctggggactacagtgatgccatcgagaccctgctgacagccatcgctgtgatcaagcagagccgggtggccaatgatgagcgctgccgggtgctgatcagcagcctgaaggactgcctgcacggcatcgaggccaagagctacagcgtgggcgccagcggcagcagcagcaggaagaggcacaggagccgggagaggagccccagccgcagccgggagagcagcagaagacaccgggacctgctgcacaatgaagatagacatgatgactacttccaggagaggaaccgggagcacgagcggcaccgggaccgggagcgggacagacaccactag

SEQ ID NO: 54121 - DNA, 867 bp, Artificial Sequence
  derived and/or modified sequence
atgtctgagggcgtggacctgattgacatctatgcagatgaggagttcaaccaggaccctgagttcaacaacacagaccagattgacctgtatgatgatgtgctgacagccaccagccagcccagtgatgacaggagcagcagcacagagcccccacctcctgtgcggcaggagcccagccccaagcccaacaacaagaccccagccatcctgtacacctacagcggcctgaggaacagaagagctgctgtgtatgtgggcagcttctcctggtggaccacagaccagcagctgatccaggtgatccgcagcattggagtgtatgatgtggtggagctgaagtttgctgaaaatagagccaacggccagagcaagggctacgccgaggtggtggtggcctctgaaaattctgtgcacaagctgctggagctgctgcccgggaaggtgctgaatggagagaaggtggatgtgcggcctgccacccggcagaacctgagccagtttgaggcccaggccaggaagagaattcctccccgggcccacagccgggacagcagtgacagcgcagatggccgggccacccccagcgagaacctggtgcccagcagcgcccgggtggacaagcccccatctgtgctgccctacttcaacagacctccttctgccctgcccctgatgggcctgcccccaccacccatccccccacctccacccctgagcagcagctttggagtgcccccacctcctcctggcatccactaccagcacctgatgcctcctccaccccggctgcccccccacctggccgtgcccccacctggggccatccccccagccctgcacctgaacccagccttcttcccctag

SEQ ID NO: 54122 - DNA, 618 bp, Artificial Sequence
  derived and/or modified sequence
atgagcgagggcgtggacctgatcgacatctacgccgacgaggagttcaaccaggacccggaattcaacaataccgaccagatcgacctctacgatgatgtgctcaccgccacctctcagccctctgatgatcgaagctccagtactgagccccccccccctgttcgccaggaaccaagtcctaaaccaaataacaaaacccccgcaatcctttatacctactccggactgcgcaatcggcgggctgcagtctacgtgggatcattctcctggtggaccactgaccaacagctcatccaagtgatcagatcaatcggtgtgtacgacgttgtggaactgaaatttgccgagaatcgcgctaacgggcaaagtaaaggttacgcggaagttgtcgtggcatcagaaaactctgtccataaactcctcgaactcctgcctgggaaagtgctgaatggcgagaaggttgacgtacgccctgccacgcgtcagaacctgagtcagttcgaggcccaggctaggaaacggatcccccccagggcccactcccgagactcatccgattctgcagacgggagggccacgccatctgaaaatctggtgccgtcttccgctaggtag

SEQ ID NO: 54123 - DNA, 1389 bp, Artificial Sequence
  derived and/or modified sequence
atgagcgagggcgtggacctgatcgacatctacgccgacgaggagtttaatcaggatccagagtttaacaacacggatcagatcgacctttacgatgatgtgctgaccgccacatctcagccatccgacgataggtcaagttccacggagccccccccccccgttcgccaagagccatcccccaagcctaacaataagacaccagcaatcctgtacacctattcaggcctgaggaatcggcgggccgctgtctacgttggctcgttctcttggtggaccacggatcagcagctgatacaggtgatcaggagcatcggcgtttacgacgtcgtggaattaaaattcgcagagaatcgggcaaacggacagtcaaaaggctacgctgaggtcgtggtggcaagcgagaatagcgtacataagctcctggaacttttgccaggcaaagtcctgaacggcgaaaaagtggacgtacggcctgctacgagacaaaatctctcccaattcgaagcgcaggcaaggaaacgcataccaccacgggcccatagccgcgactcgtctgattccgctgatgggagggcaactccctctgaaaatctagtgccgtccagtgccagagtggataagcccccctctgtgcttccttactttaatagacctccctctgcccttcctctgatgggtctgcctccacctccgatcccccccccccctccgctcagtagttcattcggggtaccccccccccctcctgggattcactaccagcacctaatgcccccaccaccccgcctgccacctcatctcgccgtgccacctccgggtgccatccccccggccctacaccttaatcccgcctttttcccccctcccaatgccaccgtcgggccgcctcccgatacatacatgaaggcttcggcgccctataaccaccatggctccagagactccggtccgccacccagcacggtatctgaagcggaattcgaagatattatgaaacggaatcgcgcaatcagttccagtgccatctcaaaagcagtgtccggtgctagcgccggggattacagcgatgctatcgagacccttctaacggctattgccgtcattaagcagtctcgtgtggctaatgacgagagatgccgggtgctgatcagctcactcaaagattgcttgcacggtattgaagcaaaatcgtattcagttggggcttcgggctcttcaagccggaagcggcacagaagtcgcgagaggagcccttcaaggtcccgagaatcatcaaggaggcatcgagacttgctgcacaacgaggaccgccatgacgattacttccaggagagaaatcgggaacatgaacgacaccgcgatagggagagggaccgtcaccactag

SEQ ID NO: 54124 - DNA, 1389 bp, Artificial Sequence
  derived and/or modified sequence
atgagcgagggcgtggacctgatcgacatctacgccgacgaggagttcaaccaggaccccgagtttaataacaccgaccagatcgatctgtacgatgacgtactaaccgcaacctctcaaccctcggatgacaggtcttccagtacagaaccgccgcctcccgtgcgacaggaaccgtccccaaaacccaacaacaaaactcctgctatactctatacgtattctggccttcgcaataggcgcgccgccgtgtatgtggggtcgttttcgtggtggacaacagaccagcaactgatacaggtgatccggtccatcggggtttacgatgtcgtcgaactaaagtttgccgagaacagggctaacggccaatcaaagggttatgccgaagtcgttgtcgcctcggagaatagtgtccacaaactgctggaactgctgccaggtaaagttttaaacggcgagaaggttgatgtgagacctgccaccaggcagaacctctcacagtttgaggctcaagctcgtaagcggatccctccccgagcacactccagagattctagcgacagtgccgatggtagggcaaccccaagcgagaacctggtgccttctagcgcgcgtgtagataagcccccaagcgtcctcccgtatttcaataggccaccatcggcactgcctctcatgggactcccgccgccccccatccctcccccgcctcccttatcctcctcatttggagttccacctccccctccgggcatccattatcaacacctcatgccgccacccccccgacttccaccacatctggcggtacccccacccggggccatcccgcctgcattgcatctcaaccctgcattttttccaccaccaaacgctactgtggggcctccacccgatacgtacatgaaagcctccgccccttataatcaccacgggtctagggactccggtccccccccatctacagtgagtgaagcggaattcgaagatattatgaaacgcaacagagccataagttcttctgccatctccaaagctgtttctggagcaagcgccggcgattactctgacgccattgaaaccctcttgacagctatcgccgtaattaagcagtctagggtggcaaatgatgagcgatgccgcgtcttaatctcctccctgaaggactgcttacacgggatagaggcaaaaagctacagtgtaggagcatccggctcctcctccaggaagcgacatcgcagcagggagcggtccccctccagatcccgcgagtcaagtcggcgtcacagggacttgttacacaatgaagatcgccacgatgactatttccaggagaggaaccgggagcatgagcggcaccgggatcgggagcgcgatcgacaccactag

SEQ ID NO: 54125 - DNA, 867 bp, Artificial Sequence
  derived and/or modified sequence
atgagcgagggcgtggacctgatcgacatctacgccgacgaggagttcaaccaggacccagaattcaacaacaccgaccagattgacctctacgacgacgtgctcactgcaacctcccagccttcagacgaccgcagttcctctaccgaacccccgcccccagtccgtcaagaacccagccccaaacccaacaataaaacacctgccattctatacacctatagtggtctccggaaccggcgcgccgcggtgtatgtggggtctttctcttggtggacaacggaccagcagctcatacaagtaatcagatcaattggcgtgtacgacgtagtggagttgaagtttgctgaaaatagggcaaatggacaaagtaaaggctacgctgaggtggtagtagcctctgaaaactctgtgcacaaactccttgagctgctgcccgggaaggttctcaacggggagaaggtggacgtgagaccagccacccggcagaacctttctcagtttgaggctcaggctagaaaaagaatcccgccgagagcccactcccgggattcatctgactctgccgacggtagggccacgcccagcgaaaacctggtcccctccagcgcaagggtggataagcctccaagcgtcctcccatattttaaccggccccctagcgccctccctcttatggggctgccacctccacctattccgcccccacctcccttaagctcctcttttggagtgcctccacctccaccgggcatccattatcagcatctgatgccaccccctccaagactgcccccgcaccttgcagttccaccacccggagctattccccccgctctgcatctgaacccagcattttttccctag

SEQ ID NO: 54126 - DNA, 618 bp, Artificial Sequence
  derived and/or modified sequence
atgtcggagggagtggatctgatcgatatctacgctgatgaggagtttaatcaggaccctgagtttaacaacactgaccagatcgacctgtatgatgatgtcctaactgctactagccagccatcagatgatcgcagcagctcaacggagcccccacccccagtgagacaggaaccctctcccaaacctaataacaagactccggctatactctacacctattccggactgcgaaacaggagggcagctgtctacgtggggtcattcagctggtggaccaccgatcaacagctgatccaggtgatccggtctatcggggtatatgatgtagtcgagctaaagttcgccgagaaccgggcaaacggacagagcaagggctacgccgaagtggtagtcgcatccgagaacagcgttcacaaacttctggagcttctgcctgggaaggtgctgaacggagaaaaggtggacgtacgacccgctacacggcaaaacttatcacagttcgaggcccaggcgagaaagagaattccccctcgcgctcactcacgtgattccagtgatagtgctgatggtagagctactccttcagagaatctcgtaccttcgtcagctagatag

SEQ ID NO: 54127 - DNA, 1389 bp, Artificial Sequence
  derived and/or modified sequence
atgagcgaaggcgtagatcttattgatatctatgctgatgaggagttcaaccaagatccggaattcaacaacactgatcagattgacctatacgacgatgtgctaaccgccacatctcagccctcagatgatcgatccagcagtaccgagcctccacccccagttagacaagagcccagtcctaagcctaacaacaaaacccccgctatcttgtatacatactcaggcttaagaaatcgtcgagccgcagtttacgtggggagttttagctggtggacaacagaccagcagctgatccaggtgattcggtcaataggagtctatgacgtcgtagagcttaagttcgccgaaaatcgggcaaacggtcagtccaagggctatgcagaggtcgtggtggcatccgagaattccgttcacaagctgctggaattattaccaggcaaagtattgaatggggagaaggtggacgttcggcctgcaacacgccagaacctgtcccagttcgaggcccaggctcggaagagaatccccccacgggctcattcacgcgacagcagcgattctgccgacggtcgcgctaccccttctgagaacctggtcccgagctcggcccgagtggacaaacccccttccgtcttaccctactttaatagacccccatccgcactgcctctcatgggcctgccccctccccctattccacctccaccaccgctctcttcctccttcggcgttccacctcctccgcctgggattcactatcagcacctgatgcctcctccccctaggctgcccccacacctggcagtgccccctcccggtgctattcccccagctctccacctcaatcccgcttttttcccaccacccaacgccacggtaggtccgcctccagacacatacatgaaagccagcgcgccttacaatcatcacggtagtagggattctgggcctcctccaagtaccgtatctgaagcagagtttgaggatattatgaagaggaatcgggctatctctagctccgcgatctcaaaagccgtaagcggcgcttccgctggagactactctgatgctatcgaaactctccttactgccatcgctgttataaaacagtcgcgtgtggccaatgatgagcggtgtagagtgcttatttcatctttgaaggattgtctgcatggaatagaggccaagtcatactccgttggggcatctggtagcagtagtcgaaaaaggcatcggtcgagagagcgtagcccgtcacgatcgcgagaaagctctcggagacatcgagatctcctgcacaacgaggataggcacgacgattattttcaagagagaaaccgggagcacgaaaggcaccgcgaccgggagagggataggcatcattag

SEQ ID NO: 54128 - DNA, 1389 bp, Artificial Sequence
  derived and/or modified sequence
atgtctgagggagttgatctaatcgacatatacgccgacgaggagttcaatcaggaccccgagttcaataacactgatcagatcgatctgtacgatgatgtgctaacggctactagtcagccttctgatgaccggtcaagttctactgaacccccacccccagtgagacaggagcccagccccaagcccaacaataaaacccctgctattttgtatacttactcaggtctgagaaatcgacgtgctgccgtgtacgtgggcagcttcagctggtggaccaccgaccaacagctgatccaggtgatccgatctatcggtgtgtatgacgttgttgagctaaagtttgcagagaacagagcaaacggtcagtccaagggatacgccgaggtggtggtcgccagtgaaaacagtgtgcacaagctcctggaacttttgccgggaaaggtcttgaacggagaaaaggtagatgtgaggccggctacccgccagaatctaagccagttcgaggcccaagcacggaagcggatcccgccaagagctcactcaagagatagcagcgattccgctgatgggagggctacaccgagcgagaacctggtccctagctctgcccgagttgataagcctccgtcagtactcccgtactttaaccgacctccgtctgccctgcctcttatgggcctgccccctccaccaatccccccaccccctcccctgtcatcttcatttggcgtgccgcctcccccacccggtatccactaccagcatctgatgccaccgcctccacgtttgcccccacaccttgcggtgcctcctcctggtgccatacccccagccttacacctcaatcctgccttcttccccccaccaaatgcaactgtgggcccacctccagacacttacatgaaggcctctgccccttacaatcatcacggaagcagagactccggcccacccccatcaactgtgtcagaggccgaattcgaggacattatgaagagaaatcgggctattagcagctctgcaatcagtaaggccgtgtccggcgcatctgctggtgattactctgacgcaatcgaaacgctgttgacggccatcgctgtgattaagcagtccagggttgcaaacgacgagcgttgccgcgttctcatctcttccctcaaagactgcctccacggaatcgaagccaaaagctactctgtcggggcatcgggctcatccagccgaaagcgacatagatctagagaaaggagcccaagcaggtcacgggagagttctagacgccatcgggatctgcttcataacgaggacagacacgacgactacttccaagagcgtaaccgggagcatgagcggcaccgtgatagggaacgcgaccgccaccactag

SEQ ID NO: 54129 - DNA, 867 bp, Artificial Sequence
  derived and/or modified sequence
atgagtgaaggcgtggatctaatcgacatctacgcggacgaagagtttaatcaagatccggaattcaacaacactgaccagatcgatctttatgatgatgtgctgacggctactagccagcccagtgacgacaggagctccagcacagagcccccacctcctgtacggcaggagcctagccctaaacccaacaataagactcctgcaatactgtacacatacagcgggttacggaatagacgcgcagcagtgtacgtcggtagcttctcttggtggactactgaccaacagcttatccaagtgataaggagtattggggtgtatgatgtagtcgaactgaaattcgccgaaaacagagccaatgggcagagcaagggctatgccgaagtcgtggtcgcctcagaaaattcagtgcacaagctactggagttgctcccagggaaggtgctgaatggtgaaaaagtggacgtcagacctgccacacggcagaatctttcccagtttgaagctcaggcgaggaaacgcatcccaccgcgagcgcacagtagggactcatccgattcagctgatggcagagccacccccagtgaaaatctcgtgcctagttccgccagggtggacaagcctccttccgtactgccatacttcaatcgacctccctctgctctccctttgatggggttgccgccacctcccatccctcctccccctcctctgtcatcctcatttggagttccccctcctcccccaggcatccattaccagcatttgatgccaccccctccccgtttacctccgcatcttgccgtcccgccaccgggagctatccctcccgctctgcacctcaatccagcctttttcccatag

SEQ ID NO: 54130 - DNA, 618 bp, Artificial Sequence
  derived and/or modified sequence
atgagcgagggcgtggacctgatcgacatctacgccgacgaggagttcaaccaggaccccgagttcaacaacaccgaccagatcgacctgtacgacgacgtgctgaccgccaccagccagcccagcgacgacagaagcagcagcaccgagccccccccccccgtgagacaggagcccagccccaagcccaacaacaagacccccgccatcctgtacacctacagcggcctgagaaacagaagagccgccgtgtacgtgggcagcttcagctggtggaccaccgaccagcagctgatccaggtgatcagaagcatcggcgtgtacgacgtggtggagctgaagttcgccgagaacagagccaacggccagagcaagggctacgccgaggtggtggtggccagcgagaacagcgtgcacaagctgctggagctgctgcccggcaaggtgctgaacggcgagaaggtggacgtgagacccgccaccagacagaacctgagccagttcgaggcccaggccagaaagagaatcccccccagagcccacagcagagacagcagcgacagcgccgacggcagagccacccccagcgagaacctggtgcccagcagcgccagatag

SEQ ID NO: 54131 - DNA, 1389 bp, Artificial Sequence
  derived and/or modified sequence
atgagcgagggcgtggacctgatcgacatctacgccgacgaggagttcaaccaggaccccgagttcaacaacaccgaccagatcgacctgtacgacgacgtgctgaccgccaccagccagcccagcgacgacagaagcagcagcaccgagccccccccccccgtgagacaggagcccagccccaagcccaacaacaagacccccgccatcctgtacacctacagcggcctgagaaacagaagagccgccgtgtacgtgggcagcttcagctggtggaccaccgaccagcagctgatccaggtgatcagaagcatcggcgtgtacgacgtggtggagctgaagttcgccgagaacagagccaacggccagagcaagggctacgccgaggtggtggtggccagcgagaacagcgtgcacaagctgctggagctgctgcccggcaaggtgctgaacggcgagaaggtggacgtgagacccgccaccagacagaacctgagccagttcgaggcccaggccagaaagagaatcccccccagagcccacagcagagacagcagcgacagcgccgacggcagagccacccccagcgagaacctggtgcccagcagcgccagagtggacaagccccccagcgtgctgccctacttcaacagaccccccagcgccctgcccctgatgggcctgccccccccccccatccccccccccccccccctgagcagcagcttcggcgtgcccccccccccccccggcatccactaccagcacctgatgccccccccccccagactgcccccccacctggccgtgcccccccccggcgccatcccccccgccctgcacctgaaccccgccttcttccccccccccaacgccaccgtgggccccccccccgacacctacatgaaggccagcgccccctacaaccaccacggcagcagagacagcggccccccccccagcaccgtgagcgaggccgagttcgaggacatcatgaagagaaacagagccatcagcagcagcgccatcagcaaggccgtgagcggcgccagcgccggcgactacagcgacgccatcgagaccctgctgaccgccatcgccgtgatcaagcagagcagagtggccaacgacgagagatgcagagtgctgatcagcagcctgaaggactgcctgcacggcatcgaggccaagagctacagcgtgggcgccagcggcagcagcagcagaaagagacacagaagcagagagagaagccccagcagaagcagagagagcagcagaagacacagagacctgctgcacaacgaggacagacacgacgactacttccaggagagaaacagagagcacgagagacacagagacagagagagagacagacaccactag

SEQ ID NO: 54132 - DNA, 867 bp, Artificial Sequence
  derived and/or modified sequence
atgagcgagggcgtggacctgatcgacatctacgccgacgaggagttcaaccaggaccccgagttcaacaacaccgaccagatcgacctgtacgacgacgtgctgaccgccaccagccagcccagcgacgacagaagcagcagcaccgagccccccccccccgtgagacaggagcccagccccaagcccaacaacaagacccccgccatcctgtacacctacagcggcctgagaaacagaagagccgccgtgtacgtgggcagcttcagctggtggaccaccgaccagcagctgatccaggtgatcagaagcatcggcgtgtacgacgtggtggagctgaagttcgccgagaacagagccaacggccagagcaagggctacgccgaggtggtggtggccagcgagaacagcgtgcacaagctgctggagctgctgcccggcaaggtgctgaacggcgagaaggtggacgtgagacccgccaccagacagaacctgagccagttcgaggcccaggccagaaagagaatcccccccagagcccacagcagagacagcagcgacagcgccgacggcagagccacccccagcgagaacctggtgcccagcagcgccagagtggacaagccccccagcgtgctgccctacttcaacagaccccccagcgccctgcccctgatgggcctgccccccccccccatccccccccccccccccctgagcagcagcttcggcgtgcccccccccccccccggcatccactaccagcacctgatgccccccccccccagactgcccccccacctggccgtgcccccccccggcgccatcccccccgccctgcacctgaaccccgccttcttcccctag

SEQ ID NO: 54133 - protein, 205 aa, Artificial Sequence
  derived and/or modified sequence
MKGSNRNKDHSAEGEGVGKRPKRKCLQWHPLLAKKLLDFSEEEEEEDEEEDIDKVQLLGADGLEQDVGETEDDESPEQRARRPMNAFLLFCKRHRSLVRQEHPRLDNRGATKILADWWAVLDPKEKQKYTDMAKEYKDAFMKANPGYKWCPTTNKPVKSPTPTVNPRKKLWAFPSDSSRDLPSPKKAKTEEMPQLNFGMADPTQM

SEQ ID NO: 54134 - DNA, 2826 bp, Artificial Sequence
  derived and/or modified sequence
atgaagggtagcaatcgcaataaagaccattccgcagagggcgagggcgtgggaaagagaccaaagcgtaaatgtttgcagtggcaccccctcctggcaaagaagctcctcgactttagtgaagaagaggaggaggaggatgaagaagaagacatcgacaaggtgcagctactgggggccgatggactggaacaggacgtcggcgagacagaagacgacgagtcccctgaacaacgggctagacgccccatgaatgctttccttttattttgcaaacgacacagaagcctggttagacaagagcaccccaggctcgacaaccgcggagctaccaaaattctcgctgactggtgggctgttctcgaccccaaggagaaacaaaagtataccgatatggccaaggagtacaaggatgcctttatgaaagcaaatccgggatataaatggtgcccaacgacaaataagccggtcaaatccccaaccccaactgtcaaccccaggaagaagctttgggcattcccgtccgacagctctagggatctgccgtcgcctaagaaagccaagactgaggagatgccacagctcaatttcggtatggctgatccaacacagatggggggcctgtcaatgttgttgttagctggcgaacacgccctggggacccccgaagtcagttctggaacctgtcgtccagatgtttctgagtcaccagaactgcgccagaaatcccctctcttccagttcgcagaaatctcatcttcgacctcacactcggacgccagtaccaagcagtgccagacctcggccctctttcagtttgccgaaatcagcagcaacacatcccaactggggggggcggaacccgtaaaaaggtgtggaaagtctgcccttttccagcttgctgaaatgtgcctggcaagtgaaggtatgaaaatggaagagagtaagctcatcaaggccaaggaaagcgacgggggaaggataaaggagcttgagaagggcaaggaagaaaaggagatcaaaatggagaaaaccgacgaaacaaggttacaaaaggaggcagagttcgaaaaaagtgcaaaagaaaatcttcgagactcaaaggaactgagaaacttcgaggccctacagatagatgatattatggccatcaagatggaggatcccaaagaaatcagaaaagaggagttggaggaggaccacaaatgtagccattttcccgatttcagctactcagcgagcagtaagataattatctccgatgttcctagtaggaaagatcacatgtgtcatccccacggcatcatgatcattgaggatcccgccgctctgaacaagcccgaaaaactcaaaaagaagaagaaaaagagtaaaatggaccggcatgggaacgacaaatcaactcctaaaaagacttgcaagaagagacagagttctgaaagtgacattgagtctgtgatttatactattgaggctgtcgcaaagggcgactgggggatcgagaaactgggcgacacaccacggaagaaggtgcgcaccagctcatccggtaaaggctcaatcttagatgcaaaacctcccaaaaagaaagtgaagagccgtgagaagaaaatgagcaaagaaaagagctccgacacaaccaaggagagcagacctccggacttcatttcgatctctgcaagcaaaaacatcagcggagagactccagaagggatcaaagccgaacctctcactccaatggaggacgccttgccacctagcctgtccggacaggcaaagcccgaggatagcgactgccaccggaaaattgagacttgcgggtcccggaaaagtgaaaggagttgcaagggcgccttatacaagactctcgtctccgaagggatgctgacctcgctgcgcgcaaatgtggatagagggaaaagaagctcagggaagggcaactcaagcgatcacgaaggctgttggaacgaagaatcctggacattttctcaatccggcacatccggcagcaaaaagttcaaaaagacaaaaccgaaagaagattgcctcctcggatccgctaagcttgatgaagagtttgagaaaaagtttaatagtttgccccagtacagccccgtaaccttcgaccggaaatgcgtaccagtgccccgcaagaaaaagaaaacagggaacgtgagttccgagccaaccaagaccagtaaaggtccatttcagtcacagaagaagaacttgtttcataagatcgtgtccaaatacaagcataagaaggaaaagcccaacgttcctgagaaagggagcggagataaatggagtaacaaacaactgttccttgatgccatccaccccactgaagctatcttttcggaggaccggaacacgatggaacctgtccataaagtgaaaaatatccccagtatttttaatactcccgaaccaacaaccacacaggagcccctggtgggctcacaaaagagaaaggcacggaagaccaagatcacccacctcgtgaggacagctgacggaagagtgagtcccgcagggggaacactagacgataaacccaaagaacagctgcagcgctctctccccaaagccaccgagacagattgcaatgataaatgctcgcacaatacagaggtgggggaaaccagaagttccactcctgagatgcccgcagtgtccgcatttttctcgctcgccgcactggctgaggttgccgctatggaaaacgtgcaccggggacagcgttctacccctctgacccatgacggacagccgaaagagatgcctcaggccccagtgctaatatcttgcgccgatcagtag

SEQ ID NO: 54135 - DNA, 2826 bp, Artificial Sequence
  derived and/or modified sequence
atgaagggcagcaacagaaacaaggaccacagcgctgagggggagggcgtgggcaagaggcccaagaggaagtgcctgcagtggcaccccctgctggccaagaagctgctggacttcagcgaggaggaggaggaggaggatgaggaggaggacatcgacaaggtgcagctgctgggcgcagatggcctggagcaggatgtgggggagacagaagatgatgagagccctgagcagagggcccggcggcccatgaatgccttcctgctcttctgcaagaggcacaggagcctggtgcggcaggagcacccccggctggacaacagaggagccaccaagatcctggccgactggtgggccgtgctggaccccaaggagaagcagaagtacacagacatggccaaggagtacaaggatgccttcatgaaggccaaccctggctacaagtggtgccccaccaccaacaagcctgtgaagagccccacccccaccgtgaaccccaggaagaagctgtgggccttccccagcgacagcagccgggacctgcccagccccaagaaggccaagacagaggagatgccccagctgaactttggcatggctgaccccacccagatgggcggcctgtccatgctgctgctggccggggagcacgccctgggcaccccagaggtgagcagcggcacctgcaggccagatgtgtctgagagccctgagctgcggcagaagagccccctcttccagtttgctgagatcagcagcagcaccagccacagtgatgccagcaccaagcagtgccagaccagcgccctcttccagtttgctgagatcagcagcaacaccagccagctgggcggcgctgagcctgtgaagagatgtgggaagagcgccctcttccagctggccgagatgtgcctggccagcgagggcatgaagatggaggagagcaagctgatcaaggccaaggagagtgatggcggccgcatcaaggagctggagaagggcaaggaggagaaggagatcaagatggagaagacagatgagacccggctgcagaaggaggccgagtttgagaagagcgccaaggagaacctgcgggacagcaaggagctgaggaactttgaggccctgcagattgatgacatcatggccatcaagatggaggaccccaaggagatcaggaaggaggagctggaggaggaccacaagtgcagccacttcccagacttctcctacagcgccagcagcaagatcatcatcagtgatgtgcccagcaggaaggaccacatgtgccacccccacggcatcatgatcattgaagatcctgctgccctgaacaagccagagaagctgaagaagaagaagaagaagagcaagatggacagacatggaaatgacaagagcacccccaagaagacctgcaagaagaggcagagcagcgagagtgacattgaatctgtcatctacaccatcgaggccgtggccaagggggactggggcatcgagaagctgggggacacccccaggaagaaggtgaggaccagcagcagcggcaagggcagcatcctggatgccaagccacccaagaagaaggtgaagagccgggagaagaagatgagcaaggagaagagcagtgacaccaccaaggagagccggcccccagacttcatcagcatcagcgccagcaagaacatctctggagagaccccagagggcatcaaggccgagcccctgacccccatggaggatgccctgccccccagcctgagcggccaggccaagccagaagattctgactgccacaggaagattgagacctgtggcagcaggaagtctgagaggagctgcaagggggccctgtacaagaccctggtgtctgagggcatgctgaccagcctgcgggccaacgtggaccggggcaagaggagcagtggaaaaggaaacagcagtgaccacgagggctgctggaatgaggagagctggaccttcagccagagcggcaccagcggcagcaagaagttcaagaagaccaagcccaaggaggactgcctgctgggcagcgccaagctggatgaggagtttgagaagaagttcaacagcctgccccagtacagccctgtgacctttgacagaaaatgtgtgcctgtgcccaggaagaagaagaagacaggaaatgtgtcctctgagcccaccaagaccagcaagggccccttccagagccagaagaagaacctcttccacaagatcgtgtccaagtacaagcacaagaaggagaagcccaacgtgcctgagaagggcagcggggacaagtggagcaacaagcagctgttcctggatgccatccaccccacagaggccatcttctctgaagatagaaacaccatggagcctgtgcacaaggtgaagaacatccccagcatcttcaacaccccagagcccaccaccacccaggagcccctggtgggcagccagaagaggaaggccaggaagaccaagatcacccacctggtgaggacagcagatggccgggtgtccccagctgggggcaccctggatgacaagcccaaggagcagctgcagaggagcctgcccaaggccacagaaacagactgcaatgacaagtgcagccacaacacagaggtgggggagaccaggagcagcaccccagagatgcctgctgtgtctgccttcttcagcctggccgccctggccgaggtggccgccatggagaatgtgcaccggggccagaggagcacccccctgacccatgatggccagcccaaggagatgccccaggcccctgtgctgatcagctgtgccgaccagtag

SEQ ID NO: 54136 - DNA, 2826 bp, Artificial Sequence
  derived and/or modified sequence
atgaagggcagcaaccggaacaaggaccacagcgccgagggcgagggtgtcggtaaacgaccaaagaggaagtgccttcaatggcacccccttttggcgaaaaaacttctggacttttcggaggaagaggaagaagaagatgaagaggaagatatcgacaaagtgcagctgttgggtgctgacggcttggaacaggacgttggagagaccgaggacgacgaatcccccgaacagcgggcccgtaggcctatgaacgccttcctgctgttttgcaaacgtcatcgttctctggtccggcaggaacaccctaggctcgacaacagaggagccaccaaaattctggccgactggtgggccgtcctggacccaaaagaaaaacaaaagtacactgacatggccaaggaatataaggacgcctttatgaaagctaatccaggttacaaatggtgtcccacgacaaacaaacctgtcaaatctcccacccccacagtgaacccccgaaaaaagctgtgggcattcccctctgattcctcgagggacctcccctctccaaagaaagcaaaaaccgaggaaatgcctcagctaaattttggaatggccgacccgacacagatgggcgggctttcaatgttactgcttgccggagagcacgctctcggcactccggaagtttcttcgggtacttgtcgacccgacgtgagtgagtcccctgagctacggcagaaaagtcccctgttccagtttgccgagatttcttcttcaacatctcatagtgacgccagcacaaagcagtgccagacttctgcactgttccagttcgccgaaatttcttcaaacacctcgcaattgggcggtgcggagcctgtgaaacggtgcggaaaatcagccctgttccaactggcggaaatgtgcctggcctccgagggaatgaagatggaggaaagtaagctgattaaggctaaagaaagtgatggaggtcgcattaaggaactcgagaagggtaaggaagaaaaggaaataaaaatggaaaagacggatgagacacgcctccaaaaagaggcagagttcgagaagtccgctaaagagaatttgcgggactccaaggaactcagaaacttcgaagcacttcagatcgacgatattatggcgataaagatggaggatcccaaagagattcgcaaggaagagctcgaagaagatcacaagtgctcacattttccagactttagctatagcgccagttcaaagattatcatcagcgatgtgccatccagaaaggaccacatgtgtcatccgcatggaatcatgatcattgaggatcctgctgctcttaataaacctgaaaagcttaaaaagaaaaagaagaagtctaaaatggaccggcatgggaacgacaagagtacccccaaaaaaacttgtaagaagagacaaagttccgaatctgacattgagagcgttatttacaccatcgaggccgtggctaaaggtgactggggtatcgagaagctcggcgacacccctaggaaaaaagtccgcacaagttcttctgggaaaggaagcattctggacgctaagcctcccaaaaagaaagtgaagtcccgcgagaaaaagatgtcgaaggagaagtcttctgatacgaccaaggaatcaaggccccccgacttcatcagtatttctgcctccaagaatatatcaggagaaacaccggaaggtatcaaagccgagcccttgactccaatggaggatgccttgccaccctcattgtctgggcaagctaaaccagaggactccgattgccatagaaaaattgagacatgtggtagcaggaaaagcgaacggtcttgcaagggggccttgtataagaccttggtttcggaggggatgctcacctcccttagggccaacgtggacaggggtaaacggagctctgggaaaggcaactcttccgaccacgaaggttgttggaatgaggaatcctggaccttttcccagtcaggcacatctggctctaagaaattcaaaaaaacgaagcccaaggaagattgtctgctgggttccgcaaaactggatgaggagtttgaaaagaaattcaattctctgcctcagtactcgccagtcacttttgatcgcaaatgtgtccctgttccacggaaaaagaagaaaacaggtaatgtgtcatcagagccaacaaagactagcaaaggtcctttccagagccagaagaagaaccttttccacaagatagtgtccaagtacaagcacaagaaagagaagcctaacgtacctgagaagggcagtggcgataaatggtcgaacaaacagctgttcctggacgcaatacaccccactgaagcaatttttagtgaggatcggaatactatggaacccgttcacaaagtaaaaaacattccaagcatatttaacactcctgagccaaccacaacccaagaacctctggtcggctcacagaaacgaaaagccaggaagaccaagattactcacctcgtgcggacggcagacggtagagttagtcctgccgggggaaccttagatgataaacccaaagaacagttgcagagatcgctgcccaaagctactgaaacagattgtaatgataaatgttcccataatactgaggtaggagagactaggtctagtaccccagagatgcctgccgtatctgcgttcttctcactcgctgctctggccgaagtggccgcaatggagaacgtgcacaggggtcagcggtccacacctttgactcacgatgggcagcctaaggaaatgccccaggctccagtgctcatctcctgcgccgaccagtag

SEQ ID NO: 54137 - DNA, 2826 bp, Artificial Sequence
  derived and/or modified sequence
atgaagggatccaatagaaacaaagatcattctgccgaaggagagggtgtgggaaaaaggccaaagaggaaatgtctgcaatggcatcccctccttgcaaagaagcttttggatttttcagaggaggaagaggaagaggatgaagaagaagatatagataaggtgcaactgctcggcgctgatggtttggaacaagatgtgggcgaaaccgaggatgacgaatctccagaacagagggcccgtcgccctatgaacgccttccttctattttgcaagagacatagatcactggttcgacaggaacacccccgtctcgacaatcgaggcgctacaaaaatcttggccgactggtgggcagtgctggatccaaaggagaaacaaaaatacacagacatggctaaagagtataaagatgcattcatgaaggcaaaccccggttacaaatggtgcccgacgacaaataaacccgtaaagtccccaacccccacagtcaacccaaggaagaaactctgggccttccctagtgatagcagccgggaccttccctctcccaagaaagccaagaccgaagagatgccccagcttaattttggcatggcggaccccacacagatgggcggattgtccatgcttcttttggctggggagcacgcactgggtaccccagaagtctcaagcgggacctgtagaccagacgtgtcagagtcaccggaattaaggcagaagagtcctctgtttcagtttgctgagatcagttccagtacaagccatagcgacgcttcaacaaaacagtgccagacgagcgcactgttccagttcgctgagatttccagcaatactagccagctcggaggcgctgagccagtgaaaaggtgcggtaagtctgccctttttcagctggccgagatgtgcttggctagcgaaggaatgaagatggaggagtctaaattgataaaggccaaggagtctgacgggggtaggattaaagagctggaaaaggggaaagaggagaaggaaatcaagatggagaaaacagacgagactcgcctccaaaaggaggcagagtttgagaagagcgccaaggagaaccttagggactctaaggagctgcggaactttgaagccctacagattgatgacatcatggcaattaagatggaggatccaaaagagatcaggaaggaggagctcgaggaagatcataagtgtagccattttcctgatttctcatactccgctagcagtaagataattattagcgatgtgccatccagaaaggatcatatgtgtcacccccatggcatcatgatcattgaagatcctgctgctttaaataaacccgagaagttgaagaagaagaaaaagaaaagcaagatggaccgacacgggaatgataaatccacaccgaaaaaaacttgtaaaaagcgtcaatcatccgagtcagacattgaatctgtgatctacactatcgaggccgtggctaagggcgactggggcatcgagaaactgggggacacccctaggaagaaagtgagaacgtcgtcctcggggaagggctcaatcctggacgcaaagccaccgaagaaaaaagtcaagtctagagaaaaaaagatgtcaaaagaaaaaagctcagacactaccaaggagtcgagaccaccagattttatatccatcagcgcctcgaagaacatctccggagaaactccggaagggatcaaggctgagcctctcacccctatggaggacgctctccctccttcactaagtggacaagcaaagcctgaggacagcgattgtcataggaaaattgaaacatgcggctcccgcaagtcggaaaggtcttgcaaaggagcgttatacaaaactctggtgtcagaaggaatgttgaccagtcttagggccaatgttgatcgcggaaagaggagctcaggcaaaggcaacagttccgatcatgagggctgttggaatgaggaaagttggaccttctcgcagtcggggacatccgggagcaaaaagttcaagaagaccaagcccaaggaggattgcctgctcggatcagctaagctggatgaagagttcgagaaaaagttcaatagccttccccaatattcccctgtgacgttcgacagaaagtgcgtcccagtgccgagaaaaaaaaagaaaactgggaacgtgagttctgaacccaccaaaaccagcaagggaccattccagtctcagaagaaaaacctcttccacaagattgtttcaaagtataagcacaaaaaagagaagcccaatgtgcctgaaaagggctcaggagataagtggagcaataaacagcttttccttgatgccatccatcccactgaagcgattttcagcgaagaccgaaacaccatggagcccgtgcataaggttaagaatatacctagcattttcaatacaccggaacccaccaccactcaagaacccctggtgggctcacaaaagagaaaagcaaggaagaccaagatcactcacttagttcgcacggctgacgggagagtgagccctgccggtgggacgctggacgacaaacctaaggagcagctgcaacggagcttacccaaggcgaccgaaactgattgtaacgacaagtgcagtcataatactgaagtcggagagacccgtagctccacgccagagatgcccgcagtgtcagccttctttagcttggctgcactggccgaagtggcagcaatggaaaatgtacaccgtgggcagcggagcacgccactgacgcacgacggccagcccaaggaaatgcctcaggcccctgtgttgatctcctgtgcagaccagtag

SEQ ID NO: 54138 - DNA, 8892 bp, Artificial Sequence
  derived and/or modified sequence
aaaatgagtgttttcagtctctccgggttgcatgtactgtatgtggagcagtgtacagtgaagcggaggcagagcggctccgcgagcttctctccactttcccatagagaaaccctgactggccgctgagggctagctacacacacgccctcacgcccggcgagcccgcgaggtcactatcatatgacaaaggctttgccgcagttcatcttcctccctgtgtactttccatttgccttcctggaatcctgctgcatcacagaagctggaagttctgatgttccactgaaatcacaatggaaagtcttgacttgactggtcacagtaatgaaaggcagtaatagaaataaggatcattcagcagaaggagaaggggttggaaaacgaccaaaacgaaagtgtcttcagtggcatccattgctagcaaagaaacttcttgatttttcagaagaggaagaagaggaagacgaagaggaggatattgataaggttcaacttcttggggccgatggcctagagcaagatgttggtgaaactgaagatgatgaatcaccagagcagcgagcccggagaccaatgaatgcatttcttttattttgcaaacgccatcgctctcttgtacgtcaggaacaccccaggcttgataaccgaggtgctaccaagatactagctgattggtgggctgttcttgatccaaaggaaaagcagaaatacacagacatggccaaggagtataaggatgcatttatgaaagcaaatcctggctacaaatggtgtcctaccacaaacaagcctgtgaaatcccccccactgtcaatccacgaaagaaactttgggccttcccatctgactcttcaagagacttgccaagccccaagaaagcaaagactgaagaaatgcctcagcttaactttggaatggctgatcctactcaaatgggaggcctgagtatgctgctgttagctggagaacatgctcttggcacaccagaggtatcctctggcacatgcaggcctgatgtttcagaatctcctgaattacgtcagaagtcaccattgtttcagtttgccgagatatcttcaagtacgtcccactctgatgcttctacaaagcagtgtcaaacatctgccttgtttcagtttgcagagatttcttcaaacacttcgcagttgggtggtgctgagcctgtaaaacgctgtggaaagtctgcactctttcaactggcagagatgtgcctggcatcagaagggatgaaaatggaagaatcaaagctaataaaagcaaaagaatccgatggtggaagaattaaagaattagagaagggaaaggaagaaaaagaaattaaaatggagaaaacagatgaaactaggttacagaaggaagcagaatttgaaaaatcggctaaggaaaatttaagagattctaaggaattgagaaattttgaggcattgcaaatagatgacataatggctataaaaatggaagatcccaaagaaattagaaaggaagagttagaagaagatcacaaatgtagtcattttcctgatttttcttattctgccagtagcaagataataattagtgatgttcccagtagaaaggatcatatgtgccatcctcatggaattatgatcattgaggatcccgcagcattaaacaagccagaaaagctaaaaaagaaaaagaagaaaagcaaaatggatcgacatggaaatgataaatccacacccaagaagacttgcaaaaagaggcagtcttcggaatctgacattgagagcgtcatatataccattgaagccgtcgcaaaaggagactggggcatagagaaacttggagatacccctcgcaagaaggtccgcacatcctcaagtggcaagggaagcattttggatgccaagccaccaaagaaaaaagtgaaatcaagagagaagaaaatgtcaaaggagaaatcctcagacaccaccaaagagtcaagacctccagatttcattagtatttctgctagcaagaacatttctggtgagacaccagagggtataaaagcagaaccattgacccctatggaagatgcactaccacccagcctatcaggacaggccaagcctgaggacagtgactgtcacagaaaaatagaaacttgtggttccaggaaatccgagaggtcttgcaaaggtgctctttataaaaccctggtgtctgagggcatgctcacctctctgcgagctaatgttgacagaggaaaacgaagctcaggaaaaggaaactcctctgatcatgaagggtgttggaatgaagaaagctggacatttagtcagagtgggaccagtgggagcaagaagttcaagaagacaaagccaaaagaagactgtctccttggctccgcaaagctggatgaagaatttgaaaaaaaattcaacagcctccctcaatatagtcctgttacatttgaccggaaatgtgtacctgtcccaagaaaaaagaagaagactggaaatgtgtcctcagaaccgactaaaaccagcaaaggtcctttccagtctcagaaaaagaacttattccacaaaattgtcagcaaatataagcacaaaaaggagaagcccaatgttccggaaaaaggaagtggggataaatggtcaaacaagcaactcttcttggatgccattcaccctacagaagccatattttcagaagacagaaacaccatggagcctgttcataaggttaaaaatatcccatccattttcaacactccagagccaacaacaacgcaagaacctttggtgggcagccaaaagagaaaagcaaggaaaaccaagattacacaccttgtcaggacagcagatggccgggtatcaccagcaggaggtactttggatgacaaaccaaaggaacaactgcagaggagtctccctaaagcaactgagacagactgcaatgacaaatgctcacacaacaccgaggtcggggagacgcggagcagtactccagaaatgcctgccgtgtctgcgttctttagcctcgctgcgctggctgaagtggcagccatggaaaatgtgcacagaggtcagaggtcaactccgctcacccatgatggacagccaaaagaaatgccgcaggctcctgtacttatttcctgcgctgaccagtgaagcgccctttcattgtaaaacattgtgctttacctactaccctagccttgtctttaccgagggatgctagtgagtccaagtggtggaaaatatagactgcaaacaagtgcttgttgccccacacggcccagattcacttgaagcagaagttagcatcctgggccagtttgttctctcagaacccagaatctttgagggtaaggttatctgtctgatactgagcagaaacagaatgatcctggagctttgctttctattgaaggcttttgacggtaataggtggtaacttggtaaaaggctgcctttactgtagctcacccagcatctcttttaccaaccagagagtgtgaaactagtttcatatattacctagttattctttcaaaacaaaacaaaaaaaaaacaaaaactgacgcactgcactagttattattagatattcttagtcttttttgtacatggagatttaagtttaagatggtttatataataggttatacctacatttatattgtagaataaatattaaaaagcctgttccagagactcccaagcagcctgggcaggcagatgtaccattgttagtggtgtatgctcggcctcgtggtccatatattctgcacttttatatttgccaccagaatggtagtttgctggcaaaaaaaaaaaaaaaagagagagagaaaaaattacaactcttacaatctgaatttttttcttagccttgagtgaccaagaagaatttgcttgaggcaaattgtggcaaatattttcccagacaggggaagagtcctgcagattacagattactggtgttttcatgccttgaggattcttttatttttacataggggtctaagtgaccaatggattgttcatacaaacaaaaaaaaagacaaaaatattattcagaagtgaccttagtattacttcactattctaaacacattgaagacactcacttcatgtggacttggagctacagaccttttacatccatcacagattggctggacgggttgcaattgctatgcacagcctgattggcactgcaggtttttagagccattttgagtttgtgttgtttaggaggtactgagtcaatgatgagggaggtatgcctgaccagagtgggactctcagtcatagatccacctgcaagtctctgtttcctttttgtgttttgttgcttttgaacataaaaccaaccatacataagcagcgccaagtggattaactggcttagaacattcaacatattgacttaaccacctgacattcacagtgtcttgtttcctagcaacagatgcaaagtgataaatcaaaattagtctgaggctacagattttacagggtatttgttctatagcacaaagtatttccccactcttgcgtcacagcacaaactaccaaattttaattattggattccagcaataatttttaatggttttcaaactggcggaattttgacagtgctagttcgagtttgaagcttttgaattagatctctaaatggtgacagtttacatggttttatctagctttcttatttatacttgactgaattgtaatgattttttttctaattgtaatttgacgtaatagccatacaaaaaatgactctattcatactaggtttagcttctcatggttgtagatattacttcagttccggtgctggaaaatatgtacaacatactaacaggattgaaaaaaaaatagaggtttttcttcttgtttttttttccaaagcaggtaaagagggtagcaaagcatcggaatgatgtgctcaaaaatgcatattcctggtggggatggaggaagaaggcattagtaaaaggttaatcaaacgttacaacttaaccccattcatgtaggaataaatcaagtgagcagttccagacttttgcataatatttttactatgatgctgttttattaatattttctaaatttcaaaacaaaaagtgaatgtttgaaattgctgggtcccgatgttggtggctgttggagttttggaccactcgctagcagtgatttgaagattataattagctaaaatccaaaacaaaaaaccaacaacaaaaattgtatggtgcggaacatgcaccttgacaatggtactaacttgttattctatagaacacgttagaatagatctatttttgccagagcaccctccttcagtcctccgattacatttcactagagttccttacgagattgctgtatattcctgggaccttttttaaaaaaaaaaaaagcaaaacaaaagattactttttttctatgtgattaatatcttacttgatctgcttttcctaaacctcagtggcttttcccttaggcagggttgggggtgggagggcaacttactggagatgactgttttcagatactttaaaacaaacctttttgtagaaatgcttaatttttaagcggttaggcactgagagtagcagaaatcctgcaaagctttatagttccttagactcaccttgtcgattctctgagtaaagtcttgatttcaataattgtgcttctcatgccctgaaactgctggagaggagtgttgttattttcaggtaacaacattcgttagcacaaatatttcagaccaatattagtgctctccaccccaccttttgttatcattttcatttcatttctctcattcttttttattttggaaaatcatattgctatagtgtgtactttaatctgccagcagataccatctacactaacatttgtcccacagcatcctcaagagaaaaagttgttgcaccttatatatatctcaagcaaaccaaaatatgatgctcttctgctttgttttattctaaattgttgtatcatatctttctgaaaccattctgaatttagttgaaattatcaatatttatgcttttaaccttaatttctggattcaagcctgtatataaatcttttgaaaaaaaattgtcctagcccttctctgcgatgctggaagtagaagattgcgtctcagatggagacgcagtactgttccagttttctttagccttttatttatttagttattctgggtatttcctatgtaattttgaagtgtgtagagtatattatagtaactgaagctgcagctgtaagaagctgagtgaaagaaaaaatactgtaagacatccttaaagtttttatttgtttgggtactgtatatgagatcaggaaaaagaaaaatgtcccacagccacattggaaatacaggttcttgtccccaaattaggttagttcccagattttagatcaaaactgttaattcattaaaaccccttttaaaaggtaaattctactgttgtaattccgatagtctttttcccacaaatatcagaaatatatttatttaattctgtcagatgagctttctaccgatgccatgtcccaaagccatgttaaaataattcccacgttatcattgtgattctacttcctgccactaaaattgctggagaaacaaaataatgatggaacactatgaacaaaaaggagcatctgaactggtctggttatttagaatccaatgtgttcaaatccttttgttttcttattaagtcagatgctactgtaagtcagataaaattttgtttgcactctgcagtctttggctcaatgtatggaaatgtttgcacctatgtaaagtcacaagctaattacaaattgctacagaacaggagtaagctgaaaactgaatgccatgttttgtttataaggtggggaggggagggaaaataccaaaaaactctgttccaagtttggcatttgacattaatgtgaagcagtgggaccatgctgcctgctaaactactgtatgaatcgtaaatgttctgaagacgagcagctggaggctggaggatggcattccatacagcaaaggagaagcacccaccacttcatctgggaaaaggaaggaaattgcaggaggcctggagccatcatttgtaaaggggatgttgcggggtgtgatgctgttgaggagattcaccttcaattgcactgctccacagagccctcatataaggccaatcctaatgggctacctcggctttaaaagttaatttcagtaagtcctgtttcaaaagtttgtctttttttgcttctaccttcagtgccactattttccactgcagtgttttgacttcacaaactgcctcctccagagagaacaatgtattgctgaaaatgggcagtagaagcaaatgctgttgttacatttgacctataaagtattcagagtgactgctaggtagaaattaaaacttagctttcccaaatagctccttattttgcaccttataaaaagtatactaattgttaattagatgttgcttttgtttatacaagcattcccaaagaactagatttggattttgttttgagtttttggatttttaaaaattatcttatttagattgactaacagcatacttacaattttaaaagaagctgttgttcagttcatcttaccagatgtgtctggcgaagtattcagggtttgatggactgctttactttcgtttggaagtgatagctaagtttattatactctatattaaacaactttgttcatttcactgaggaccttatcttccttatatttcagaacaaagaagcaacaagcgtgaataaaaagacaaatgtatttgactccctcataatccccatctgtatgtgctacccttccttcaaatatataaatgtgcatcttttttttaaaaaaaaaaaaaaaaaaggttcctcttctggccaaatttgatctatggtggtatgattcatactgttaaattgagagaggaaaccttgtggttaaaaattatatggctgctgttttctttttgcagtcagtggtcaaaactgatcatgtgcttaaatcgatttttatgcacagaactagttattgtgaacattactgctccctccaaagatttcctgataacttgggccagaggtggttactgagtaacaaggatctaattcaatgcctcaaaactcttccacccacaatgcaaatcttacctcacaagctctaacctaaatcacagagacatgcatgtttcatgcattaacactgatttcgctctgtggcccaccagaggggtgggctcatgtcccctgactcctcacatgagtgcctcagctctaagagccgtggaacggggggtagggaaggtttgcgatctggagctcagcaactggctcagcaacgttttctccatttcattagcactaaacaagtctcttgctctcaggaatttgtcagaaaaaagaataaaatcacctgagactccacataccagattataaactcttctcgtaggtttgaattgcttactcacatgtcataaattaaccacagcttcatttgaccaccaggtctaaagtctgttgacagtttcagcatgactgaatcgctcattttttttttttgctttcagaaattggcttggttctctttagagttggtgtaaacatgccatgtaataaatgatttccacttaatggtacaacagaattattgctttcttagatgtatgtgtagtaaaagtcaatatacacatttatataatttctttcttcaaaatcttatacctaatttgatatttctaaaaattgcacatgtaagtcatgtgtataacatgctaaagtactttaactgtgatcttaaaactgaataaaaatatttaataaaactttgaaatatttt

SEQ ID NO: 54139 - DNA, 2826 bp, Artificial Sequence
  derived and/or modified sequence
atgaagggcagcaacagaaacaaggaccacagcgccgagggcgagggcgtgggcaagagacccaagagaaagtgcctgcagtggcaccccctgctggccaagaagctgctggacttcagcgaggaggaggaggaggaggacgaggaggaggacatcgacaaggtgcagctgctgggcgccgacggcctggagcaggacgtgggcgagaccgaggacgacgagagccccgagcagagagccagaagacccatgaacgccttcctgctgttctgcaagagacacagaagcctggtgagacaggagcaccccagactggacaacagaggcgccaccaagatcctggccgactggtgggccgtgctggaccccaaggagaagcagaagtacaccgacatggccaaggagtacaaggacgccttcatgaaggccaaccccggctacaagtggtgccccaccaccaacaagcccgtgaagagccccacccccaccgtgaaccccagaaagaagctgtgggccttccccagcgacagcagcagagacctgcccagccccaagaaggccaagaccgaggagatgccccagctgaacttcggcatggccgaccccacccagatgggcggcctgagcatgctgctgctggccggcgagcacgccctgggcacccccgaggtgagcagcggcacctgcagacccgacgtgagcgagagccccgagctgagacagaagagccccctgttccagttcgccgagatcagcagcagcaccagccacagcgacgccagcaccaagcagtgccagaccagcgccctgttccagttcgccgagatcagcagcaacaccagccagctgggcggcgccgagcccgtgaagagatgcggcaagagcgccctgttccagctggccgagatgtgcctggccagcgagggcatgaagatggaggagagcaagctgatcaaggccaaggagagcgacggcggcagaatcaaggagctggagaagggcaaggaggagaaggagatcaagatggagaagaccgacgagaccagactgcagaaggaggccgagttcgagaagagcgccaaggagaacctgagagacagcaaggagctgagaaacttcgaggccctgcagatcgacgacatcatggccatcaagatggaggaccccaaggagatcagaaaggaggagctggaggaggaccacaagtgcagccacttccccgacttcagctacagcgccagcagcaagatcatcatcagcgacgtgcccagcagaaaggaccacatgtgccacccccacggcatcatgatcatcgaggaccccgccgccctgaacaagcccgagaagctgaagaagaagaagaagaagagcaagatggacagacacggcaacgacaagagcacccccaagaagacctgcaagaagagacagagcagcgagagcgacatcgagagcgtgatctacaccatcgaggccgtggccaagggcgactggggcatcgagaagctgggcgacacccccagaaagaaggtgagaaccagcagcagcggcaagggcagcatcctggacgccaagccccccaagaagaaggtgaagagcagagagaagaagatgagcaaggagaagagcagcgacaccaccaaggagagcagaccccccgacttcatcagcatcagcgccagcaagaacatcagcggcgagacccccgagggcatcaaggccgagcccctgacccccatggaggacgccctgccccccagcctgagcggccaggccaagcccgaggacagcgactgccacagaaagatcgagacctgcggcagcagaaagagcgagagaagctgcaagggcgccctgtacaagaccctggtgagcgagggcatgctgaccagcctgagagccaacgtggacagaggcaagagaagcagcggcaagggcaacagcagcgaccacgagggctgctggaacgaggagagctggaccttcagccagagcggcaccagcggcagcaagaagttcaagaagaccaagcccaaggaggactgcctgctgggcagcgccaagctggacgaggagttcgagaagaagttcaacagcctgccccagtacagccccgtgaccttcgacagaaagtgcgtgcccgtgcccagaaagaagaagaagaccggcaacgtgagcagcgagcccaccaagaccagcaagggccccttccagagccagaagaagaacctgttccacaagatcgtgagcaagtacaagcacaagaaggagaagcccaacgtgcccgagaagggcagcggcgacaagtggagcaacaagcagctgttcctggacgccatccaccccaccgaggccatcttcagcgaggacagaaacaccatggagcccgtgcacaaggtgaagaacatccccagcatcttcaacacccccgagcccaccaccacccaggagcccctggtgggcagccagaagagaaaggccagaaagaccaagatcacccacctggtgagaaccgccgacggcagagtgagccccgccggcggcaccctggacgacaagcccaaggagcagctgcagagaagcctgcccaaggccaccgagaccgactgcaacgacaagtgcagccacaacaccgaggtgggcgagaccagaagcagcacccccgagatgcccgccgtgagcgccttcttcagcctggccgccctggccgaggtggccgccatggagaacgtgcacagaggccagagaagcacccccctgacccacgacggccagcccaaggagatgccccaggcccccgtgctgatcagctgcgccgaccagtag

SEQ ID NO: 54140 - protein, 578 aa, Artificial Sequence
  derived and/or modified sequence
MESKDEVSDTDSGIILQSGPDSPVSPMKELTHAVHKQQRALEARLEACLEELRRLCLREAELTGTLPAEYPLKPGEKAPKVRRRIGAAYKLDDWALHREDPLSSLERQLALQLQITEAARRLCLEENLSRQARRQRKHSMLQEEKKLQELQRCLVERRRNSEPPPAAALPLGRELSASDDSSLSDGLLLEEEESQVPKPPPESPAPPSRPLPPQTLEGLQPTGPEAGSPERAPVQNSPWKETSLDHPYEKPRKSSEPWSESSSPATTPQDGPSASSLWLLEPASYHVVPIRGVPGQWQGRTSAPATPEIQGRRGQSQSLRVDSFRAGPEGRGRSAFPRRRPTHYTVTVPDSCFPATKPPLPHAACHSCSEDSGSDVSSISHPTSPGSSSPDISFLQPLSPPKTHRHRGAWVPAGSRELVAHHPKLLLPPGYFPAGRYVVVAESPLPPGEWELRRAAPGPAYEEEGTPLRYQRLVPSRSRIVRTPSLKDSPAGRGLSKAAVSEELKWWHERARLRSTRPHSLDRQGAFRVRSLPLGREGFGRALGPRAQVPTVCVLRRSPDGAPVQVFVPEKGEIISQV

SEQ ID NO: 54141 - protein, 123 aa, Artificial Sequence
  derived and/or modified sequence
MESKDEVSDTDSGIILQSGPDSPVSPMKELTHAVHKQQRALEARLEACLEELRRLCLREAELTGTLPAEYPLKPGEKAPKVRRRIGAAYKLDDWALHREDPLSSLERQLALQLQITEAARRLC

SEQ ID NO: 54142 - DNA, 1737 bp, Artificial Sequence
  derived and/or modified sequence
atggagagcaaggacgaggtgagcgacaccgacagcggcatcatcctgcagagcggccccgacagccccgtgagccccatgaaggagctgacccacgccgtgcacaagcagcagagagccctggaggccagactggaggcctgcctggaggagctgagaagactgtgcctgagagaggccgagctgaccggcaccctgcccgccgagtaccccctgaagcccggcgagaaggcccccaaggtgagaagaagaatcggcgccgcctacaagctggacgactgggccctgcacagagaggaccccctgagcagcctggagagacagctggccctgcagctgcagatcaccgaggccgccagaagactgtgcctggaggagaacctgagcagacaggccagaagacagagaaagcacagcatgctgcaggaggagaagaagctgcaggagctgcagagatgcctggtggagagaagaagaaacagcgagcccccccccgccgccgccctgcccctgggcagagagctgagcgccagcgacgacagcagcctgagcgacggcctgctgctggaggaggaggagagccaggtgcccaagcccccccccgagagccccgccccccccagcagacccctgcccccccagaccctggagggcctgcagcccaccggccccgaggccggcagccccgagagagcccccgtgcagaacagcccctggaaggagaccagcctggaccacccctacgagaagcccagaaagagcagcgagccctggagcgagagcagcagccccgccaccaccccccaggacggccccagcgccagcagcctgtggctgctggagcccgccagctaccacgtggtgcccatcagaggcgtgcccggccagtggcagggcagaaccagcgcccccgccacccccgagatccagggcagaagaggccagagccagagcctgagagtggacagcttcagagccggccccgagggcagaggcagaagcgccttccccagaagaagacccacccactacaccgtgaccgtgcccgacagctgcttccccgccaccaagccccccctgccccacgccgcctgccacagctgcagcgaggacagcggcagcgacgtgagcagcatcagccaccccaccagccccggcagcagcagccccgacatcagcttcctgcagcccctgagcccccccaagacccacagacacagaggcgcctgggtgcccgccggcagcagagagctggtggcccaccaccccaagctgctgctgccccccggctacttccccgccggcagatacgtggtggtggccgagagccccctgccccccggcgagtgggagctgagaagagccgcccccggccccgcctacgaggaggagggcacccccctgagataccagagactggtgcccagcagaagcagaatcgtgagaacccccagcctgaaggacagccccgccggcagaggcctgagcaaggccgccgtgagcgaggagctgaagtggtggcacgagagagccagactgagaagcaccagaccccacagcctggacagacagggcgccttcagagtgagaagcctgcccctgggcagagagggcttcggcagagccctgggccccagagcccaggtgcccaccgtgtgcgtgctgagaagaagccccgacggcgcccccgtgcaggtgttcgtgcccgagaagggcgagatcatcagccaggtgtag

SEQ ID NO: 54143 - DNA, 372 bp, Artificial Sequence
  derived and/or modified sequence
atggagagcaaggacgaggtgagcgacaccgacagcggcatcatcctgcagagcggccccgacagccccgtgagccccatgaaggagctgacccacgccgtgcacaagcagcagagagccctggaggccagactggaggcctgcctggaggagctgagaagactgtgcctgagagaggccgagctgaccggcaccctgcccgccgagtaccccctgaagcccggcgagaaggcccccaaggtgagaagaagaatcggcgccgcctacaagctggacgactgggccctgcacagagaggaccccctgagcagcctggagagacagctggccctgcagctgcagatcaccgaggccgccagaagactgtgctag

SEQ ID NO: 54144 - DNA, 1737 bp, Artificial Sequence
  derived and/or modified sequence
atggagtctaaagacgaggtctccgataccgattcaggcatcattctacaatctggtccagatagcccagtgtctcccatgaaagagctgactcacgccgtgcacaagcagcagcgagcattggaggctcgtcttgaagcctgtctcgaggagctgaggcgcctctgcttgcgagaggccgagttaacaggcacactgccagctgagtacccgctgaaacccggggagaaagctccaaaagtccgcagaaggataggagccgcctacaaactcgacgactgggcactgcatcgtgaagacccactcagcagtttggaacggcagctcgccctgcagctgcaaattaccgaagccgcacggcgactttgcctcgaggaaaacctgtctcgccaagccaggcggcagagaaagcattctatgcttcaggaggagaagaaacttcaggaactgcaaaggtgcttagtggagaggagacgcaattccgaacctcccccagcagccgcgctgcctctcgggagagagctctctgcatccgatgactcaagcctgtctgatgggttgctcctggaagaagaggaaagtcaggtccccaaaccaccaccagagtcccctgctcctccgtcaagacccctgcccccccagacccttgagggccttcagccaacaggcccagaagctggctctcccgagcgagctcccgtgcaaaatagcccatggaaggagacgtcactagaccacccatatgaaaagccccggaaatcatccgagccgtggtcagagagttctagccctgcgaccactcctcaggacggcccatcagcctcaagtctgtggctgcttgaacctgctagttaccatgtggtgccgatcaggggcgtgcccggtcagtggcaggggcgcacatcagcaccggccacccccgaaattcaggggcgacgtggccaatctcagagcctgagggtcgactctttccgcgctggtccagagggaaggggccggagcgccttcccacgccggagacctactcactacaccgtaaccgtccctgattcatgctttccggcaactaagccgccactaccccatgccgcatgccacagttgttccgaggattccggcagtgacgtgtcttctattagccatcctactagccctggaagctcctcccctgacatctcctttctgcaaccactgtcaccccccaagactcacagacataggggcgcatgggtgcctgccgggagtcgcgagctggttgcccaccatccaaagctgcttcttcctcccggctatttccctgccggaaggtatgtcgtggtggctgaatctccccttccaccgggggagtgggaactccgaagagcagctcctgggcccgcctatgaagaggaaggcacacctctcagataccaaaggctcgtgcccagtagatcacgcattgtcaggacccccagtctgaaggactctccagcaggcaggggcttgagcaaggctgccgtgtccgaagaattaaagtggtggcacgagagagcaagattacgctccacccgcccccacagtttggatagacagggcgcttttcgcgttcgctctcttccattgggccgggaaggctttggccgcgcgctcggtcccagagctcaggtcccaacagtctgcgtgctgagaaggtctcctgatggagctcccgtgcaggtgtttgtccccgagaagggggaaattatctcacaggtctag

SEQ ID NO: 54145 - DNA, 372 bp, Artificial Sequence
  derived and/or modified sequence
atggagtcaaaggacgaggtgagcgataccgattcagggatcatccttcagagcggccctgactcccccgtaagtccaatgaaggaacttacccatgcagttcataagcagcagcgtgcgctggaggctaggctggaggcctgccttgaagaactcaggcgactgtgtttgcgtgaggccgaactcaccgggacactgccagccgaatatcccctgaagccaggggagaaggctcccaaggtgagaagaagaattggcgcagcttataagctggacgattgggccctgcatagagaagatcctctgagtagtctggaaaggcagcttgccctccaacttcagattaccgaggccgcacgtcggttgtgctag

SEQ ID NO: 54146 - DNA, 1737 bp, Artificial Sequence
  derived and/or modified sequence
atggagagcaaggatgaggtgtctgacacagacagcggcatcatcctgcagagcggccctgacagccctgtgagccccatgaaggagctgacccatgctgtgcacaagcagcagagggccctggaggcccggctggaggcctgcctggaggagctgcggcggctgtgcctgcgggaggccgagctgaccggcaccctgcctgctgagtaccccctgaagccaggagagaaggcccccaaggtgagaagaagaattggagctgcctacaagctggatgactgggccctgcaccgggaggaccccctgagcagcctggagcggcagctggccctgcagctgcagatcacagaggccgcccggcggctgtgcctggaggagaacctgagccggcaggcccggcggcagaggaagcacagcatgctgcaggaggagaagaagctgcaggagctgcagcgctgcctggtggagaggagaagaaattctgagcccccacctgctgctgccctgcccctgggccgggagctgagcgccagtgatgacagcagcctgagtgatggcctgctgctggaggaggaggagagccaggtgcccaagcccccacctgagagccctgccccacccagccggcccctgcccccccagaccctggagggcctgcagcccaccggccctgaggccggcagccctgagcgggcccctgtgcagaacagcccctggaaggagaccagcctggaccacccctatgagaagcccaggaagagcagcgagccctggagcgagagcagcagccctgccaccaccccccaggacggccccagcgccagcagcctgtggctgctggagcccgccagctaccacgtggtgcccatccggggcgtgcccggccagtggcagggccgcaccagcgccccagccaccccagagatccagggccggcggggccagagccagagcctgcgggtggacagcttccgggccggccctgagggccggggccgcagcgccttccccaggagaagacccacccactacacagtgacagtgcctgacagctgcttccctgccaccaagccacccctgccccatgctgcctgccacagctgcagcgaggacagcggcagtgatgtgagcagcatcagccaccccaccagccctggcagcagcagcccagacatctccttcctgcagcccctgagcccccccaagacccaccgccacagaggagcctgggtgcctgctggcagccgggagctggtggcccaccaccccaagctgctgctgcccccaggctacttccctgctggccgctacgtggtggtggccgagagccccctgcccccaggagagtgggagctgcggcgggccgcccctggccctgcctatgaggaggagggcacccccctgcgctaccagaggctggtgcccagccgcagccgcatcgtgaggacccccagcctgaaggacagccctgctggccggggcctgagcaaggctgctgtgtctgaggagctgaagtggtggcatgagcgggcccggctgcggagcacccggccccacagcctggaccggcagggcgccttccgggtgcgcagcctgcccctgggccgggagggcttcggccgggccctgggcccccgggcccaggtgcccaccgtgtgtgtgctgcggcgcagcccagatggagcccctgtgcaggtgtttgtgcctgagaagggggagatcatcagccaggtgtag

SEQ ID NO: 54147 - DNA, 372 bp, Artificial Sequence
  derived and/or modified sequence
atggagagcaaggatgaggtgtctgacacagacagcggcatcatcctgcagagcggccctgacagccctgtgagccccatgaaggagctgacccatgctgtgcacaagcagcagagggccctggaggcccggctggaggcctgcctggaggagctgcggcggctgtgcctgcgggaggccgagctgaccggcaccctgcctgctgagtaccccctgaagccaggagagaaggcccccaaggtgagaagaagaattggagctgcctacaagctggatgactgggccctgcaccgggaggaccccctgagcagcctggagcggcagctggccctgcagctgcagatcacagaggccgcccggcggctgtgctag

SEQ ID NO: 54148 - DNA, 1737 bp, Artificial Sequence
  derived and/or modified sequence
atggagagcaaggacgaggtgagcgacaccgacagcggcatcatcttgcagtccggtcctgatagtcctgtgtcacccatgaaggaactaacccacgcagtgcacaagcagcagcgcgctttggaggctcgactggaagcctgtttggaagaactccgtagactgtgccttcgggaagccgagctgactggtacactgcccgctgaatatccacttaaaccgggcgaaaaggcccctaaagtgaggaggagaatcggagccgcctataaacttgacgactgggccttacaccgggaagaccccttaagtagcctcgaaaggcaactcgctctgcagctgcagatcactgaggccgcgcggagactgtgcctcgaggaaaatttgtccaggcaggccaggcggcaaaggaagcacagcatgctgcaagaagagaaaaagttgcaggaactgcaaaggtgccttgtcgaacggcgcaggaacagtgaaccgccacctgctgcagccttgccactcgggagagagctaagtgcatcagatgactcttccctgtctgatggactactgctggaagaggaagagtcccaagtgcccaaacctccaccagagagcccagcacccccctctcggcccttgcccccccagacgcttgagggcctccaaccgactgggcctgaagccggcagtcctgagcgagcgcccgtacagaactcaccatggaaggagacgagcctcgatcacccgtacgaaaagccaagaaagtctagcgaaccatggtcagaaagtagttctccagctactacgccacaggatggtcccagcgcttcttcactctggctgctagaaccagcatcgtaccatgtggtgcctatccgcggcgtccccggacagtggcagggtcgcacttctgcccccgcaactccagagatccagggacgaaggggccagtcgcagtcactgcgtgtggattcgttcagggctggccccgaaggccgggggcggagtgcatttccacggaggcgacccacccactacacggtcacagtaccagacagctgcttccccgctacaaaacctccactaccccacgctgcctgccacagttgtagtgaggatagcggctccgatgtttcgagtatctcccaccccacgtccccagggtcctccagccccgacattagctttctccaaccgctctctccaccaaagactcacagacacagaggggcttgggtacctgccggatctagagagctcgttgcgcaccacccaaaattgcttctgccacctggctattttcctgctggccgctacgttgtggtggctgagagtcctctacctccgggcgagtgggaactgagacgggcagctccaggacctgcctacgaagaggaggggacccctcttaggtaccagcgcctagtaccaagtcgctcgaggatagtaagaacgccttccttgaaggactctcctgccggaaggggactgtcgaaggccgccgtcagcgaagaactgaagtggtggcacgaaagggcaagactgcgtagcaccagaccccacagcctggaccgacagggcgcctttcgcgtgcgaagtctgccactgggacgcgagggtttcggcagggccctcggtcctcgcgcccaggtacccactgtttgtgtgctgaggcgcagcccagatggggccccggtgcaggttttcgtgccggagaagggcgagatcatttcacaggtctag

SEQ ID NO: 54149 - DNA, 372 bp, Artificial Sequence
  derived and/or modified sequence
atggagagcaaggacgaggtgagcgacaccgacagcggcatcatcctgcagtcagggcccgactctcccgtgagcccaatgaaggaactaacgcacgccgttcataaacagcaacgcgccctggaggcgcgattggaggcatgtcttgaggaactgcggcggctgtgcctgagggaggctgagctgaccggaacgctgccagccgaatatccactcaagccaggcgagaaggccccaaaggtgcgcagacgtattggcgccgcttacaagcttgatgactgggccttgcacagggaggacccgttgagttccctggaacgccagctggctctccagctgcagattactgaggctgcccgtagactttgttag

SEQ ID NO: 54150 - DNA, 462 bp, Artificial Sequence
  derived and/or modified sequence
atgcacctgaagaacccccccaaccccccccacctgccccccgtggagtcggcccgcaataaaacaattctacttcagcagttatctgcattgccagatagtcccctgtggggactggggatgacgagggtgttcttggctgacctgaccgaggcttctctggccctctgctcgctgatctccctaaagtgcttgccaggagactctggaaagagtggaaaagtctccctggggttggccggatgcagcggcatacagacatccgtggctccatcttcgcagcaacagaagacggcatcatgtgggaccggtggaagatgctgcgggccgcacccagccagcccgagaaagggagctgggagtcatagcactgcacgagcttggcctagcaagggcgaagcacagcttttcagtcccccagcatctgcaggatgctccggaactcagcctggggttacatag

SEQ ID NO: 54151 - DNA, 1737 bp, Artificial Sequence
  derived and/or modified sequence
atggagtctaaggatgaagtgtccgatacagactccggaattatattacagagtggccctgatagcccggtctcgcccatgaaagaacttactcacgcagtccataagcaacaaagggcactggaagcgcgactggaagcttgtctggaggagctgcggcgtctctgcctgagggaagccgaattgacaggcaccttaccagcggaatacccgctgaaacccggagaaaaagcaccaaaggtgcggagaagaattggcgcagcatacaagttggacgattgggccttgcatagagaagatcccctgagctctttggagaggcagctggcattacagctccagattacggaagccgcacggcgtctctgtcttgaggagaacttatcgcggcaagctaggcgtcagaggaagcattcaatgctacaggaggaaaaaaaactacaggagctgcagcgctgcctcgtcgagcgcagaagaaattcagagccacctcccgcagctgccctaccgcttggacgggagttgagcgccagcgacgatagctcgctgtctgatgggttactcctcgaagaagaggagtcacaggtgcctaagcctcctcctgaatcccctgcccctccaagtagaccgttgccaccccagactctggagggactgcaaccgacaggtccagaggcaggctcacctgagagagcccctgtccagaacagcccgtggaaggaaacaagcctggatcacccttacgaaaagcctcgaaagagtagtgagccctggagcgagagttcctcccccgcaacaacgccacaggacggtcccagcgcttcatccctgtggctgctggaacctgcctcttatcatgtagtacccattcggggagtgccaggccaatggcaaggaaggacctctgcccctgcaaccccggagatccagggcaggaggggacaatctcaaagcctccgcgtggattcttttcgggctggaccggaagggaggggtcgcagcgcattcccacgaaggcgcccaacacattatacagtaaccgtgcctgactcatgcttccccgctacaaagccaccgctgcctcatgccgcttgtcacagctgctccgaggatagcgggagcgacgtcagtagtatttcccaccccacttctcctgggtcatccagtccggacatctccttcctgcagccgctgagtccgcctaagacgcacaggcacaggggagcgtgggtacctgcgggatccagagagttggtagcccatcacccaaagctcttgctgcccccaggctactttccagctggacgctatgtcgtggttgcagaaagtcccctgcccccaggtgaatgggagctgcgccgtgcagcccctgggccagcctacgaggaggaggggacacctcttcgctaccaaagacttgtgcctagtcgaagccgcatcgtgagaacacctagcctcaaggattctcccgctggaagaggcctgagcaaagccgcagtctcggaggaactgaagtggtggcacgaacgagctcgtctgagaagtacacggcctcactccctcgatcgccagggggctttcagggttcgctcactaccccttggaagggagggattcggacgtgctctgggaccccgagcccaggtgcccacagtgtgtgtgctgaggcgttcgcccgatggtgctccagttcaggtttttgtaccagagaagggggagataatctctcaggtctag

SEQ ID NO: 54152 - DNA, 372 bp, Artificial Sequence
  derived and/or modified sequence
atggagtctaaggacgaagtgtccgacactgacagcgggatcatactgcagagcggaccggactcccccgttagccccatgaaggaattgacacatgcagttcataaacagcaacgggcacttgaggccaggttggaagcatgcctggaggagttgcggcgattgtgcctcagggaggccgaattaacgggtaccctccccgcagagtacccacttaaaccaggtgagaaggctccaaaagtcagacgcaggataggagccgcttacaagctggacgattgggcattgcacagggaggatcctctttcttcccttgaacgccagttagctttacagctccagattacagaggccgcacgtcgtctgtgctag

SEQ ID NO: 54153 - protein, 348 aa, Artificial Sequence
  derived and/or modified sequence
MGVLRVGLCPGLTEEMIQLLRSHRIKTVVDLVSADLEEVAQKCGLSYKTWRAHSSGNLGGLQLPQVPAGRSWSGVRNALKKAGLGHGGTDGLSLNAFDERGTAVSTSRLDKLLDAGLYTGEVTEIVGGPGSGKTQVCLCMAANVAHGLQQNVLYVDSNGGLTASRLLQLLQAKTQDEEEQAEALRRIQVVHAFDIFQMLDVLQELRGTVAQQVTGSSGTVKVVVVDSVTAVVSPLLGGQQREGLALMMQLARELKTLARDLGMAVVVTNHITRDRDSGRLKPALGRSWSFVPSTRILLDTIEGAGASGGRRMACLAKSSRQPTGFQEMVDIGTWGTSEQSATLQGDQT

SEQ ID NO: 54154 - DNA, 1047 bp, Artificial Sequence
  derived and/or modified sequence
atgggcgtgctgagagtgggcctgtgccccggcctgaccgaggagatgatccagctgctgagaagccacagaatcaagaccgtggtggacctggtgagcgccgacctggaggaggtggcccagaagtgcggcctgagctacaagacctggagagcccacagcagcggcaacctgggcggcctgcagctgccccaggtgcccgccggcagaagctggagcggcgtgagaaacgccctgaagaaggccggcctgggccacggcggcaccgacggcctgagcctgaacgccttcgacgagagaggcaccgccgtgagcaccagcagactggacaagctgctggacgccggcctgtacaccggcgaggtgaccgagatcgtgggcggccccggcagcggcaagacccaggtgtgcctgtgcatggccgccaacgtggcccacggcctgcagcagaacgtgctgtacgtggacagcaacggcggcctgaccgccagcagactgctgcagctgctgcaggccaagacccaggacgaggaggagcaggccgaggccctgagaagaatccaggtggtgcacgccttcgacatcttccagatgctggacgtgctgcaggagctgagaggcaccgtggcccagcaggtgaccggcagcagcggcaccgtgaaggtggtggtggtggacagcgtgaccgccgtggtgagccccctgctgggcggccagcagagagagggcctggccctgatgatgcagctggccagagagctgaagaccctggccagagacctgggcatggccgtggtggtgaccaaccacatcaccagagacagagacagcggcagactgaagcccgccctgggcagaagctggagcttcgtgcccagcaccagaatcctgctggacaccatcgagggcgccggcgccagcggcggcagaagaatggcctgcctggccaagagcagcagacagcccaccggcttccaggagatggtggacatcggcacctggggcaccagcgagcagagcgccaccctgcagggcgaccagacctag

SEQ ID NO: 54155 - DNA, 1047 bp, Artificial Sequence
  derived and/or modified sequence
atgggcgtgttgcgggtggggctctgccccgggttaaccgaagagatgatacagcttcttcggtcgcacaggattaagactgtggtggatctcgtttctgccgacctagaagaggttgcgcagaagtgtggcctcagctacaagacatggagagcacacagttctggtaatttgggaggcctgcagcttccccaagttcccgcaggtagatcatggagtggggtgcggaatgccctgaagaaagctgggctgggtcacggcggcaccgacgggctgagtctcaacgcgttcgacgaacgaggcactgctgtgtcaacatcaaggctggacaagctcctagacgccggcctgtatactggcgaagtcaccgagatcgtaggtggtcctgggtcgggtaaaacacaggtgtgcttgtgcatggctgccaatgtggcccacggtctgcagcagaatgttctgtatgtcgatagcaacggtggactcacggccagccggctcttgcaactcctacaagcaaagacccaggacgaagaggaacaggcagaagctctgcgtcgtatacaggtggttcatgctttcgacattttccagatgctggatgtactccaagagcttagagggacagtggctcagcaggttaccgggagtagcgggactgtcaaagtcgtcgtggtcgactccgtgacagctgtcgtgagcccacttcttggggggcagcaacgagaaggacttgcgctgatgatgcagctggctagagagcttaagaccctagccagagatctcggtatggcggtggtggtcacaaatcacatcacccgcgacagagattcaggcagattgaaacctgccctgggccgaagctggtcatttgtgccttccactaggatcctattagatacaattgagggggctggcgcctccggcggacggaggatggcatgtctagcgaagtcctcacgccagcccactggatttcaggaaatggtggatatcggcacgtgggggacctccgaacaatccgctacgctgcaaggcgaccagacttag

SEQ ID NO: 54156 - DNA, 1047 bp, Artificial Sequence
  derived and/or modified sequence
atgggcgtgctgagagtggggctctgccccgggctgactgaggagatgatccaactgttaaggagccataggattaaaacagtggtcgaccttgtgtccgccgacctagaagaagtggcccaaaagtgcgggctctcctacaagacatggagggcccactccagcgggaacctaggagggctgcagttgcctcaggtaccggccgggcgctcgtggtccggagtcagaaacgccctcaaaaaggccggactcggacacggaggtaccgacggtctgagtctcaacgccttcgacgaaagaggcacagcagtctccacttctagactggataagctcctggacgcaggtttgtacactggagaagtcaccgagatcgtggggggcccaggaagtggcaaaacccaggtatgcttatgcatggctgccaatgtggcccatggcctgcagcaaaacgtgctgtatgtcgactcaaacggtggcctgacagcaagccgtcttctgcaactgctgcaggcaaaaactcaagatgaggaggagcaggcagaagctcttaggcggattcaagttgtccacgcgttcgacatcttccagatgctagatgtcttgcaagagctacgagggacagtggcgcagcaagtcactggatcttcaggcacggttaaagtcgtcgtggtcgacagtgtcacagccgtggtttcaccacttctcggcgggcagcaacgggaaggtctcgctcttatgatgcagctggctagggagcttaaaaccctggccagagatttggggatggccgttgtcgtcaccaatcatatcacgcgggacagggactccgggcgcctaaaacccgctctgggtcggtcgtggagtttcgtcccaagtacccggattctgctcgacacaattgagggggccggagccagcggggggcgacgaatggcgtgtctggctaagtcaagcaggcagccaaccggctttcaagaaatggtggacattggcacctggggcacctcggaacagtccgccaccctccagggcgatcaaacatag

SEQ ID NO: 54157 - DNA, 1047 bp, Artificial Sequence
  derived and/or modified sequence
atgggcgtgctgcgggtgggcctgtgccccggcctgacagaggagatgatccagctgctgcggagccaccgcatcaagacagtggtggacctggtgtctgctgacctggaggaggtggcccagaagtgtggcctgagctacaagacctggagggcccacagcagcggcaacctgggcggcctgcagctgccccaggtgcctgctggccgctcctggagcggcgtgagaaatgccctgaagaaggccggcctgggccacggcggcacagatggcctgagcctgaatgcctttgatgagcggggcacagctgtgtccaccagccggctggacaagctgctggatgctggcctgtacacaggagaggtgacagaaattgtgggcggccctggcagcggcaagacccaggtgtgcctgtgcatggccgccaacgtggcccacggcctgcagcagaatgtgctgtatgtggacagcaatggaggcctgacagccagccggctgctgcagctgctgcaggccaagacccaggatgaggaggagcaggccgaggccctgcggcgcatccaggtggtgcacgcctttgacatcttccagatgctggatgtgctgcaggagctgcggggcaccgtggcccagcaggtgacaggcagcagcggcaccgtgaaggtggtggtggtggacagcgtgacagctgtggtgagccccctgctgggcggccagcagcgggagggcctggccctgatgatgcagctggcccgggagctgaagaccctggcccgggacctgggcatggctgtggtggtgaccaaccacatcacccgggaccgggacagcggccgcctgaagccagccctgggccgctcctggagctttgtgcccagcacccgcatcctgctggacaccattgaaggagctggggccagcggcggccgcaggatggcctgcctggccaagagcagccggcagcccaccggcttccaggagatggtggacatcggcacctggggcaccagcgagcagagcgccaccctgcagggcgaccagacctag

SEQ ID NO: 54158 - DNA, 1047 bp, Artificial Sequence
  derived and/or modified sequence
atgggcgtgctgcgggtgggcctgtgccccggcctgaccgaggagatgattcagcttctgagaagtcacaggatcaagaccgtggttgacttggtgtctgctgacttggaggaggtggcacagaagtgtgggctgtcctacaaaacctggcgtgcccacagctcagggaatctcggtgggctgcagctcccacaggtccccgccggccgcagttggagcggcgttcgcaatgccctcaaaaaagcgggactcggccacgggggtacagatggcctgagcctgaacgcctttgatgagaggggaacagccgtgtccacatctagactagataagttacttgacgcgggactgtacacaggggaagtgactgagatagtcggcggacccggctccggcaaaacccaagtctgtctatgtatggccgcaaatgttgcgcacggtcttcagcagaacgttctgtacgtggactccaacggcggcctgaccgcctctagactgctgcagctgttgcaagcaaagacacaggacgaagaggagcaggccgaggcccttagaagaattcaagtggtgcacgcatttgacattttccagatgctcgacgtgctgcaggaacttcgcgggactgtggctcagcaggttaccggatcaagcggcactgttaaggtcgtggtggtggactccgttaccgcagtggtgtctccactgctagggggtcaacaaagggagggtctcgcgcttatgatgcagctggctcgagaactaaagacacttgccagagatctgggaatggccgttgtcgtcaccaaccatataacaagggatagggattctggacgactgaaaccagccctaggtagatcatggtccttcgtgccctcgacacggatcctgcttgacaccattgaaggcgctggcgccagcggcggtcgccggatggcctgtctggcaaaaagcagccggcagcccacaggattccaggagatggtggatatcgggacttggggcacatctgagcagagtgcaacactccagggagaccagacctag

SEQ ID NO: 54159 - DNA, 1047 bp, Artificial Sequence
  derived and/or modified sequence
atgggcgtgctgcgggtgggcctgtgccccggcctgaccgaggagatgatacaattactccggtcccaccgcataaagacagtcgtggacttggtgtcagccgacctcgaagaggtggcccagaaatgcggcctgagctataaaacttggagagcccactcctcaggaaatctcggtgggctgcaactgccgcaggtaccagccggaaggtcgtggagcggagtgcggaacgcgttaaagaaagccggcctgggccacggcggaaccgacggcttgtccctcaatgccttcgacgagagggggacggccgtctccaccagccgattggacaaattgttggacgcaggcctgtacaccggagaagtgacagagatagttggaggacccggcagtggtaaaacccaagtgtgtctgtgcatggctgcgaatgtggcacacgggcttcagcagaatgtgctgtacgtggactcaaacggtggcctgacggctagccggcttctgcagctgctccaggctaagactcaggatgaagaagagcaagccgaagctttgcgccggatccaggtagttcatgcttttgatattttccaaatgctagacgtccttcaggagctccgcggaaccgtcgcccagcaggtgacaggaagttctgggactgtgaaagtagtggtggttgacagcgtcacagctgtcgtgtcacccctcctgggtgggcagcagcgcgagggactggctttaatgatgcaattggcccgtgaactcaagacgcttgcacgtgacctcggcatggctgtcgttgtgaccaatcatattaccagagatagagactccgggcggctgaagccagctctgggaaggagctggtcttttgtgccaagtacccgcatcctgcttgacactattgagggagccggagctagtgggggtcgaaggatggcctgcctcgctaaaagctctagacaacccactggattccaggagatggtcgacatcgggacctggggcaccagtgaacagagtgctactctccagggtgatcagacatag

SEQ ID NO: 54160 - DNA, 1047 bp, Artificial Sequence
  derived and/or modified sequence
atgggagtcctccgggtgggcctctgcccagggctgacagaggaaatgatacagctcctgaggtcccatcgcattaagacagtcgtggacctggtttctgccgatctggaggaggtggcccagaaatgtggcctcagttacaagacgtggcgcgctcactctagtggcaacctgggaggcctgcagctgccacaagtcccagcaggcaggagctggagtggcgtgcgcaatgccctgaaaaaggcaggcctcggccatggaggtacagatgggttatctctcaacgcttttgatgagagaggaaccgcagtttcaaccagtaggttggacaagctgctggacgcaggcctatacaccggcgaggtgaccgagattgtgggtggacctggctccggaaagactcaggtgtgcctgtgtatggccgctaatgtggcccacggactccagcagaatgtcctttatgtggacagcaacggtggccttacagccagccgtctactgcagctcttgcaggccaagactcaggacgaagaggaacaggcagaagccctcagacgaatccaggttgtgcacgcatttgacattttccaaatgctcgacgttctacaagagctcagaggcacagttgcacagcaggttactggtagttctgggaccgtgaaggtggtggtggtggattcagtgacagccgtggtttcaccccttctcggcggtcagcagagagagggcctcgccttgatgatgcagctggctagagagcttaaaactctggcccgtgacctggggatggcagtcgtcgtaacaaaccatatcacccgggacagggatagtggcaggcttaagccggctttgggtagaagctggagcttcgtgccctcaactcgtatcctgctcgatacaatcgaaggtgccggtgctagcgggggtcgcaggatggcatgcctggccaagtcatcgagacagcctacagggtttcaggagatggtggatataggcacctggggaacttccgagcagtctgcgactctccagggcgaccagacatag

SEQ ID NO: 54161 - DNA, 1047 bp, Artificial Sequence
  derived and/or modified sequence
atgggtgttttgagggtgggactgtgccccggtctgactgaggaaatgatacaactgctgaggagccaccgcatcaagactgtagtagacttggtgagcgccgacttagaagaggttgcccagaagtgcggcctgagttacaaaacctggagagcacatagctctgggaatctcggcggactgcagctgccccaggtgcctgctgggagatcttggtccggcgtgagaaatgcgctcaagaaggcgggactagggcatgggggaacggatggtctgagtctgaatgcatttgatgagcgaggcaccgccgtgtcaacttcccggttagataagctgcttgacgccggtttatatactggtgaggtgaccgagatcgtcgggggtcctggtagcggcaaaacccaggtttgtctgtgcatggcagccaatgtcgcccacgggcttcaacagaatgtcctgtatgtcgactctaacgggggactgaccgccagtagactcctgcagctgctacaggctaaaacccaggacgaggaggaacaagccgaagcgctgagaaggattcaggtggttcacgcctttgacatcttccagatgctggatgtactccaagaactgagaggtactgtcgcccagcaggtaacaggctcctctgggactgtgaaggtagtggtcgtggacagcgtgacggccgtggtctccccgctgcttggaggtcagcagcgagagggcctggcattgatgatgcagctggccagggagcttaaaaccctggctagagacctagggatggctgtggtggtgactaatcacattacaagggaccgggacagtggccgactgaagcccgcactggggagatcgtggagcttcgtgccctcgacgagaattttactcgacaccattgagggagctggagcatccggtggtcgccgaatggcctgtttggccaaaagctcgagacaacctaccggctttcaggagatggttgatataggcacttggggtactagcgagcaatctgctaccctccagggcgaccagacctag

SEQ ID NO: 54162 - DNA, 2459 bp, Artificial Sequence
  derived and/or modified sequence
ctggaacccggaagcggcagcgcggcgcgacccggcgggcgggctctgggcgcgggaatcccggcggatcccgggcgggcggatgacccccagccctacccttggtgccgcctcctcctctctcctttctcctccggcagccagcgcgcctgtgtcctctctaggaaggggtaggggaggggcgtctggagaggaccccccgcgaatgcccacgtgacgtgcagtccccctggggctgttccggcctgcggggaacatgggcgtgctcagggtcggactgtgccctggccttaccgaggagatgatccagcttctcaggagccacaggatcaagacagtggtggacctggtttctgcagacctggaagaggtagctcagaaatgtggcttgtcttacaagacatggagggcgcactcaagtgggaacctgggaggactgcagctgcctcaggtccccgcagggagatcgtggagtggggtcaggaatgctctgaagaaggcaggacttgggcatggaggaacagatggactttcgctgaatgctttcgatgaacgaggcactgcggtcagcacttcacgtcttgataaactgcttgatgctggtctctatactggagaagtgactgaaattgtaggaggcccaggtagcggcaaaactcaggtatgtctctgtatggcagcaaatgtggcccatggcctgcagcaaaacgtcctatatgtagattccaatggagggctgacagcttcccgcctcctccagctgcttcaggctaaaacccaggatgaggaggaacaggcagaagctctccggaggatccaggtggtgcatgcatttgacatcttccagatgctggatgtgctgcaggagctccgaggcactgtggcccagcaggtgactggttcttcaggaactgtgaaggtggtggttgtggactcggtcactgcggtggtttccccacttctgggaggtcagcagagggaaggcttggccttgatgatgcagctggcccgagagctgaagaccctggcccgggaccttggcatggcagtggtggtgaccaaccacataactcgagacagggacagcgggaggctcaaacctgccctcggacgctcctggagctttgtgcccagcactcggattctcctggacaccatcgagggagcaggagcatcaggcggccggcgcatggcgtgtctggccaaatcttcccgacagccaacaggtttccaggagatggtagacattgggacctgggggacctcagagcagagtgccacattacagggtgatcagacatgacctgtgctgttgtttgggaaacagggaagcattggggacccctcccaacttttcttcccagtaacgcctgctgtttactgccacctggcactggtgactacagacgttctcaggctggccagaagagacatcttgggttccttggcctcactctctgtaagcatataaaccacaggcgaaagaggatgctgcattgcgaggacccagaaattcatactggtgccacgtttccttcccttatttctaacgtgtatgtttctggtggaaaccaagttcaccctggctgggagcatctctgatgaggcatgctggcgactggatggataatcctgtgcatcaccattgtgtcctgtgctccctcctagcgcagtggccaagccgggaaagcctctaacttgcctttgctgctgctgccttttttttcttttgtctctgcctttccatttgttagatgggggcccactcttccttagctctgtctctgagttactgggtggaaataagcttataaatgaaatactcttcttcatctctgttttgctcttaaaaatataaaaaggcaattccccgagccctagagccacctgatttccccttagaaggctgtttttcagtttcccccagtgaggcccaaagaacagtttattcctcctttcctcttgctgatttggtttcagacctgcctgcatcaccatgactaggtgagaacgtgtgggctcgctgcagttccagggatataatttaacagaaagggagggtatgacctgctcctggtgaatccagccactcatttaatatgcatggtgccctgtggggcccctccacagtacagcataaccagaggtgctgaaccatggccttgcccataaacagacagaggagaatttgcacagtaaatagagccagctgggaaaattgatgctgacgtaaataatacatggcaaatctagtcctttatgcagaaattcattgctggtggctccaagatgcaatataattacacctctcttcctgccagctgtaccacagctagtgccctagtgtatgaaataatccctctgtctttcaccagcactgtggccatccgtctgagagccatgaccctggctgggaggggacgaagacaccagggaatggaaaataaaaggaaaagtac

SEQ ID NO: 54163 - DNA, 1528 bp, Artificial Sequence
  derived and/or modified sequence
aatcccggcggatcccgggcgggcggatgacccccagccctacccttggtgccgcctcctcctctctcctttctcctccggcagccagcgcgcctgtgtcctctctaggaaggggtaggggaggggcgtctggagaggaccccccgcgaatgcccacgtgacgtgcagtccccctggggctgttccggcctgcggggaacatgggcgtgctcagggtcggactgtgccctggccttaccgaggagatgatccagcttctcaggagccacaggatcaagacagtggtggacctggtttctgcagacctggaagaggtagctcagaaatgtggcttgtcttacaagacatggagggcgcactcaagtgggaacctgggaggactgcagctgcctcaggtccccgcagggagatcgtggagtggggtcaggaatgctctgaagaaggcaggacttgggcatggaggaacagatggactttcgctgaatgctttcgatgaacgaggcactgcggtcagcacttcacgtcttgataaactgcttgatgctggtctctatactggagaagtgactgaaattgtaggaggcccaggtagcggcaaaactcaggtatgtctctgtatggcagcaaatgtggcccatggcctgcagcaaaacgtcctatatgtagattccaatggagggctgacagcttcccgcctcctccagctgcttcaggctaaaacccaggatgaggaggaacaggcagaagctctccggaggatccaggtggtgcatgcatttgacatcttccagatgctggatgtgctgcaggagctccgaggcactgtggcccagcaggtgactggttcttcaggaactgtgaaggtggtggttgtggactcggtcactgcggtggtttccccacttctgggaggtcagcagagggaaggcttggccttgatgatgcagctggcccgagagctgaagaccctggcccgggaccttggcatggcagtggtggtgaccaaccacataactcgagacagggacagcgggaggctcaaacctgccctcggacgctcctggagctttgtgcccagcactcggattctcctggacaccatcgagggagcaggagcatcaggcggccggcgcatggcgtgtctggccaaatcttcccgacagccaacaggtttccaggagatggtagacattgggacctgggggacctcagagcagagtgccacattacagggtgatcagacatgacctgtgctgttgtttgggaaacagggaagcattggggacccctcccaacttttcttcccagtaacgcctgctgtttactgccacctggcactggtgactacagacgttctcaggctggccagaagagacatcttgggttccttggcctcactctctgtaagcatataaaccacaggcgaaagaggatgctgcattgcgaggacccagaaattcatactggtgccacgtttccttcccttatttctaacgtgtatgtttctggtggaaaccaagttcaccct

SEQ ID NO: 54164 - protein, 509 aa, Artificial Sequence
  derived and/or modified sequence
MADYLISGGTGYVPEDGLTAQQLFASADGLTYNDFLILPGFIDFIADEVDLTSALTRKITLKTPLISSPMDTVTEADMAIAMALMGGIGFIHHNCTPEFQANEKFEQGFITDPVVLSPSHTVGDVLEAKMRHGFSGIPITETGTMGSKLVGIVTSRDIDFLAEKDHTTLLSEVMTPRIELVVAPAGVTLKEANEILQRSKKGKLPIVNDCDELVAIIARTDLKKNRDYPLASKDSQKQLLCGAAVGTREDDKYRLDLLTQAGVDVIVLDSSQGNSVYQIAMVHYIKQKYPHLQVIGGNVVTAAQAKNLIDAGVDGLRVGMGCGSICITQEVMACGRPQGTAVYKVAEYARRFGVPIIADGGIQTVGHVVKALALGASTVMMGSLLAATTEAPGEYFFSDGVRLKKYRGMGSLDAMEKSSSSQKRYFSEGDKVKIAQGVSGSIQDKGSIQKFVPYLIAGIQHGCQDIGARSLSVLRSMMYSGELKFEKRTMSAQIEGGVHGLHSYEKRLY

SEQ ID NO: 54165 - DNA, 1530 bp, Artificial Sequence
  derived and/or modified sequence
atggctgattatctgatctccggtggcactggctacgtgccggaggacggtctgaccgcccagcagttgtttgccagcgctgacggattgacgtacaacgatttcttaatcctccctggattcattgacttcattgccgatgaggtggaccttacttctgcactgacccgaaagataacactcaagacaccgctgatatccagccccatggatactgtgactgaggccgatatggctattgctatggccctgatgggaggcattggcttcattcaccacaactgcactcccgagttccaagcgaatgagaagtttgagcagggtttcatcactgaccctgtagtgctgtctcctagccataccgttggcgacgtgctggaggccaaaatgcgacacggtttttccggcatcccaatcacagaaacaggtacgatgggaagcaaactggtcggcatcgtcacatcacgcgacatagatttcctcgcggagaaggaccatacgaccttgttgtcggaggtcatgactccacgcatagagctggtggtcgcccccgccggagtaacgctaaaggaagcgaatgagattttacaaaggtctaagaaaggtaagcttcccatagtgaatgactgtgacgaactcgttgcaataatcgctcgcactgacctaaaaaagaacagagactacccgcttgcctctaaagacagtcagaagcagctcctgtgcggcgcagccgtgggcacacgtgaggacgataagtataggcttgacctgttaacgcaggcaggagtcgacgtgattgttctggattctagccagggcaattccgtctatcagattgctatggtccactatatcaagcagaagtacccacatctacaagttattggagggaatgtggtgacagcagcccaggccaaaaatctgattgatgccggggtggatggcctcagagtgggtatggggtgtggttctatttgtatcacccaagaagttatggcctgtgggcgcccacaggggacggcagtctacaaggttgccgaatatgcccggcgtttcggtgtaccaatcatcgcagacggaggtatccaaactgtgggtcacgtggtgaaagcgttagcactcggcgctagcactgtaatgatgggatcattattagcagctacaaccgaggcccctggagaatacttcttcagcgacggtgtgcggcttaaaaaatatagagggatggggtctctcgatgcaatggaaaagagctcctcttcccaaaaaaggtactttagtgaaggcgacaaggtgaaaatcgcccagggggtgtctggcagtatccaggacaaaggatcaatccagaagtttgtgccatacttaatcgccggcattcaacacggttgtcaggacatcggggctaggtcgctgtctgtgctgagaagcatgatgtattctggggagctaaagtttgagaagaggactatgtctgcccagattgagggaggtgtgcacggtttgcattcctatgaaaagagactctactag

SEQ ID NO: 54166 - DNA, 1765 bp, Artificial Sequence
  derived and/or modified sequence
agtagcagcagcagcagcggcggcagcggcgggcggccgcgcgggtgtttatgtcgggtcgcggggtctcgcggcagcatggcggactacctgatcagcggcggcaccggctacgtgcccgaggatgggctcaccgcgcagcagctcttcgccagcgccgacggcctcacctacaacgacttcctgattctcccaggattcatagacttcatagctgatgaggtggacctgacctcagccctgacccggaagatcacgctgaagacgccactgatctcctcccccatggacactgtgacagaggctgacatggccattgccatggctctgatgggaggtattggtttcattcaccacaactgcaccccagagttccaggccaacgagaagtttgaacagggcttcatcacggaccctgtggtgctgagcccctcgcacactgtgggcgatgtgctggaggccaagatgcggcatggcttctctggcatccccatcactgagacgggcaccatgggcagcaagctggtgggcatcgtcacctcccgagacatcgactttcttgctgagaaggaccacaccaccctcctcagtgaggtgatgacgccaaggattgaactggtggtggctccagcaggtgtgacgttgaaagaggcaaatgagatcctgcagcgtagcaagaaagggaagctgcctatcgtcaatgattgcgatgagctggtggccatcatcgcccgcaccgacctgaagaagaaccgagactaccctctggcctccaaggattcccagaagcagctgctctgtggggcagctgtgggcacccgtgaggatgacaaataccgtctggacctgctcacccaggcgggcgtcgacgtcatagtcttggactcgtcccaagggaattcggtgtatcagatcgccatggtgcattacatcaaacagaagtacccccacctccaggtgattggggggaacgtggtgacagcagcccaggccaagaacctgattgatgctggtgtggacgggctgcgcgtgggcatgggctgcggctccatctgcatcacccaggaagtgatggcctgtggtcggccccagggcactgctgtgtacaaggtggctgagtatgcccggcgctttggtgtgcccatcatagccgatggcggcatccagaccgtgggacacgtggtcaaggccctggcccttggagcctccacagtgatgatgggctccctgctggccgccactacggaggcccctggcgagtacttcttctcagacggggtgcggctcaagaagtaccggggcatgggctcactggatgccatggagaagagcagcagcagccagaaacgatacttcagcgagggggataaagtgaagatcgcgcagggtgtctcgggctccatccaggacaaaggatccattcagaagttcgtgccctacctcatagcaggcatccaacacggctgccaggatatcggggcccgcagcctgtctgtccttcggtccatgatgtactcaggagagctcaagtttgagaagcggaccatgtcggcccagattgagggtggtgtccatggcctgcactcttacgaaaagcggctgtactgaggacagcggtggaggccgaggtggtggaggggatgcaccccagtgtccacttttgggcacagcctccctccataactgagtggtccacagatttgcactacgggttctccagctcctttccaggcagagaggaggggaggtcctgaggggactgctg

SEQ ID NO: 54167 - DNA, 1530 bp, Artificial Sequence
  derived and/or modified sequence
atggctgactacctgatcagcggcggcaccggctacgtgcctgaagatggcctgacagcccagcagctgtttgccagcgcagatggcctgacctacaatgacttcctgatcctgcccggcttcatcgacttcatcgcagatgaggtggacctgaccagcgccctgaccaggaagatcaccctgaagacccccctcatcagcagccccatggacacagtgacagaggccgacatggccatcgccatggccctgatgggcggcatcggcttcatccaccacaactgcaccccagagttccaggccaatgagaagtttgagcagggcttcatcacagatcctgtggtgctgagccccagccacacagtgggagatgtgctggaggccaagatgagacatggcttcagcggcatccccatcacagagaccggcaccatgggcagcaagctggtgggcatcgtgaccagccgggacatcgacttcctggccgagaaggaccacaccaccctgctgtctgaggtgatgaccccccgcatcgagctggtggtggccccagctggggtgaccctgaaggaggccaatgagatcctgcagaggagcaagaagggcaagctgcccatcgtgaatgactgtgatgagctggtggccatcatcgccaggacagacctgaagaagaacagagactaccccctggccagcaaggacagccagaagcagctgctgtgtggggctgctgtgggcaccagagaagatgacaagtaccgcctggacctgctgacccaggccggcgtggatgtgattgtgctggacagcagccagggcaacagcgtgtaccagatcgccatggtgcactacatcaagcagaagtacccccacctgcaggtgattggaggaaatgtggtgacagctgcccaggccaagaacctgattgatgctggggtggatggcctgcgggtgggcatgggctgcggcagcatctgcatcacccaggaggtgatggcctgtggccggccccagggcacagctgtgtacaaggtggccgagtatgcccggcgcttcggcgtgcccatcatcgcagatggcggcatccagacagtgggccacgtggtgaaggccctggccctgggcgccagcacagtgatgatgggcagcctgctggccgccaccacagaggcccctggagagtacttcttcagtgatggagtgcggctgaagaagtaccggggcatgggcagcctggatgccatggagaagagcagcagcagccagaagcgctacttcagcgagggggacaaggtgaagatcgcccagggcgtgtctggcagcatccaggacaagggcagcatccagaagtttgtgccctacctgattgctggcatccagcacggctgccaggacatcggggcccggagcctgtctgtgctgcgctccatgatgtacagcggggagctgaagtttgagaagaggaccatgtctgcccagatcgagggcggcgtgcacggcctgcacagctatgagaagaggctgtactag

SEQ ID NO: 54168 - DNA, 1530 bp, Artificial Sequence
  derived and/or modified sequence
atggccgactacctgatcagcggcggcaccggctacgtgcccgaggacggcctcacggcgcagcagctgttcgccagcgccgatgggcttacatataatgacttcctgattctccctgggtttattgatttcatcgcagacgaggttgacctgacttccgcactgactcggaagataacactcaagacacctcttattagcagtccaatggacactgtgaccgaagctgacatggccattgcaatggcactgatgggtggcatcggcttcatccaccataactgcacgcctgaattccaagcgaatgaaaaatttgagcagggattcatcacagatcccgtggtgctctcccccagtcatactgtgggtgacgtgctggaagctaagatgcgtcacggcttctctggaattccaattactgagacaggcaccatgggctccaaactcgtcggtatcgttacatccagggatattgacttcctcgccgagaaagatcacacgacgttgttgtcggaagtgatgacgcctaggattgagcttgttgttgctcctgctggggtgacccttaaggaagctaacgaaatcctgcagaggtcaaaaaaggggaaattgcccatcgttaatgactgtgacgaactcgtagccatcattgcgcgtactgatctgaaaaagaatagagactatccactggcttccaaggacagccaaaagcagctgctctgtggtgcagcagttggcacaagagaagatgacaagtacaggttagatctgctcacacaagccggagttgatgtgatcgtgctcgattcgagccagggaaacagcgtctaccagattgccatggtgcattatatcaaacaaaagtacccccatttgcaggtgatcggcggcaatgttgtgaccgctgcccaggccaaaaacctcatcgacgccggggtggatggcctgcgagtgggtatgggctgcggcagcatctgcatcacacaagaggtgatggcctgtggccgtccacaaggcacggcagtatataaggttgctgaatatgcacggcgctttggagttccgatcatcgcagacggcgggatccagaccgtcggacatgtggtgaaggcgctggccttaggagcttctacggtcatgatggggtcccttttggcagcaacaaccgaggcccccggcgagtacttcttcagcgatggggtaaggttgaaaaagtacagggggatgggctccctagacgctatggagaagagtagtagctcacaaaagcggtattttagcgagggtgacaaagttaagatcgctcagggtgtgtccggttcaatacaggataagggctctatccagaaatttgttccatacctcatagcggggattcagcacggctgccaggacatcggagccagatcgctgtccgtcctaagaagtatgatgtactctggagaactaaagttcgagaaaagaactatgtccgcacagattgaaggcggggtgcacgggctgcactcttatgaaaaacgtctgtactag

SEQ ID NO: 54169 - DNA, 1530 bp, Artificial Sequence
  derived and/or modified sequence
atggccgattatctgatcagtgggggaacagggtatgtccccgaagacggactcaccgcacagcagctgttcgcctccgccgatggactcacttacaatgacttcctcatcttgcctggattcatagacttcatcgccgacgaggtagatctgacttcagcactgacccgaaagattacactgaagactcccctaatcagcagccctatggacacagtcacggaggccgatatggccatagcgatggctttaatgggtgggatagggttcatacaccacaattgcacccccgagtttcaggccaacgagaagtttgaacaaggattcataaccgatcctgttgtgctctctccctctcatacagtcggcgacgtgttggaggctaagatgcggcacggcttctcaggcatccccatcaccgaaaccgggactatggggtccaagctcgtcggcattgttacctcacgggacatagacttcctggctgagaaggatcacaccacgctactctcagaggtgatgacccccagaatcgagttggtggtggcccctgcaggggtaaccctgaaagaggccaatgagatattacagcgctctaagaaaggcaaactacctatcgtgaatgactgtgacgagttggttgctattattgcacggactgatctgaagaaaaatagagactacccgttagcaagcaaagactcccagaagcagttgctctgtggagccgcagtaggaacccgagaggatgataaataccgcctagacctcctaactcaggctggggttgatgttattgtactggattcatcacaaggcaactcggtttaccagatcgcaatggtacactacatcaaacagaaatatcctcatctgcaagtgattggaggcaacgtcgtcactgcagcgcaggctaagaacctgattgatgccggtgtcgacggactgagagttggaatggggtgtggaagcatttgcatcacacaggaagtgatggcttgcggcaggccgcaaggcacagccgtgtataaagtcgctgagtacgcgcgacgcttcggagtgccaattattgccgatgggggaattcaaactgtcgggcacgtggtgaaagcgctggccttgggagcaagcactgttatgatgggtagtttgctggcagcaaccacagaagcccctggcgaatattttttttccgacggtgtacgcctcaaaaagtatcggggtatgggcagccttgatgccatggaaaaatcttcctcctcacagaaacggtatttctctgagggggacaaagttaaaatcgcgcagggcgtgagcggctcaattcaggataaaggatcaatacaaaagttcgtcccttacctgattgcagggatacagcacgggtgccaggacatcggcgctagatccctctcagtgctgcgctccatgatgtactccggagagttaaagtttgagaagcgaaccatgagcgcacagatagaaggcggtgtccatggactgcattcctatgaaaagaggctgtattag

SEQ ID NO: 54170 - DNA, 1530 bp, Artificial Sequence
  derived and/or modified sequence
atggccgactacctgatcagcggcggcaccggctacgtgcccgaggacggcctgaccgcccagcagctgttcgccagcgccgacggcctgacctacaacgacttcctgatcctgcccggcttcatcgacttcatcgccgacgaggtggacctgaccagcgccctgaccagaaagatcaccctgaagacccccctgatcagcagccccatggacaccgtgaccgaggccgacatggccatcgccatggccctgatgggcggcatcggcttcatccaccacaactgcacccccgagttccaggccaacgagaagttcgagcagggcttcatcaccgaccccgtggtgctgagccccagccacaccgtgggcgacgtgctggaggccaagatgagacacggcttcagcggcatccccatcaccgagaccggcaccatgggcagcaagctggtgggcatcgtgaccagcagagacatcgacttcctggccgagaaggaccacaccaccctgctgagcgaggtgatgacccccagaatcgagctggtggtggcccccgccggcgtgaccctgaaggaggccaacgagatcctgcagagaagcaagaagggcaagctgcccatcgtgaacgactgcgacgagctggtggccatcatcgccagaaccgacctgaagaagaacagagactaccccctggccagcaaggacagccagaagcagctgctgtgcggcgccgccgtgggcaccagagaggacgacaagtacagactggacctgctgacccaggccggcgtggacgtgatcgtgctggacagcagccagggcaacagcgtgtaccagatcgccatggtgcactacatcaagcagaagtacccccacctgcaggtgatcggcggcaacgtggtgaccgccgcccaggccaagaacctgatcgacgccggcgtggacggcctgagagtgggcatgggctgcggcagcatctgcatcacccaggaggtgatggcctgcggcagaccccagggcaccgccgtgtacaaggtggccgagtacgccagaagattcggcgtgcccatcatcgccgacggcggcatccagaccgtgggccacgtggtgaaggccctggccctgggcgccagcaccgtgatgatgggcagcctgctggccgccaccaccgaggcccccggcgagtacttcttcagcgacggcgtgagactgaagaagtacagaggcatgggcagcctggacgccatggagaagagcagcagcagccagaagagatacttcagcgagggcgacaaggtgaagatcgcccagggcgtgagcggcagcatccaggacaagggcagcatccagaagttcgtgccctacctgatcgccggcatccagcacggctgccaggacatcggcgccagaagcctgagcgtgctgagaagcatgatgtacagcggcgagctgaagttcgagaagagaaccatgagcgcccagatcgagggcggcgtgcacggcctgcacagctacgagaagagactgtactag

SEQ ID NO: 54171 - protein, 489 aa, Artificial Sequence
  derived and/or modified sequence
MADYLISGGTGYVPEDGLTAQQLFASADGLTYNDFLILPGFIDFIADEVDLTSALTRKITLKTPLISSPMDTVTEADMAIAMAKFEQGFITDPVVLSPSHTVGDVLEAKMRHGFSGIPITETGTMGSKLVGIVTSRDIDFLAEKDHTTLLSEVMTPRIELVVAPAGVTLKEANEILQRSKKGKLPIVNDCDELVAIIARTDLKKNRDYPLASKDSQKQLLCGAAVGTREDDKYRLDLLTQAGVDVIVLDSSQGNSVYQIAMVHYIKQKYPHLQVIGGNVVTAAQAKNLIDAGVDGLRVGMGCGSICITQEVMACGRPQGTAVYKVAEYARRFGVPIIADGGIQTVGHVVKALALGASTVMMGSLLAATTEAPGEYFFSDGVRLKKYRGMGSLDAMEKSSSSQKRYFSEGDKVKIAQGVSGSIQDKGSIQKFVPYLIAGIQHGCQDIGARSLSVLRSMMYSGELKFEKRTMSAQIEGGVHGLHSYEKRLY

SEQ ID NO: 54172 - DNA, 1470 bp, Artificial Sequence
  derived and/or modified sequence
atggcggattatctcatcagcggcgggacgggctacgtacctgaagatggcttaactgctcagcaattgttcgcttcagccgacggcctgacatacaacgatttcctcatactgccaggatttattgatttcatcgctgacgaggtcgacctgacgtccgctctcactcgcaagatcactctgaaaacacccctgatctcatcgccaatggacacagtgacagaggctgacatggccatcgccatggctaaattcgaacaaggattcattacggacccggtcgtactgtccccaagccacacggtcggagacgtgctggaagccaaaatgagacacggattctcagggattccgataacagagaccggcaccatgggctctaaattagtggggatcgtgaccagccgcgacatcgatttcctagcggagaaagatcacacgacactcctctccgaggtgatgacgccaaggattgagctcgtggtcgccccagccggggtcacacttaaggaggccaatgagattcttcagcggagtaagaaaggcaagctacccatcgtgaacgactgtgacgagctggtcgcaattattgcacgaacagatttaaagaagaatcgtgactatccactcgctagtaaggattcacaaaagcagctcctgtgtggagccgccgtgggaacaagggaggatgataagtacaggctcgatctattaacccaggcaggggtggacgttatcgtgctggattcatcccagggcaattccgtctatcagattgccatggtccactacataaaacaaaaatatccgcatctgcaggtgataggggggaatgttgtcactgccgcccaggccaagaatctcattgatgccggggtggatggcctgagagtgggaatgggctgcgggtcaatctgcattacacaggaagttatggcatgtggtagaccccagggaacggctgtgtacaaagtggctgaatacgcccggcggtttggagtgccaattattgccgatggcgggattcagactgtgggtcacgtggtgaaagcgcttgcgctgggggccagcactgtgatgatgggttccttgctcgcggccacaacagaggcacccggtgaatactttttcagcgatggggtgcggctgaagaagtacagaggcatggggtcacttgacgcgatggagaagtcttcctctagccaaaaacgatacttctccgaaggggacaaagtgaaaattgcccagggtgtgtctggctcgattcaagataaaggctcaattcaaaagtttgtgccttatctaatcgctgggattcagcacggatgccaggatattggagcaagaagtctctcggtgctgcgtagcatgatgtattccggtgagttgaaatttgaaaagcggacaatgagcgcccagattgagggcggtgttcatggtttgcacagctacgagaagaggctttactag

SEQ ID NO: 54173 - DNA, 1470 bp, Artificial Sequence
  derived and/or modified sequence
atggcggactatctcataagcggaggcactggctatgttccagaagacgggctcaccgcacagcagctcttcgcaagtgctgacggattaacctacaacgatttcctgatcctcccgggcttcattgacttcattgccgacgaagtggaccttacaagcgcccttactcggaaaataaccctcaagacaccgcttataagctctccgatggataccgtgaccgaagccgacatggccatcgctatggcaaagtttgaacaaggcttcattacggaccccgtcgtcttatccccctcccacaccgtgggggatgtgttggaggccaaaatgagacatggcttctcaggtattcccattaccgagacagggaccatgggttccaagctggttggcattgtgacttctagagacatcgattttctagccgagaaggaccatacaacgctgctctccgaagtaatgacacctcgcatcgaactcgtggtcgcccctgcaggggttaccctgaaggaggccaatgaaatactgcaaaggagtaagaaaggtaagctgccaatcgtaaacgattgcgacgagcttgtggccattatagcaagaactgacttgaagaagaacagagattatccgcttgcgtctaaggactctcagaaacagctactgtgtggagccgccgtgggaacccgcgaagacgacaaatatcgtctggacctgctgactcaagccggtgtcgatgttatagtgttggatagcagtcaaggcaatagcgtgtaccagattgccatggttcactatataaaacagaaatacccacatctgcaggtaataggtgggaatgtcgtcacggccgcacaggccaagaatctgatcgatgccggagtcgacggattgcgagtgggcatgggctgcggctcgatttgtatcacacaagaggtcatggcttgtggacgaccacagggcacagctgtgtacaaggtggccgaatatgctaggagatttggggtgcccataatcgccgatggcgggatccaaaccgtgggacatgtggtaaaggcattagcactgggggcaagtacagttatgatgggcagtttgctggcggccacaacagaggctccgggagagtactttttcagcgatggggtacgactcaagaagtatcgggggatggggtcacttgatgccatggagaagtccagtagcagccaaaagagatacttctctgaaggtgacaaggtgaagatagcccagggcgtttctggatccatccaggacaagggctcaattcagaaattcgtgccgtatctgatcgccggtatccagcacggatgtcaagacattggggcacggagcctgtcagtgttgcgctctatgatgtacagtggggagctgaaatttgagaagcggaccatgtcagcccagattgagggcggagtccatggcctccacagttatgagaaaaggctttactag

SEQ ID NO: 54174 - DNA, 2283 bp, Artificial Sequence
  derived and/or modified sequence
gtcagcagtagcagcagcagcagcggcggcagcggcgggcggccgcgcgggtgtttatgtcgggtcgcggggtctcgcggcagcatggcggactacctgatcagcggcggcaccggctacgtgcccgaggatgggctcaccgcgcagcagctcttcgccagcgccgacggcctcacctacaacgacttcctgattctcccaggattcatagacttcatagctgatgaggtggacctgacctcagccctgacccggaagatcacgctgaagacgccactgatctcctcccccatggacactgtgacagaggctgacatggccattgccatggctaagtttgaacagggcttcatcacggaccctgtggtgctgagcccctcgcacactgtgggcgatgtgctggaggccaagatgcggcatggcttctctggcatccccatcactgagacgggcaccatgggcagcaagctggtgggcatcgtcacctcccgagacatcgactttcttgctgagaaggaccacaccaccctcctcagtgaggtgatgacgccaaggattgaactggtggtggctccagcaggtgtgacgttgaaagaggcaaatgagatcctgcagcgtagcaagaaagggaagctgcctatcgtcaatgattgcgatgagctggtggccatcatcgcccgcaccgacctgaagaagaaccgagactaccctctggcctccaaggattcccagaagcagctgctctgtggggcagctgtgggcacccgtgaggatgacaaataccgtctggacctgctcacccaggcgggcgtcgacgtcatagtcttggactcgtcccaagggaattcggtgtatcagatcgccatggtgcattacatcaaacagaagtacccccacctccaggtgattggggggaacgtggtgacagcagcccaggccaagaacctgattgatgctggtgtggacgggctgcgcgtgggcatgggctgcggctccatctgcatcacccaggaagtgatggcctgtggtcggccccagggcactgctgtgtacaaggtggctgagtatgcccggcgctttggtgtgcccatcatagccgatggcggcatccagaccgtgggacacgtggtcaaggccctggcccttggagcctccacagtgatgatgggctccctgctggccgccactacggaggcccctggcgagtacttcttctcagacggggtgcggctcaagaagtaccggggcatgggctcactggatgccatggagaagagcagcagcagccagaaacgatacttcagcgagggggataaagtgaagatcgcgcagggtgtctcgggctccatccaggacaaaggatccattcagaagttcgtgccctacctcatagcaggcatccaacacggctgccaggatatcggggcccgcagcctgtctgtccttcggtccatgatgtactcaggagagctcaagtttgagaagcggaccatgtcggcccagattgagggtggtgtccatggcctgcactcttacgaaaagcggctgtactgaggacagcggtggaggccgaggtggtggaggggatgcaccccagtgtccacttttgggcacagcctccctccataactgagtggtccacagatttgcactacgggttctccagctcctttccaggcagagaggaggggaggtcctgaggggactgctgcccctcactcggcatcccctgcagagtcaggactgctcccggggccaggctgccctgggagcccccctccgagcccagccagccaggctctcaggccctgcgcctgcctcaggtctttcttgctgcagcctgctccagcctggcccccaccccaggggcaggcggcccctcctggcttctcctgtagggcacctccctgcccctagcctcccaggaaatggtgctctcctggccctgcctctggcccttcccgggccgctgcccctcagccatgtggcacttctgagctcctgacctaggccaaggggaggtctctgcccccttccccggccctgggctacccttgggtcctgctcctcaggccgctcccctgtccctggccatgggtaggagactgccctggtcatggccgcctgcctgtcattcctgactcaccaccgtccccaggtgaaccattcctcccttctcctcagctgcagtcgaaggctttaactttgcacacttgggatcacagttgcgtcattgtgtattaaatacttggaataaatcaagcaggtctcaacgcctccact

SEQ ID NO: 54175 - DNA, 1470 bp, Artificial Sequence
  derived and/or modified sequence
atggctgactacctgatcagcggcggcaccggctacgtgcctgaagatggcctgacagcccagcagctgtttgccagcgcagatggcctgacctacaatgacttcctgatcctgcccggcttcatcgacttcatcgcagatgaggtggacctgaccagcgccctgaccaggaagatcaccctgaagacccccctcatcagcagccccatggacacagtgacagaggccgacatggccatcgccatggccaagtttgagcagggcttcatcacagatcctgtggtgctgagccccagccacacagtgggagatgtgctggaggccaagatgagacatggcttcagcggcatccccatcacagagaccggcaccatgggcagcaagctggtgggcatcgtgaccagccgggacatcgacttcctggccgagaaggaccacaccaccctgctgtctgaggtgatgaccccccgcatcgagctggtggtggccccagctggggtgaccctgaaggaggccaatgagatcctgcagaggagcaagaagggcaagctgcccatcgtgaatgactgtgatgagctggtggccatcatcgccaggacagacctgaagaagaacagagactaccccctggccagcaaggacagccagaagcagctgctgtgtggggctgctgtgggcaccagagaagatgacaagtaccgcctggacctgctgacccaggccggcgtggatgtgattgtgctggacagcagccagggcaacagcgtgtaccagatcgccatggtgcactacatcaagcagaagtacccccacctgcaggtgattggaggaaatgtggtgacagctgcccaggccaagaacctgattgatgctggggtggatggcctgcgggtgggcatgggctgcggcagcatctgcatcacccaggaggtgatggcctgtggccggccccagggcacagctgtgtacaaggtggccgagtatgcccggcgcttcggcgtgcccatcatcgcagatggcggcatccagacagtgggccacgtggtgaaggccctggccctgggcgccagcacagtgatgatgggcagcctgctggccgccaccacagaggcccctggagagtacttcttcagtgatggagtgcggctgaagaagtaccggggcatgggcagcctggatgccatggagaagagcagcagcagccagaagcgctacttcagcgagggggacaaggtgaagatcgcccagggcgtgtctggcagcatccaggacaagggcagcatccagaagtttgtgccctacctgattgctggcatccagcacggctgccaggacatcggggcccggagcctgtctgtgctgcgctccatgatgtacagcggggagctgaagtttgagaagaggaccatgtctgcccagatcgagggcggcgtgcacggcctgcacagctatgagaagaggctgtactag

SEQ ID NO: 54176 - DNA, 1470 bp, Artificial Sequence
  derived and/or modified sequence
atggccgactacctgatcagcggcggcaccggctacgtgcccgaggatggcctcactgcgcaacaattgttcgccagtgctgacggactaacatataacgattttctcatcttacctggcttcattgattttatagctgacgaggtggaccttacatctgcactgacccggaagatcaccctgaaaacgccactcattagctctcctatggacactgtcactgaggccgatatggcgattgccatggccaaattcgaacaggggttcattactgatccagtcgtgctctcgccttcgcacaccgtgggagatgtgttggaggctaaaatgaggcacggcttctcaggaattccaattactgagacgggaactatgggctctaaactggtcggcattgtgactagccgcgatattgattttcttgcagaaaaggaccataccacactgctgtctgaggtgatgaccccaaggatcgagcttgtagtggcccctgccggagtgacactgaaagaggccaacgagatccttcagcgctctaaaaagggcaaattaccaatcgtgaacgactgcgacgagctggtcgctataatagcaagaacggatcttaaaaaaaatagggattaccctcttgcgtcgaaggatagccagaaacagttgctgtgtggggccgccgttggcaccagagaggacgacaaataccgccttgacctgctaacacaggcgggcgtcgatgtgatagtcttagacagctcccagggtaactcagtctatcagatcgccatggtgcactacatcaagcaaaagtatccacatttacaagtgataggaggtaacgtggtgacagcagctcaggcgaaaaatttgatagatgctggagtagacggtctgcgcgttggaatggggtgtggtagtatttgtattacgcaggaggtcatggcatgcggccgtcctcagggtaccgcagtttataaggttgcggagtatgctagacgtttcggggtgcctatcatcgccgacggagggattcagaccgtcggccacgtagtcaaagccctcgcccttggagcatccactgtcatgatggggtcactcctcgcggcaacaacagaagctcctggagaatacttcttcagcgatggagtgcggttgaaaaagtacagaggcatggggagcctggacgccatggaaaaaagcagctcaagccagaaacgctatttcagcgagggagacaaggtgaagatcgcccagggcgtgtccggatcgattcaggacaagggctccatccaaaagttcgtcccttacttgatcgcaggcattcaacacgggtgccaggacataggcgcacgcagcctgtcagtgttgcgctctatgatgtatagcggagaactgaagttcgagaaaaggacgatgtcagcccagatcgagggcggcgtgcatggtcttcacagctatgaaaagagactctactag

SEQ ID NO: 54177 - DNA, 1470 bp, Artificial Sequence
  derived and/or modified sequence
atggccgactacctgatcagcggcggcaccggctacgtgcccgaggatgggctcacggctcaacagctctttgcatcagccgatggactcacttataacgatttcctgattttgccaggctttattgacttcatcgctgatgaggtggacctgacctctgccctgacaagaaagatcacacttaaaacccctctcatctcttctccaatggacaccgtcacagaagcagatatggccattgccatggcaaaattcgaacaggggttcattacagaccccgtggttcttagcccctcccacacagttggggatgtccttgaagccaagatgcggcatggatttagcgggattcccataactgaaacaggaacaatgggctctaagctggtgggcatcgttaccagcagggatattgactttcttgccgagaaagatcacaccacactactgtccgaggtgatgacaccccggattgaactcgtggtggcgccggccggggtgactctcaaggaagctaacgagatcctccaacgctcaaagaaagggaagctccccatcgttaatgactgcgatgagctcgtggccatcatcgctagaaccgatttgaagaaaaatagggattatcctctagcctcaaaggattctcagaagcagttactgtgtggcgccgcggtggggacacgggaggacgacaagtacaggctggatctgcttactcaagccggcgtggacgtgatagtcctcgactcctctcagggaaattcagtctatcagattgccatggtccactatataaaacaaaagtacccgcatctccaggttattggagggaacgttgtgactgcagctcaggctaaaaacctcatagacgctggcgtagatggactgcgggtcggcatggggtgcgggtccatatgtattacccaggaagtcatggcttgcggacgcccccaggggaccgctgtctataaagttgctgagtatgccagaaggttcggcgtgccaatcattgctgacggcgggatccagacagtggggcatgtcgtgaaagccctggctctgggtgcatccacggtaatgatgggatcactccttgcagctaccaccgaggcgcctggagagtatttcttttccgatggagtacgcctgaagaaataccgggggatgggcagcctagacgccatggagaaaagttcttcttcccaaaagcggtacttcagcgagggcgacaaagtcaagattgctcagggcgtgagtggaagcattcaagataaggggtctatacagaagttcgtcccatatctgatcgccgggattcagcatggatgccaagacatcggcgctcggagcctctcagtgctgaggtccatgatgtatagtggagagttgaagttcgagaagcggacgatgagtgctcagattgaggggggagtccacggactacattcctacgagaaacgcctgtactag

SEQ ID NO: 54178 - DNA, 1470 bp, Artificial Sequence
  derived and/or modified sequence
atggccgactacctaattagtggcggaactggatacgtaccagaagatggtcttacagcccaacaacttttcgcaagcgccgatggccttacatataacgacttcctgattctgcccggattcatcgactttatagctgatgaggtggacctcaccagtgcactgacacgaaagatcacactaaagacccctcttatctctagccccatggacacagtgacagaggctgatatggcgattgctatggcaaaattcgagcaaggcttcattacagatccagtcgtgctatctcccagccacactgtcggggacgtgctggaggccaagatgagacacggcttctcaggcatccctataacagagacgggaaccatggggagcaagctggtgggtatcgtaacttctcgtgatattgatttcctggcagagaaagatcacaccacacttctttccgaggttatgactcccaggattgagttggtcgtcgctcccgctggcgttactctgaaggaagctaacgaaatcctgcagcgaagcaagaaggggaaactgcccattgttaatgactgtgacgagctggtggcgatcatagcccgtaccgatctgaaaaagaaccgagattacccactggcatccaaagactcacagaaacaactgctgtgcggggcagcggtgggaaccagggaggatgacaaatataggctcgaccttctaacccaggccggagtggatgtgatcgttctcgattcgagtcaaggaaactcagtatatcaaatcgctatggtgcactacattaaacagaagtacccgcaccttcaggtgattggaggcaacgtcgttactgcagcgcaagcaaaaaacttaatcgatgccggtgtggacggattgcgggtggggatgggttgtgggtcaatttgtatcacacaggaggtaatggcatgtggtcggccacaagggactgcagtttacaaagtcgccgaatacgcccgtagatttggagtacccatcatagccgacgggggaatccagacagtaggtcatgtggtcaaggctttggcccttggagccagtaccgtcatgatgggctcccttcttgctgcaacaactgaggctcccggtgagtatttcttttccgatggggttcgactaaaaaaatacaggggcatgggctctctggacgccatggagaagagctccagctctcagaagcggtacttctccgaaggcgacaaagtgaagattgcccagggagtctctggatccattcaagacaaaggaagcatccaaaaattcgtgccctatctgatcgccggaatccagcatgggtgtcaagatatcggtgcgcgatcgctctcagttttgcggtctatgatgtattccggagaactgaaatttgaaaaaagaacgatgtcagcacaaatcgaaggcggtgtgcatggtctgcattcttacgaaaaaaggctttactag

SEQ ID NO: 54179 - DNA, 1470 bp, Artificial Sequence
  derived and/or modified sequence
atggcagattatctgatttctggaggcaccgggtacgtgccagaagatggtcttactgcccagcagctttttgcttcggcggatggattaacctacaacgattttttgatcctgcccggattcatagattttatcgcagacgaggtcgacttaacctccgcattgaccaggaaaattacactaaagacccctctgatttcttcccctatggataccgtgacggaggctgacatggcaatcgcgatggctaagttcgagcaggggtttattaccgaccccgtcgtcctcagtccctcacatactgtgggcgacgttctggaggccaaaatgcgccatgggtttagcggtattcccattacagagacgggaacaatgggctccaaactggtgggaattgtgacgagtcgggatattgactttctcgcagagaaggaccataccaccctcttgtccgaagtcatgacacccaggatcgagctggtagtcgctccagcgggagttaccctgaaggaggccaatgagatcctgcaacgctccaagaagggaaaactgccgattgtgaacgactgtgatgaactggttgctattatcgccagaaccgatttgaagaagaatcgggattaccccctcgcaagcaaggacagccagaagcagctgctatgtggggctgctgtaggcacacgcgaggacgataagtaccggctggacttattgactcaagcaggcgtggatgtgattgttcttgacagctcgcagggcaattctgtctatcagattgccatggtgcactacattaagcaaaaatacccacacctccaagtaatcggcggaaatgtggtgactgccgctcaggccaagaatttgatcgatgcaggcgtcgacggcctgcgagtgggtatgggttgtggaagtatctgtatcacacaagaggtgatggcctgcggcagaccccaggggacagcagtgtataaggtagcggagtatgctcgccgttttggggtgccaataatcgccgatggtggcattcagaccgttggacatgttgtgaaagcccttgccctaggtgcaagtacagttatgatgggaagtcttctcgctgccactacagaggcccctggggaatattttttcagcgatggtgtccgtctcaagaaataccggggtatgggaagtctggatgcgatggaaaaatcaagctcatcacagaagagatactttagtgaaggcgataaagttaagatcgcacagggtgtaagcgggagcattcaggataaggggagcatccagaagtttgtgccatatctgatagctgggattcagcatggctgccaggacattggcgctagaagcttgtccgtgctgcggtcgatgatgtactcaggagaactgaagttcgaaaaaaggactatgtccgcccagatagagggaggtgtgcatggacttcacagttatgaaaagaggctctactag

SEQ ID NO: 54180 - DNA, 1470 bp, Artificial Sequence
  derived and/or modified sequence
atggccgactacctgatcagcggcggcaccggctacgtgcccgaggacggcctgaccgcccagcagctgttcgccagcgccgacggcctgacctacaacgacttcctgatcctgcccggcttcatcgacttcatcgccgacgaggtggacctgaccagcgccctgaccagaaagatcaccctgaagacccccctgatcagcagccccatggacaccgtgaccgaggccgacatggccatcgccatggccaagttcgagcagggcttcatcaccgaccccgtggtgctgagccccagccacaccgtgggcgacgtgctggaggccaagatgagacacggcttcagcggcatccccatcaccgagaccggcaccatgggcagcaagctggtgggcatcgtgaccagcagagacatcgacttcctggccgagaaggaccacaccaccctgctgagcgaggtgatgacccccagaatcgagctggtggtggcccccgccggcgtgaccctgaaggaggccaacgagatcctgcagagaagcaagaagggcaagctgcccatcgtgaacgactgcgacgagctggtggccatcatcgccagaaccgacctgaagaagaacagagactaccccctggccagcaaggacagccagaagcagctgctgtgcggcgccgccgtgggcaccagagaggacgacaagtacagactggacctgctgacccaggccggcgtggacgtgatcgtgctggacagcagccagggcaacagcgtgtaccagatcgccatggtgcactacatcaagcagaagtacccccacctgcaggtgatcggcggcaacgtggtgaccgccgcccaggccaagaacctgatcgacgccggcgtggacggcctgagagtgggcatgggctgcggcagcatctgcatcacccaggaggtgatggcctgcggcagaccccagggcaccgccgtgtacaaggtggccgagtacgccagaagattcggcgtgcccatcatcgccgacggcggcatccagaccgtgggccacgtggtgaaggccctggccctgggcgccagcaccgtgatgatgggcagcctgctggccgccaccaccgaggcccccggcgagtacttcttcagcgacggcgtgagactgaagaagtacagaggcatgggcagcctggacgccatggagaagagcagcagcagccagaagagatacttcagcgagggcgacaaggtgaagatcgcccagggcgtgagcggcagcatccaggacaagggcagcatccagaagttcgtgccctacctgatcgccggcatccagcacggctgccaggacatcggcgccagaagcctgagcgtgctgagaagcatgatgtacagcggcgagctgaagttcgagaagagaaccatgagcgcccagatcgagggcggcgtgcacggcctgcacagctacgagaagagactgtactag

SEQ ID NO: 54181 - protein, 566 aa, Artificial Sequence
  derived and/or modified sequence
MEGPLTPPPLQGGGAAAVPEPGARQHPGHETAAQRYSARLLQAGYEPESPRLDLATHPTTPRSELSSVVLLAGVGVQMDRLRRASDFLILPGFIDFIADEVDLTSALTRKITLKTPLISSPMDTVTEADMAIAMALMGGIGFIHHNCTPEFQANEVRKVKKFEQGFITDPVVLSPSHTVGDVLEAKMRHGFSGIPITETGTMGSKLVGIVTSRDIDFLAEKDHTTLLSEVMTPRIELVVAPAGVTLKEANEILQRSKKGKLPIVNDCDELVAIIARTDLKKNRDYPLASKDSQKQLLCGAAVGTREDDKYRLDLLTQAGVDVIVLDSSQGNSVYQIAMVHYIKQKYPHLQVIGGNVVTAAQAKNLIDAGVDGLRVGMGCGSICITQEVMACGRPQGTAVYKVAEYARRFGVPIIADGGIQTVGHVVKALALGASTVMMGSLLAATTEAPGEYFFSDGVRLKKYRGMGSLDAMEKSSSSQKRYFSEGDKVKIAQGVSGSIQDKGSIQKFVPYLIAGIQHGCQDIGARSLSVLRSMMYSGELKFEKRTMSAQIEGGVHGLHSYEKRLY

SEQ ID NO: 54182 - DNA, 1701 bp, Artificial Sequence
  derived and/or modified sequence
atggagggccctctaactccacctcctcttcagggaggaggggcggccgcagtgccggagcccggggcccggcagcatccggggcacgagaccgcggcccagcgatattccgcgcgccttctccaggctggatacgaacccgaaagtccaaggctagacctggccacacaccctacaacacctcggtccgaattaagcagcgttgtcctgctggccggcgtcggggtccagatggatcgtttgcgtagagcatcagactttctcatcttaccaggatttattgactttatcgccgatgaggtcgaccttacctcagctcttacaaggaagattaccctcaagacaccactcatcagttctcccatggatactgtgactgaggccgacatggctatagccatggctctgatgggggggatcggattcatccaccacaactgcactcccgaattccaggcaaatgaggttcggaaagtgaaaaaattcgaacagggatttattaccgatcccgtagtcttgagtccaagtcacactgttggggacgtcctggaagccaaaatgcggcatggtttcagcggcatccctatcaccgaaaccgggaccatgggatccaagcttgtagggattgtgaccagtcgggatattgacttcctcgcggaaaaggaccacaccactctgctgtcagaggtcatgacaccacgaatagagcttgttgttgctccggccggagtgaccctcaaagaggctaatgaaatactgcagagatcaaagaaggggaagcttcccattgtcaatgactgtgatgagctggtggccatcattgcgcggactgatttgaagaagaaccgcgactaccccttagcctccaaagatagccagaaacaactgctctgtggggctgctgtcggcaccagggaagatgacaagtaccgcctggacttgctcacacaggctggcgtggacgtgatcgtcttggacagtagccagggcaactccgtgtaccagatcgcaatggttcactatatcaagcagaaatatcctcatttacaggttatcggtggcaacgtagttacagccgctcaggctaagaatctgatagacgccggagtcgatggtctgcgagtgggaatggggtgtggcagcatttgcattacgcaagaggtgatggcctgcgggcggccccagggtaccgccgtgtataaggtggctgaatacgcccgccgtttcggcgtgcccatcatcgcagatggaggtattcagacagttggacacgtagtgaaggctctcgctttaggagcaagtacggtgatgatggggagtttactggccgcaaccaccgaagcaccgggggagtatttcttctccgatggggtaagactgaagaaatatcgtgggatgggcagtctggatgcaatggagaagagttcctctagccagaagagatacttctctgagggggacaaagtgaagatcgcacaaggagtctccggaagtatccaggataagggtagcatccagaagttcgttccatacctcatagctggcatacaacacggatgccaagacatcggcgctagatctttgagcgtactccgttcgatgatgtattctggtgagcttaaattcgagaagcggacgatgtcagctcaaattgagggcggagtacacggtctgcattcatatgaaaagcggctttattag

SEQ ID NO: 54183 - DNA, 2431 bp, Artificial Sequence
  derived and/or modified sequence
atggaggggccactcactccaccaccgctgcagggaggcggagccgccgctgttccggagcccggagcccggcaacacccgggacacgagacggcggcgcagcggtacagcgcccgactgctgcaggccggctacgagcccgagagccctagattggacctcgctacacacccgacgacaccccgttcagaactatcttcagtggtcttactggcaggtgttggtgtccagatggatcgccttcgcagggctagcgacttcctgattctcccaggattcatagacttcatagctgatgaggtggacctgacctcagccctgacccggaagatcacgctgaagacgccactgatctcctcccccatggacactgtgacagaggctgacatggccattgccatggctctgatgggaggtattggtttcattcaccacaactgcaccccagagttccaggccaacgaggtgcggaaggtcaagaagtttgaacagggcttcatcacggaccctgtggtgctgagcccctcgcacactgtgggcgatgtgctggaggccaagatgcggcatggcttctctggcatccccatcactgagacgggcaccatgggcagcaagctggtgggcatcgtcacctcccgagacatcgactttcttgctgagaaggaccacaccaccctcctcagtgaggtgatgacgccaaggattgaactggtggtggctccagcaggtgtgacgttgaaagaggcaaatgagatcctgcagcgtagcaagaaagggaagctgcctatcgtcaatgattgcgatgagctggtggccatcatcgcccgcaccgacctgaagaagaaccgagactaccctctggcctccaaggattcccagaagcagctgctctgtggggcagctgtgggcacccgtgaggatgacaaataccgtctggacctgctcacccaggcgggcgtcgacgtcatagtcttggactcgtcccaagggaattcggtgtatcagatcgccatggtgcattacatcaaacagaagtacccccacctccaggtgattggggggaacgtggtgacagcagcccaggccaagaacctgattgatgctggtgtggacgggctgcgcgtgggcatgggctgcggctccatctgcatcacccaggaagtgatggcctgtggtcggccccagggcactgctgtgtacaaggtggctgagtatgcccggcgctttggtgtgcccatcatagccgatggcggcatccagaccgtgggacacgtggtcaaggccctggcccttggagcctccacagtgatgatgggctccctgctggccgccactacggaggcccctggcgagtacttcttctcagacggggtgcggctcaagaagtaccggggcatgggctcactggatgccatggagaagagcagcagcagccagaaacgatacttcagcgagggggataaagtgaagatcgcgcagggtgtctcgggctccatccaggacaaaggatccattcagaagttcgtgccctacctcatagcaggcatccaacacggctgccaggatatcggggcccgcagcctgtctgtccttcggtccatgatgtactcaggagagctcaagtttgagaagcggaccatgtcggcccagattgagggtggtgtccatggcctgcactcttacgaaaagcggctgtactgaggacagcggtggaggccgaggtggtggaggggatgcaccccagtgtccacttttgggcacagcctccctccataactgagtggtccacagatttgcactacgggttctccagctcctttccaggcagagaggaggggaggtcctgaggggactgctgcccctcactcggcatcccctgcagagtcaggactgctcccggggccaggctgccctgggagcccccctccgagcccagccagccaggctctcaggccctgcgcctgcctcaggtctttcttgctgcagcctgctccagcctggcccccaccccaggggcaggcggcccctcctggcttctcctgtagggcacctccctgcccctagcctcccaggaaatggtgctctcctggccctgcctctggcccttcccgggccgctgcccctcagccatgtggcacttctgagctcctgacctaggccaaggggaggtctctgcccccttccccggccctgggctacccttgggtcctgctcctcaggccgctcccctgtccctggccatgggtaggagactgccctggtcatggccgcctgcctgtcattcctgactcaccaccgtccccaggtgaaccattcctcccttctcctcagctgcagtcgaaggctttaactttgcacacttgggatcacagttgcgtcattgtgtattaaatacttggaataaatcaagcaggtctcaacgcctccacta

SEQ ID NO: 54184 - DNA, 1701 bp, Artificial Sequence
  derived and/or modified sequence
atggagggccccctgaccccaccacccctgcagggcggcggcgctgctgctgtgcctgagcccggggcccggcagcaccctggccatgaaacagctgcccagcgctacagcgcccggctgctgcaggccggctatgagcctgagagcccccggctggacctggccacccaccccaccacccccaggtctgagctgagctctgtggtgctgctggccggcgtgggcgtgcagatggaccggctgcggcgggccagtgacttcctgatcctgcccggcttcatcgacttcatcgcagatgaggtggacctgaccagcgccctgaccaggaagatcaccctgaagacccccctcatcagcagccccatggacacagtgacagaggccgacatggccatcgccatggccctgatgggcggcatcggcttcatccaccacaactgcaccccagagttccaggccaatgaggtgaggaaggtgaagaagtttgagcagggcttcatcacagatcctgtggtgctgagccccagccacacagtgggagatgtgctggaggccaagatgagacatggcttcagcggcatccccatcacagaaacaggcaccatgggcagcaagctggtgggcatcgtgaccagccgggacatcgacttcctggccgagaaggaccacaccaccctgctgtctgaggtgatgaccccaagaattgagctggtggtggccccagctggggtgaccctgaaggaggccaatgagatcctgcagaggagcaagaagggcaagctgcccatcgtgaatgactgtgatgagctggtggccatcatcgccaggacagacctgaagaagaacagagactaccccctggccagcaaggacagccagaagcagctgctgtgtggggctgctgtgggcacccgggaggatgacaagtaccgcctggacctgctgacccaggccggcgtggatgtgattgtgctggacagcagccagggcaacagcgtgtaccagatcgccatggtgcactacatcaagcagaagtacccccacctgcaggtgattggaggaaatgtggtgacagctgcccaggccaagaacctgattgatgctggggtggatggcctgcgggtgggcatgggctgcggcagcatctgcatcacccaggaggtgatggcctgtggccggccccagggcacagctgtgtacaaggtggccgagtatgccaggagatttggagtgcccatcatcgcagatggcggcatccagacagtgggccacgtggtgaaggccctggccctgggcgccagcacagtgatgatgggcagcctgctggccgccaccacagaggcccctggagagtacttcttcagtgatggagtgcggctgaagaagtaccggggcatgggcagcctggatgccatggagaagagcagcagcagccagaagcgctacttcagcgagggggacaaggtgaagatcgcccagggcgtgtctggcagcatccaggacaagggcagcatccagaagtttgtgccctacctgattgctggcatccagcacggctgccaggacattggagcccggagcctgtctgtgctgcgctccatgatgtacagcggggagctgaagtttgagaagaggaccatgtctgcccagattgaaggaggagtgcacggcctgcacagctatgagaagaggctgtactag

SEQ ID NO: 54185 - DNA, 1701 bp, Artificial Sequence
  derived and/or modified sequence
atggagggccccctgacccccccccccctgcagggcggcggcgccgctgcagtccccgagccgggcgcccggcagcacccaggccacgaaactgctgcacaaaggtactccgctcgtttattacaggcaggttacgaacctgagtctcccagactagatctggccacccatcctactactcccagatccgagctgagctccgtagtgctgctcgcgggcgttggtgtgcagatggaccgccttcgcagggcctccgattttctgatacttcccggctttatagactttatcgccgatgaagtcgaccttacctccgctctcacaaggaagataaccctgaaaacgcccctcattagcagccccatggacacagtgaccgaggctgatatggccatcgcaatggccctcatggggggcattgggtttattcaccacaattgcactcccgagttccaggcaaatgaagtccggaaggtgaaaaagttcgaacagggatttataacggatcctgtggtgctttccccatcccacacggtgggagacgtgctcgaagcaaagatgcgccacggtttttccgggattcccatcactgagacagggacgatgggctctaagttggtggggattgtgacgagtcgtgatattgacttcctggcagaaaaagatcatacaaccctgctcagcgaggtgatgactccgaggatcgagctggtagtagcccccgccggagtgacattaaaggaagccaacgagattctgcagagaagcaagaagggcaagctaccaattgtcaatgactgcgacgaactagttgccattatagctcgtactgacttgaagaagaaccgggactatcctctggcctccaaggactcgcagaagcagctactgtgcggggcagccgttggtacccgagaggacgataaatatcggctggatcttttgacacaggctggcgtggacgttatcgtgttggatagctcgcagggtaactctgtgtaccagatcgctatggtgcactacatcaagcagaagtaccctcacctacaggttatcgggggaaatgtagtgacagccgctcaggcaaaaaatctcatcgatgcgggcgtggatgggctgcgagtcggcatgggctgtggttctatctgtattacacaggaggtaatggcttgtggacggccacagggaactgctgtctataaagtcgcagagtacgctcgccgatttggggttcctattattgctgacggcggcatccagaccgtcggtcacgtggtgaaagccttggccctcggagcatccaccgtgatgatggggtctcttctagccgccaccacagaggctccgggcgagtacttcttcagcgatggagtcagattaaagaaatatagagggatgggatccctggacgctatggagaagtcttctagcagtcagaaaagatacttcagcgagggtgacaaggtgaagatagcccaaggcgtgtctgggtctattcaggataagggcagcatacaaaaatttgtgccttacttgatcgctggtattcagcacgggtgccaggacatcggcgcccggagtctgagcgtcttgaggtctatgatgtattcaggtgagttaaagtttgagaagcgtacaatgagcgcacaaatcgagggaggtgtgcatggactgcacagctacgaaaaaagactgtattag

SEQ ID NO: 54186 - DNA, 1701 bp, Artificial Sequence
  derived and/or modified sequence
atggaagggcctcttaccccacccccactgcaaggcggtggtgcagctgccgttccagaaccaggagcgaggcagcaccccggacacgagactgcggcacagcggtactcggcacgactgcttcaggcgggttacgaacctgagtcccccagactagacctggcaactcatcctacaacacctagatccgagcttagttctgtagtgttgctggccggagtgggagtacagatggaccgcttgaggcgtgcctctgactttctcatcctgccaggttttattgatttcattgctgacgaggttgatctgacatcagcacttacaaggaagatcactctcaaaactccactaatctcctcccctatggatactgttacagaagctgacatggcaatcgctatggctctcatggggggtatcgggttcatacaccataactgtacccccgaattccaggcaaacgaggtgagaaaagtcaaaaagttcgagcaaggattcataactgatcctgttgtgttatccccgagccatacagtgggggacgtgctggaagctaaaatgcggcatggttttagtggcatccctatcaccgagactggaaccatggggtcaaagctggtgggcatcgtgacttctcgtgatatcgactttttagcagagaaagatcataccacgctgctgtctgaggttatgacccctaggatcgagctagttgtggctccagccggagttactctcaaggaggccaacgaaatcctccagaggtccaaaaaaggtaagctgcctatcgtgaatgactgcgacgaactggttgcaattattgcccgtaccgatctcaaaaaaaaccgagactacccacttgcgtccaaggactctcagaagcagctgctctgcggcgcagcagttggaacaagagaggatgataagtaccgtttagacctgctcacacaggcaggtgtggatgtaatcgtgcttgattcttctcagggcaatagtgtgtatcagattgccatggtgcattatatcaagcagaagtatccccatcttcaggtgatcggcggaaatgtagtgacagctgcgcaggcaaagaatttgattgacgcaggcgttgatggtctccgcgtcggcatggggtgtgggtctatttgcataacccaggaggtcatggcctgcgggagaccccagggtaccgcagtgtataaggtggccgaatatgctaggagattcggtgttcctatcattgctgacggcggtatccagactgtgggccacgttgtgaaggcattggcccttggggcttctacggtaatgatggggtcgttactcgcagccactacggaggcaccaggagagtactttttttcagacggcgtcaggctcaagaaataccggggtatgggctctctcgacgccatggaaaagtcatcgagttctcagaagaggtacttttctgagggggataaggtgaaaatagcccagggggtatcaggatccatacaggataaaggttctatacagaagtttgtgccatacttgatcgctggcattcaacacggatgccaggatatcggcgcaagatcacttagtgtgctaaggtccatgatgtacagcggagagctcaaatttgagaaaaggaccatgtccgctcagattgagggtggcgtccatggcctgcattcctatgagaaaaggctctactag

SEQ ID NO: 54187 - DNA, 1701 bp, Artificial Sequence
  derived and/or modified sequence
atggagggccccctgacccccccccccctgcagggcggcggcgccgccgccgtgcccgagcccggcgccagacagcaccccggccacgagaccgccgcccagagatacagcgccagactgctgcaggccggctacgagcccgagagccccagactggacctggccacccaccccaccacccccagaagcgagctgagcagcgtggtgctgctggccggcgtgggcgtgcagatggacagactgagaagagccagcgacttcctgatcctgcccggcttcatcgacttcatcgccgacgaggtggacctgaccagcgccctgaccagaaagatcaccctgaagacccccctgatcagcagccccatggacaccgtgaccgaggccgacatggccatcgccatggccctgatgggcggcatcggcttcatccaccacaactgcacccccgagttccaggccaacgaggtgagaaaggtgaagaagttcgagcagggcttcatcaccgaccccgtggtgctgagccccagccacaccgtgggcgacgtgctggaggccaagatgagacacggcttcagcggcatccccatcaccgagaccggcaccatgggcagcaagctggtgggcatcgtgaccagcagagacatcgacttcctggccgagaaggaccacaccaccctgctgagcgaggtgatgacccccagaatcgagctggtggtggcccccgccggcgtgaccctgaaggaggccaacgagatcctgcagagaagcaagaagggcaagctgcccatcgtgaacgactgcgacgagctggtggccatcatcgccagaaccgacctgaagaagaacagagactaccccctggccagcaaggacagccagaagcagctgctgtgcggcgccgccgtgggcaccagagaggacgacaagtacagactggacctgctgacccaggccggcgtggacgtgatcgtgctggacagcagccagggcaacagcgtgtaccagatcgccatggtgcactacatcaagcagaagtacccccacctgcaggtgatcggcggcaacgtggtgaccgccgcccaggccaagaacctgatcgacgccggcgtggacggcctgagagtgggcatgggctgcggcagcatctgcatcacccaggaggtgatggcctgcggcagaccccagggcaccgccgtgtacaaggtggccgagtacgccagaagattcggcgtgcccatcatcgccgacggcggcatccagaccgtgggccacgtggtgaaggccctggccctgggcgccagcaccgtgatgatgggcagcctgctggccgccaccaccgaggcccccggcgagtacttcttcagcgacggcgtgagactgaagaagtacagaggcatgggcagcctggacgccatggagaagagcagcagcagccagaagagatacttcagcgagggcgacaaggtgaagatcgcccagggcgtgagcggcagcatccaggacaagggcagcatccagaagttcgtgccctacctgatcgccggcatccagcacggctgccaggacatcggcgccagaagcctgagcgtgctgagaagcatgatgtacagcggcgagctgaagttcgagaagagaaccatgagcgcccagatcgagggcggcgtgcacggcctgcacagctacgagaagagactgtactag

SEQ ID NO: 54188 - protein, 414 aa, Artificial Sequence
  derived and/or modified sequence
MQTFLKGKRVGYWLSEKKIKKLNFQAFAELCRKRGMEVVQLNLSRPIEEQGPLDVIIHKLTDVILEADQNDSQSLELVHRFQEYIDAHPETIVLDPLPAIRTLLDRSKSYELIRKIEAYMEDDRICSPPFMELTSLCGDDTMRLLEKNGLTFPFICKTRVAHGTNSHEMAIVFNQEGLNAIQPPCVVQNFINHNAVLYKVFVVGESYTVVQRPSLKNFSAGTSDRESIFFNSHNVSKPESSSVLTELDKIEGVFERPSDEVIRELSRALRQALGVSLFGIDIIINNQTGQHAVIDINAFPGYEGVSEFFTDLLNHIATVLQGQSTAMAATGDVALLRHSKLLAEPAGGLVGERTCSASPGCCGSMMGQDAPWKAEADAGGTAKLPHQRLGCNAGVSPSFQQHCVASLATKASSQ

SEQ ID NO: 54189 - protein, 357 aa, Artificial Sequence
  derived and/or modified sequence
MQTFLKGKRVGYWLSEKKIKKLNFQAFAELCRKRGMEVVQLNLSRPIEEQGPLDVIIHKLTDVILEADQNDSQSLELVHRFQEYIDAHPETIVLDPLPAIRTLLDRSKSYELIRKIEAYMEDDRICSPPFMELTSLCGDDTMRLLEKNGLTFPFICKTRVAHGTNSHEMAIVFNQEGLNAIQPPCVVQNFINHNAVLYKVFVVGESYTVVQRPSLKNFSAGTSDRESIFFNSHNVSKPESSSVLTELDKIEGVFERPSDEVIRELSRALRQALGVSLFGIDIIINNQTGQHAVIDINAFPGYEGVSEFFTDLLNHIATVLQGQSTAMAAPSGEFRAGDLCCDLGKSFQVFGPPPPCL

SEQ ID NO: 54190 - protein, 444 aa, Artificial Sequence
  derived and/or modified sequence
FRVPAAGRRCPLARGARRPPDSACGRFPPDPGSPPEEEDADLSEREESWLLAEREENQEAEFPGLRRAVQLNLSRPIEEQGPLDVIIHKLTDVILEADQNDSQSLELVHRFQEYIDAHPETIVLDPLPAIRTLLDRSKSYELIRKIEAYMEDDRICSPPFMELTSLCGDDTMRLLEKNGLTFPFICKTRVAHGTNSHEMAIVFNQEGLNAIQPPCVVQNFINHNAVLYKVFVVGESYTVVQRPSLKNFSAGTSDRESIFFNSHNVSKPESSSVLTELDKIEGVFERPSDEVIRELSRALRQALGVSLFGIDIIINNQTGQHAVIDINAFPGYEGVSEFFTDLLNHIATVLQGQSTAMAATGDVALLRHSKLLAEPAGGLVGERTCSASPGCCGSMMGQDAPWKAEADAGGTAKLPHQRLGCNAGVSPSFQQHCVASLATKASSQ

SEQ ID NO: 54191 - protein, 168 aa, Artificial Sequence
  derived and/or modified sequence
MQTFLKGKRVGYWLSEKKIKKLNFQAFAELCRKRGMEVVQLNLSRPIEEQGPLDVIIHKLTDVILEADQNDSQSLELVHRFQEYIDAHPETIVLDPLPAIRTLLDRSKSYELIRKIEAYMEDDRICSPPFMELTSLCGDDTMRLLEKNGLTFPFICKTRVAHGTNSHE

SEQ ID NO: 54192 - DNA, 1335 bp, Artificial Sequence
  derived and/or modified sequence
ttcagagtgcccgccgccggcagaagatgccccctggccagaggcgccagaagaccccccgacagcgcctgcggcagattcccccccgaccccggcagcccccccgaggaggaggacgccgacctgagcgagagagaggagagctggctgctggccgagagagaggagaaccaggaggccgagttccccggcctgagaagagccgtgcagctgaacctgagcagacccatcgaggagcagggccccctggacgtgatcatccacaagctgaccgacgtgatcctggaggccgaccagaacgacagccagagcctggagctggtgcacagattccaggagtacatcgacgcccaccccgagaccatcgtgctggaccccctgcccgccatcagaaccctgctggacagaagcaagagctacgagctgatcagaaagatcgaggcctacatggaggacgacagaatctgcagcccccccttcatggagctgaccagcctgtgcggcgacgacaccatgagactgctggagaagaacggcctgaccttccccttcatctgcaagaccagagtggcccacggcaccaacagccacgagatggccatcgtgttcaaccaggagggcctgaacgccatccagcccccctgcgtggtgcagaacttcatcaaccacaacgccgtgctgtacaaggtgttcgtggtgggcgagagctacaccgtggtgcagagacccagcctgaagaacttcagcgccggcaccagcgacagagagagcatcttcttcaacagccacaacgtgagcaagcccgagagcagcagcgtgctgaccgagctggacaagatcgagggcgtgttcgagagacccagcgacgaggtgatcagagagctgagcagagccctgagacaggccctgggcgtgagcctgttcggcatcgacatcatcatcaacaaccagaccggccagcacgccgtgatcgacatcaacgccttccccggctacgagggcgtgagcgagttcttcaccgacctgctgaaccacatcgccaccgtgctgcagggccagagcaccgccatggccgccaccggcgacgtggccctgctgagacacagcaagctgctggccgagcccgccggcggcctggtgggcgagagaacctgcagcgccagccccggctgctgcggcagcatgatgggccaggacgccccctggaaggccgaggccgacgccggcggcaccgccaagctgccccaccagagactgggctgcaacgccggcgtgagccccagcttccagcagcactgcgtggccagcctggccaccaaggccagcagccagtag

SEQ ID NO: 54193 - DNA, 1245 bp, Artificial Sequence
  derived and/or modified sequence
atgcagaccttcctgaaaggaaagcgcgtcggatattggctgtcagaaaagaagattaagaagttgaatttccaggcgtttgccgagctttgcaggaaaagaggtatggaagtcgtacagttaaatctgagtagaccaatcgaagagcaaggtccattggatgtaataattcacaagctcactgacgtaatcttggaagccgatcaaaatgattcccagtccctggaattggtgcatagatttcaggagtatatcgatgcccaccccgagacaattgtcctagatccactcccagccattcgcacgctgctggaccgctcaaagtcttacgagctgattaggaagatcgaggcgtatatggaggatgaccggatatgctcccccccgtttatggaattgaccagcctgtgtggagacgatacgatgcggttgctcgagaagaacggccttaccttcccttttatctgtaaaacacgtgtagctcatgggaccaattctcacgaaatggctatcgtcttcaaccaagaaggactgaatgctatacagcccccgtgtgtcgtccagaattttataaaccacaatgctgtgctttataaggtatttgtggtgggcgagagctacacagtcgtgcaaagaccgtccctcaaaaatttcagcgccggcactagcgatcgtgagtccatcttctttaattctcataacgtgtccaagcctgaatcttcctcagtgttaacagagctcgataaaattgaaggggtctttgaacgcccatcggacgaggtcatccgggagctatcacgagctcttaggcaggccttgggcgtctcgctgtttggcattgacattataatcaataaccagacaggacagcatgcagtcattgacattaacgctttccctggatatgagggcgtctccgaattcttcacagacctccttaatcatatcgccaccgtactccaggggcagagtacagctatggccgcaaccggagacgtagcgctattgcgacactccaagttactggccgaacctgccgggggactggtgggtgagaggacttgttctgcatcaccagggtgttgtggtagcatgatggggcaggacgcaccatggaaggccgaagccgatgccggtggcacagcaaagttacctcatcaaagactggggtgtaacgctggcgtttccccaagtttccaacagcattgtgtggcaagcctggcgacaaaagcatcctctcaatag

SEQ ID NO: 54194 - DNA, 1074 bp, Artificial Sequence
  derived and/or modified sequence
atgcaaacatttcttaaggggaagagggtgggctactggctgagtgagaagaagattaaaaagttgaactttcaggccttcgccgagctttgtaggaaaaggggcatggaggtggttcaactcaacctgtcccggcctattgaggaacaggggcctctcgacgtgataattcacaaactgaccgatgttatcctggaagctgatcagaatgattctcagtccctggaactggtgcacaggtttcaggaatatatcgatgcccaccccgaaacaattgtgctggacccactgccagcaattcgcaccctgctcgatcgatccaagagctacgagcttattcggaagatagaagcttatatggaagatgatcgtatctgcagcccccctttcatggaactcactagcttatgcggggacgatacaatgagacttcttgaaaagaatggtttgaccttcccttttatatgcaaaacacgtgttgctcacgggacaaactcacacgagatggctattgtctttaatcaagagggtctgaacgctattcagcccccttgtgtggtgcagaatttcatcaatcataacgcagtgttatacaaggtatttgtggtgggcgagtcctatactgtcgtccagagaccaagtctcaaaaatttcagcgctggtacttccgaccgggagtctatttttttcaacagccacaatgtctccaagcccgaatcttcctccgtgttgacagaactggataaaatcgaaggagtctttgaacgccctagcgacgaagtgatcagagagctgagcagggcgctgaggcaggcactcggagtatcactgttcggaatcgatatcatcattaacaatcaaacagggcagcatgccgtcatagacataaatgcattccccgggtatgaaggcgtctcagaattttttacggatctactgaaccatatagcaaccgtcctgcaggggcagtccaccgcaatggctgccccatctggagagtttcgggctggtgacctctgctgtgatttagggaagtcgtttcaggtgttcggaccgccacccccttgtctttag

SEQ ID NO: 54195 - DNA, 1335 bp, Artificial Sequence
  derived and/or modified sequence
ttcagggtcccagccgctggaaggaggtgcccactggctcgaggagccaggcggcctcctgacagcgcctgcggcaggtttccacccgaccctggatctcccccagaggaagaggatgcagacctaagcgagcgggaggagagctggctgctggccgaaagagaggagaatcaggaggcagagtttcctggactccggcgtgctgtgcaactaaatttgtcccgcccgattgaggagcagggtccgttggatgttattatacacaagttaacagacgttatacttgaggccgatcagaatgacagccagtcactcgaactggttcataggttccaggagtatatagacgctcatcccgagaccatcgtgctcgatccactccctgccatccgaaccctgcttgatagatctaagagctacgaactgataaggaagatcgaagcctatatggaggatgataggatctgttctccaccctttatggaattaacaagtctgtgtggggacgacaccatgaggttgttggaaaagaatggcttgacctttcccttcatttgtaagactcgtgttgcccatgggaccaattcgcacgagatggccatcgtcttcaatcaggagggactgaatgcgatccagcctccatgcgtggtgcagaattttattaaccataatgcagtcctgtacaaggtcttcgtagtgggcgaatcttacactgtggttcagaggccaagcttaaagaacttttccgccggaacatcagacagagagagcatctttttcaacagccacaatgttagcaaaccagagagttcctctgttttgacagagctagacaagattgagggagtttttgaaagaccgtccgatgaagtgatcagagagctctctcgcgcgctgcgccaggccctgggcgtgtccctcttcgggatcgacatcattatcaataatcaaacgggtcagcacgccgtgattgacattaatgcttttcccggatatgaaggagtgagcgaattcttcactgatctgctgaatcatattgctactgtgctccagggtcagtcaactgcgatggcggcaactggcgacgtcgcgcttctcagacactccaagttactggctgagcctgccggggggctcgttggcgagagaacctgctctgcgagcccaggatgttgcggctctatgatgggccaggatgccccatggaaagctgaagccgacgccggagggacagccaagttgccacatcagcgcctgggttgtaacgcgggagtcagtccttcgtttcagcagcactgcgtggctagcttagcaaccaaagcctctagccagtag

SEQ ID NO: 54196 - DNA, 1245 bp, Artificial Sequence
  derived and/or modified sequence
atgcaaactttcctgaaaggcaagcgggtgggatattggctgtccgagaagaaaatcaagaagttgaacttccaggctttcgcagaactgtgtagaaagcgcggaatggaggttgttcagctgaacctatctaggcccattgaggaacaaggacccttagatgttatcattcacaagctgacagacgtcatactggaagccgaccagaacgacagccagtccctcgaattggtccacaggtttcaagagtatattgacgcccaccccgagaccattgtgttggaccctttaccggccattaggacattgctggatcgctccaagtcttatgaactaatccgaaaaatagaggcgtacatggaggatgataggatctgctcccctccatttatggagctgacttctctttgcggcgatgacacaatgcgcctgttagagaaaaatggtctgacttttccatttatatgcaaaactcgggttgctcacggtacaaattctcacgagatggcaatcgtcttcaatcaggaggggctgaacgctattcagcctccctgcgtcgtgcagaatttcatcaaccacaatgcggtactgtacaaagttttcgtggtgggcgagtcatacacagttgtgcagaggccgagtctcaagaatttttcagcaggtacatctgatcgggaatccatcttctttaacagtcacaacgtctcgaagccggagtcaagtagcgtcctgacagagctggacaagatcgagggtgttttcgaacggccctcagacgaagtgatcagggagctcagccgggctctgcgccaggccctcggtgtgagcctgttcggaattgatattatcattaacaaccaaacaggacaacacgcagtgattgacattaacgccttccctgggtacgaaggggtttctgagttctttacagacctattaaatcacatcgccacagtgctccaaggccagagcaccgccatggcagctaccggcgacgtggcactgctgcgacattctaaactactggcggagccagcaggcggactggttggcgagagaacatgcagcgcttctcccggttgttgtggatctatgatgggacaggacgctccatggaaagccgaggccgacgctggcggaaccgccaagctaccccaccagagactgggctgtaatgctggtgtgagtcccagttttcagcagcactgtgtcgcatctctggccaccaaagcttctagccaatag

SEQ ID NO: 54197 - DNA, 1245 bp, Artificial Sequence
  derived and/or modified sequence
atgcagaccttcctgaagggcaagagggtgggctactggctgtctgagaagaagatcaagaagctgaacttccaggcctttgctgagctgtgcaggaagaggggcatggaggtggtgcagctgaacctgagccggcccatcgaggagcagggccccctggatgtgatcatccacaagctgacagatgtgatcctggaggccgaccagaatgacagccagagcctggagctggtgcaccgcttccaggagtacattgatgcccaccctgagaccatcgtgctggaccccctgcctgccatccgcaccctgctggacaggagcaagagctatgagctgatcaggaagattgaggcctacatggaggatgaccgcatctgcagcccccccttcatggagctgaccagcctgtgtggagatgacaccatgaggctgctggagaagaatggcctgaccttccccttcatctgcaagaccagggtggcccacggcaccaacagccatgagatggccatcgtgttcaaccaggagggcctgaatgccatccagcccccctgtgtggtgcagaacttcatcaaccacaatgctgtgctgtacaaggtgtttgtggtgggggagagctacacagtggtgcagaggcccagcctgaagaacttctctgctggcaccagtgaccgggagagcatcttcttcaacagccacaacgtgtccaagccagagagcagctctgtgctgacagagctggacaagattgagggcgtgtttgagcggcccagtgatgaagtcatccgggagctgagccgggccctgcggcaggccctgggcgtgtccctgtttggcatcgacatcatcatcaacaaccagacaggccagcacgccgtcatcgacatcaatgccttccctggctatgagggcgtgtctgagttcttcacagacctgctgaaccacatcgccaccgtgctgcagggccagagcacagccatggccgccactggagatgtggccctgctgcggcacagcaagctgctggccgagcctgctgggggcctggtgggggagaggacctgcagcgccagccctggctgctgcggctccatgatgggccaggatgccccctggaaggccgaggctgatgctgggggcacagccaagctgccccaccagaggctgggctgcaatgccggcgtgagccccagcttccagcagcactgtgtggccagcctggccaccaaggccagcagccagtag

SEQ ID NO: 54198 - DNA, 1074 bp, Artificial Sequence
  derived and/or modified sequence
atgcagaccttcctgaagggcaagagggtgggctactggctgtctgagaagaagatcaagaagctgaacttccaggcctttgctgagctgtgcaggaagaggggcatggaggtggtgcagctgaacctgagccggcccatcgaggagcagggccccctggatgtgatcatccacaagctgacagatgtgatcctggaggccgaccagaatgacagccagagcctggagctggtgcaccgcttccaggagtacattgatgcccaccctgagaccatcgtgctggaccccctgcctgccatccgcaccctgctggacaggagcaagagctatgagctgatcaggaagattgaggcctacatggaggatgaccgcatctgcagcccccccttcatggagctgaccagcctgtgtggagatgacaccatgaggctgctggagaagaatggcctgaccttccccttcatctgcaagaccagggtggcccacggcaccaacagccatgagatggccatcgtgttcaaccaggagggcctgaatgccatccagcccccctgtgtggtgcagaacttcatcaaccacaatgctgtgctgtacaaggtgtttgtggtgggggagagctacacagtggtgcagaggcccagcctgaagaacttctctgctggcaccagtgaccgggagagcatcttcttcaacagccacaacgtgtccaagccagagagcagctctgtgctgacagagctggacaagattgagggcgtgtttgagcggcccagtgatgaagtcatccgggagctgagccgggccctgcggcaggccctgggcgtgtccctgtttggcatcgacatcatcatcaacaaccagacaggccagcacgccgtcatcgacatcaatgccttccctggctatgagggcgtgtctgagttcttcacagacctgctgaaccacatcgccaccgtgctgcagggccagagcacagccatggccgcccccagcggggagttccgggccggggacctgtgctgtgacctgggcaagagcttccaggtgtttggccccccaccaccctgcctgtag

SEQ ID NO: 54199 - DNA, 1335 bp, Artificial Sequence
  derived and/or modified sequence
ttccgggtgcctgctgctggccgccgctgccccctggcccggggggcccggcggcccccagacagcgcctgtggccgcttccccccagaccccggcagccccccagaggaggaggatgctgacctgtctgagcgggaggagagctggctgctggccgagcgggaggagaaccaggaggccgagttccctggcctgcggcgggctgtgcagctgaacctgagccggcccatcgaggagcagggccccctggatgtgatcatccacaagctgacagatgtgatcctggaggccgaccagaatgacagccagagcctggagctggtgcaccgcttccaggagtacattgatgcccaccctgagaccatcgtgctggaccccctgcctgccatccgcaccctgctggacaggagcaagagctatgagctgatcaggaagattgaggcctacatggaggatgaccgcatctgcagcccccccttcatggagctgaccagcctgtgtggagatgacaccatgaggctgctggagaagaatggcctgaccttccccttcatctgcaagaccagggtggcccacggcaccaacagccatgagatggccatcgtgttcaaccaggagggcctgaatgccatccagcccccctgtgtggtgcagaacttcatcaaccacaatgctgtgctgtacaaggtgtttgtggtgggggagagctacacagtggtgcagaggcccagcctgaagaacttctctgctggcaccagtgaccgggagagcatcttcttcaacagccacaacgtgtccaagccagagagcagctctgtgctgacagagctggacaagattgagggcgtgtttgagcggcccagtgatgaagtcatccgggagctgagccgggccctgcggcaggccctgggcgtgtccctgtttggcatcgacatcatcatcaacaaccagacaggccagcacgccgtcatcgacatcaatgccttccctggctatgagggcgtgtctgagttcttcacagacctgctgaaccacatcgccaccgtgctgcagggccagagcacagccatggccgccactggagatgtggccctgctgcggcacagcaagctgctggccgagcctgctgggggcctggtgggggagaggacctgcagcgccagccctggctgctgcggctccatgatgggccaggatgccccctggaaggccgaggctgatgctgggggcacagccaagctgccccaccagaggctgggctgcaatgccggcgtgagccccagcttccagcagcactgtgtggccagcctggccaccaaggccagcagccagtag

SEQ ID NO: 54200 - DNA, 1245 bp, Artificial Sequence
  derived and/or modified sequence
atgcagaccttcctgaagggcaagcgggtgggctactggctgagcgagaaaaaaattaaaaagttgaactttcaggcattcgcggagttatgtcgaaaaaggggaatggaagttgtccagttgaatcttagtcgccccatcgaggagcaggggccactggacgtgattattcacaagttgaccgatgtgatacttgaggctgaccagaatgattctcagtctctggagctcgtacaccggttccaggagtatatcgatgcacacccagaaactatcgtactggacccgttgccagccatcagaacactcctggaccggagtaaatcttatgagctaattagaaaaattgaggcttacatggaggacgatagaatttgctctcccccctttatggagctaacttcactttgtggggacgacaccatgcgcctcctggaaaagaatggcttgactttccccttcatctgcaagacacgggtcgcccatggcaccaactcccatgagatggctatcgtgtttaatcaggaaggactgaatgccatccagcccccttgtgtggtgcaaaatttcatcaaccataatgcagttctctataaggtcttcgtagtaggcgagtcttataccgtcgtgcaaagaccttctctgaagaattttagtgccgggacgagtgatcgcgagtccattttcttcaactcccacaacgtgtcaaagccggaatcttcatccgtgttgactgaactcgataagatcgagggggtatttgagagaccctctgacgaagtgattagggaactgtctcgtgccctcagacaggcccttggggtgagcctgttcggaatagacatcatcattaacaatcagaccggacagcacgcagtgatcgatattaacgcgtttccaggatatgaaggcgttagcgaatttttcacagatctcttaaaccatattgcaactgtcctccagggccagtccaccgcaatggctgccaccggcgatgtggcgttgctgcggcactcaaagctgctggccgaaccagccggcggactagtgggcgagcgcacttgctccgcatcccctggctgctgcggtagcatgatgggacaggacgccccgtggaaggccgaggcagacgccggaggaactgcaaagctgccccaccaacggttagggtgtaatgccggcgtctccccttcattccagcagcattgcgtcgcgagcttggctactaaggcaagctcccagtag

SEQ ID NO: 54201 - DNA, 1074 bp, Artificial Sequence
  derived and/or modified sequence
atgcagaccttcctgaagggcaagcgggtgggctactggctgagcgagaaaaaaataaagaaactcaacttccaggctttcgctgaactgtgtaggaagaggggcatggaagtggttcaactcaatctgtcccgccctatcgaggagcagggccccttagatgtgatcatacataagctcacagacgtgatcttggaagccgatcagaacgactcccagtctctggaactggtccataggttccaggaatacattgacgctcaccccgaaacaatagtgctcgaccctctgcctgccattcgaactctattggatagaagtaagagctacgaactgatccggaaaattgaagcatatatggaggatgaccgtatttgcagccccccttttatggaactgacctccctgtgcggggacgacacaatgcgattgttggaaaagaacggccttacgttcccttttatctgcaaaacacgtgtggcccatggcacaaacagccatgaaatggccatcgtgtttaatcaggaaggcttgaatgctatccaaccgccttgcgtcgtccagaattttatcaaccacaacgcggtcttgtacaaggtcttcgtggtcggagaaagctatacagtggtccagcgtccaagtctgaagaatttcagcgcaggcacgtccgatagggaatcgatctttttcaattcacataacgtttctaaaccagagagctccagtgtgctgactgaacttgacaagattgaaggggtgtttgagagaccttctgacgaggtgattagagagttatctcgggccctaagacaggccctcggggtgagcctgtttgggatagatatcattatcaataaccagactgggcagcacgccgtaatagacattaatgccttccctgggtacgagggagtaagtgaattcttcaccgatcttttgaatcacattgccaccgtcctgcaggggcagagtacggccatggccgcaccctcgggagagttccgggccggcgacctatgttgcgatctcggtaaaagctttcaagtgtttgggcccccacccccctgcctgtag

SEQ ID NO: 54202 - DNA, 1335 bp, Artificial Sequence
  derived and/or modified sequence
ttccgggtgcccgccgccggccggcggtgccccctggcccggggcgcccggagaccccccgactctgcatgcggtcggttcccgccagatccggggtcccctccagaggaagaggacgctgacctctcagagcgcgaagaaagttggttgcttgcagagcgggaagaaaaccaggaagctgagttccctggtctgcggagagccgtgcagctgaacctgtcacgccctatcgaagagcagggaccactagatgtgatcatccacaagcttactgacgttattctcgaagcagatcagaatgattctcagtccctggaactggtgcaccgatttcaggaatatatcgacgcacatcccgagactatcgtcctcgaccccctgcctgcaattcggaccttgttggacaggagcaaatcatatgagttaatccggaaaatcgaggcctacatggaagatgacagaatctgttctcccccttttatggagctcacctccctgtgcggtgacgacactatgaggctgcttgagaagaacgggttgacattcccatttatttgcaagaccagagttgcccacggtactaatagccacgagatggccattgtatttaaccaggagggcttgaatgccattcagccgccatgcgtcgtgcaaaatttcatcaatcataacgccgtgctatacaaggtttttgtggtcggagagtcatacaccgttgtgcagagaccaagtttgaagaacttttccgccggcactagcgatcgagagagcatcttttttaattcccataacgtgtcgaagcctgagtcttcgtccgtgctgactgagctggacaagattgaaggtgtgttcgaacgtccctccgacgaagtcatccgcgaactctccagagccctaaggcaagccctgggcgtgtcgctgttcggaatcgacatcattataaacaaccaaaccggacagcacgctgtcatagatatcaatgcgtttccagggtatgaaggggtaagcgagtttttcaccgatctactcaaccacatcgcaaccgtgctccaagggcagtccacagccatggctgccactggagatgtggcgctcctgcgtcattccaagctgctggctgaaccagctggcggacttgtgggagagcggacttgctctgctagccctggttgttgcggctctatgatgggacaggacgcgccctggaaggctgaagctgacgctggcggaactgccaagttgccgcaccaacggttgggctgcaacgctggagtatcaccttcgttccagcagcattgcgtggcctccttggcaacaaaagcctctagtcagtag

SEQ ID NO: 54203 - DNA, 3346 bp, Artificial Sequence
  derived and/or modified sequence
cgccgccgcgggctcaagcggggcggccgggccagcgcggggcggcggcgggcaggggcggcgagtgcgcgggcgctcgccgccgcccttctcggcgggcagcgcgcgaggaccaggccgaggaggaagtggcggcggcggcggcgggactgcgcgccccagctccgatccccgttccgcgtccccgccgccgggaggaggtgcccactcgctcgcggcgcgcgccggccgccagactcggcctgtgggcgatttcctccggacccaggctccccgcccgaggaggaagatgcagacctttctgaaagggaagagagttggctactggctgagcgagaagaaaatcaagaagctgaatttccaggccttcgccgagctgtgcagctgaaccttagccggccgatcgaggagcagggccccctggacgtcatcatccacaagctgactgacgtcatccttgaagccgaccagaatgatagccagtccctggagctggtgcacaggttccaggagtacatcgatgcccaccctgagaccatcgtcctggacccgctccctgccatcagaaccctgcttgaccgctccaagtcctatgagctcatccggaagattgaggcctacatggaagacgacaggatctgctcgccacccttcatggagctcacgagcctgtgcggggatgacaccatgcggctgctggagaagaacggcttgactttcccattcatttgcaaaaccagagtggctcatggcaccaactctcacgagatggctatcgtgttcaaccaggagggcctgaacgccatccagccaccctgcgtggtccagaatttcatcaaccacaacgccgtcctgtacaaggtgttcgtggttggcgagtcctacaccgtggtccagaggccctcactcaagaacttctccgcaggcacatcagaccgtgagtccatcttcttcaacagccacaacgtgtcaaagccggagtcgtcatcggtcctgacggagctggacaagatcgagggcgtgttcgagcggccgagcgacgaggtcatccgggagctctcccgggccctgcggcaggcactgggcgtgtcactcttcggcatcgacatcatcatcaacaaccagacagggcagcacgccgtcattgacatcaatgccttcccaggctacgagggcgtgagcgagttcttcacagacctcctgaaccacatcgccactgtcctgcagggccagagcacagccatggcagccacaggggacgtggccctgctgaggcacagcaagcttctggccgagccggcgggcggcctggtgggcgagcggacatgcagcgccagccccggctgctgcggcagcatgatgggccaggacgcgccctggaaggctgaggccgacgcgggcggcaccgccaagctgccgcaccagagactcggctgcaacgccggcgtgtcgcccagcttccagcagcattgtgtggcctccctggccaccaaggcctcctcccagtagccacggagccgggacccagaggggcagcgcagggcgcagagcacacccgctgggccagcagctcccaacggcgatgctactactaagaatccccagtgatctgattcttctgttttttaatttttaacctgattctctgatgtcatgatctaaatgaggggtagtgggggatggaagagagtaccaggtggtccaccgttggggagtggggccgtccgcctgctctctactgtgcagacctcctaactgagtttacacacgcttgtgtttgcaacactaggtctggatgggaggtgaggggtgtgcgtatggctgccatgccagtgtctgtgcacatccctgtctgttggtctccatggccactgtggaccgggacccttgggggaagcctgcccatgtcgggctgtgggaggctgatcggtgcatgtgagagtggcttcccttctgcctgactccccactccctgacctgccccttccttgtttttcctcctactggtctccaccaaggctttgttagcccccaccctgcctggtgtgcagctaacccctccctccccacagccagaggaggccacagacccctcaggggagttccgcgctggggtctgggctgtgctccctcactaaagggaaggaaaggaagctgggcgtcctctgggccccccaacacacgtcccatttagccctgcacagcggtctccttcccctaagccagcactgctgctccctggagcccgggaaggaggctgcctggctggaggcccgagccgatggcgcctgtgctgaggatttgtgctgtgatttgggcaaatcattccaggtctttgggcctccacccccttgtctctagtggacatttgagatcagagagcaccacagggctggctttgtgccctaacccctgggatgcagcctgcctttccataaagtcacctaggtgaggataggcgcgggagcctcggcatgacaccatggagatcggggccctcttcccagtgggttcactccttttcacacctgctgggtccctcctcacccagcaggcctggtccacctctcattgcaagccccaagcactgagccagcaggtgccagggagccacccgccccccatcgcttctgcacacctcagactcaccccatcaccttggcagcaaagcactggctctgccgtctgacccctgatccaggcagccccctctgcagagaaaagggttggggagaagcctctgcagtcctggaagatgtggggtgctgggtgagaggcatcagcccccacaagtatgtttttgtgtcttaagatagcagtttactttgaaaaagtgaaaaaggcttccgggctgtcctctgcccagtgagatggaggacgctagagaaagtgctgagtgtcccgagagaggcccccgagccagtgcatggaggtccttcggcctggctcagctgggctgcaggatgcccactttgaggagggaggcacagggcttgggcgaggggcagaggccatcagaactgcccggcttttttggaaactgaggacccaacaactaaccacgtttacacgacttgagttttgaaccccgattaatgtctgtacgtcacctttcctagttctgaccctgagccctggggaacaggaaagcgtggctggcctcttgcactgctttgtctccaaaataaactactgaaatcaaaccgcatttcacacgtgtttacacatgttgctcaagtttgttatgtcatactcccagtccttaaaagacgtttaataaaacagctttaccttttaaaaataaaatttcaatcccagtctgcctcaggtacgggtgggggtgtgc

SEQ ID NO: 54204 - DNA, 1245 bp, Artificial Sequence
  derived and/or modified sequence
atgcagaccttcctgaagggcaagcgggtgggctactggctgagcgaaaaaaaaattaagaagctgaacttccaggcattcgctgaactttgtcgtaaacgggggatggaggtcgtgcagcttaacctgtctcggcctattgaggaacaaggtccactcgacgtgattattcataagctaaccgacgtaattcttgaggcagatcaaaacgattcacaatctctggaacttgtccacagatttcaggagtatatagatgcacacccagaaactatcgtcctcgatccactgcccgcgataagaacgctcctggaccggagcaaatcttatgagctgataaggaagatcgaggcatacatggaggatgaccgcatctgcagtcccccttttatggaacttacctcactttgtggtgacgacactatgcgtctcttggaaaagaacggccttacgtttccattcatctgcaagacccgcgtggctcatgggaccaactcccacgagatggcaatcgtgtttaatcaggaaggattaaatgcaatacagcccccatgtgtggtacagaacttcattaatcacaatgccgtactatacaaggttttcgttgttggcgagagctatactgttgttcaacgcccctcgctgaaaaactttagcgctggaaccagtgatagagagtctatattctttaactctcataatgtgtctaagcctgagtcgagcagtgtgttaaccgagttggacaagatcgagggggtgtttgagaggcctagcgacgaggttatccgtgaattaagtagggcccttagacaggcccttggcgtaagcttgtttggcattgatattataatcaacaaccagaccggacagcacgcagtaattgatataaacgcattccccggctatgaaggcgtcagcgagttcttcactgacctgctgaaccatatcgcaaccgtcttgcaagggcagtctacagccatggccgccactggagacgtggcactgctgcgccattctaaattgctagcagagcccgccggcggactggtgggggaaagaacctgttctgcctccccgggctgctgtggaagcatgatgggccaggacgcaccctggaaagccgaggcagacgccggaggcacggcgaaactaccccatcagcgactcggatgcaacgctggcgtcagtcctagcttccaacagcactgtgtggccagcctggccacaaaagcctcttcgcaatag

SEQ ID NO: 54205 - DNA, 1245 bp, Artificial Sequence
  derived and/or modified sequence
atgcagaccttccttaagggcaagcgcgtaggctattggctcagcgagaaaaagatcaagaagttgaattttcaggcattcgcagaactgtgtagaaagcggggaatggaggtagtccagctgaacctgtcccggcctatcgaggagcaaggcccacttgatgtaattattcataagctgaccgatgtcattctggaggcggaccagaatgacagccaatcccttgagctggtccaccgattccaggaatatatagacgcccacccagaaaccatcgttttggaccctctgccggctattcgtacactgttagatagatcaaaatcttatgaactgatcagaaagattgaggcgtatatggaggacgatcgcatatgtagtcctccgttcatggagctcaccagtctctgtggcgacgacacgatgaggctcctggaaaagaatggcctgacatttccctttatctgtaagactcgggtggcccacggcacaaatagccacgagatggcaatcgtatttaatcaggaaggcctgaatgccattcagcctccatgcgtagttcaaaacttcataaatcataatgccgttttatataaggtcttcgtcgtgggagaaagctatactgtcgtccaacggccttccctaaaaaacttttcagcaggaacatctgatcgtgaaagcattttctttaacagccacaacgtgtcaaagcctgagagctcttccgtgctgactgaactggataagatcgagggcgtgtttgaaaggccttccgacgaggtgatacgagaactgtcccgcgctctacggcaagctctgggggtgagcttgtttggcattgatattattataaacaatcagacaggacagcatgccgtgattgatattaacgccttcccgggatatgaaggggtaagtgagttcttcacagacctgctcaatcacatcgcaaccgttctgcaaggccagagtacagctatggcggctaccggtgatgtagctctgctgagacactccaaacttctggcagaaccagctggcggattggtgggcgagcgcacctgctctgcttcaccaggttgctgcggatccatgatgggtcaggacgccccatggaaggccgaagccgatgccggagggaccgccaagctgcctcaccagaggctcggctgtaacgccggagtgtctccatccttccaacagcattgtgtcgcatccttggctactaaggctagttcacagtag

SEQ ID NO: 54206 - DNA, 1074 bp, Artificial Sequence
  derived and/or modified sequence
atgcaaacattccttaaggggaaacgcgtagggtactggctcagcgaaaaaaaaattaagaagctcaactttcaggcgttcgccgagctgtgcagaaagcgcggtatggaagtggtacagttgaatctgtctcgacctattgaggaacaaggcccattggatgtcattattcacaagctcaccgacgtgatactcgaagctgaccagaacgatagccagtctttggagctggttcaccgtttccaggaatacatcgacgcccaccccgaaaccatagtcctggaccccctgccagccattcggactctgttagacaggtctaagagttacgagctcatccgaaagattgaagcctatatggaggatgacaggatctgttcccctcccttcatggaactgacttctctgtgtggcgacgatacgatgagactgcttgaaaaaaacgggctcacattcccttttatttgcaaaactcgtgttgcccatgggaccaattcacatgaaatggccatcgtcttcaaccaagagggcctgaacgcaatacagccaccttgcgtggtgcagaacttcattaatcacaatgccgtgctctataaggtcttcgtcgtaggtgagtcatacaccgtggtgcagcggccttccctgaagaatttcagcgcaggtaccagtgatagagaatccatatttttcaattcacacaacgtgagtaagcccgaatcaagcagcgtgcttactgagctggacaagatcgaaggggtgttcgagcggccaagcgatgaagtcatccgagagctttctagagcccttcgccaagccctgggagtaagcctgtttgggatcgatattatcataaataaccaaactggacagcatgccgtgatcgatattaacgcctttccaggctacgaaggcgtgagcgaattcttcaccgatctgctcaatcatatagcaacagttcttcagggacaatctactgctatggcagctccatcgggcgagttccgcgctggcgacctttgctgtgacctaggcaaatcatttcaggtattcgggcctccacctccctgcttgtag

SEQ ID NO: 54207 - DNA, 1335 bp, Artificial Sequence
  derived and/or modified sequence
ttcagagtccctgccgcaggtcgccgttgtcccttggcccgaggggctcgtcggcctccggactcagcatgcggaaggtttcctcctgaccccggaagccccccagaggaagaagatgcagatctgtctgagagagaggaatcctggcttctcgcagaacgggaagaaaaccaggaggcggagtttccagggcttaggagggctgtgcagctgaatctgagccggcctattgaagagcaagggccactggatgtaataattcacaagctgacagacgtaatattggaggccgatcagaatgattcacagagcttggaactggtccacagatttcaagagtatatcgacgctcaccctgagactatcgtgttggacccgctgcctgcgattagaacactcctagacaggagcaagtcctacgagctgattcgaaagattgaagcctatatggaagatgatcgcatttgctccccaccattcatggaactgacttccctctgtggcgacgacactatgagattgctggagaaaaacgggctgacgttcccgttcatttgtaagacacgcgtcgcacacggcacaaattcccacgaaatggcaatcgtgtttaatcaggagggactgaacgccatccagccaccatgcgtggtccagaattttatcaaccataacgccgtgttgtacaaagtgtttgttgtgggagagagctatacagttgtccaacggcctagcctaaaaaacttctccgccggtacatctgatcgcgaaagcatctttttcaacagccataacgtctctaaacccgagtctagtagcgtgttgactgagctggacaagatcgagggagtcttcgaacgcccttccgatgaggtcatccgggagctcagcagggcactgcgacaggctttaggcgtctctctgtttgggatcgatatcattattaataaccagactggacagcacgccgtcatcgacatcaatgccttcccgggatatgagggagtgtcagaatttttcacggacctcctgaaccatatagccaccgtgctgcagggtcagtccaccgccatggccgcaacaggggacgtcgctttgcttagacattccaaactcctggccgagcctgctgggggtctcgtgggtgagaggacttgctcagctagcccaggctgctgcggctcgatgatgggacaggatgcaccctggaaggcggaggcggatgccggaggtacagcgaagctgccccaccagcggctcggatgcaacgccggagtctcccccagtttccagcagcactgtgtcgcctctcttgccacaaaggctagttcccagtag

SEQ ID NO: 54208 - DNA, 1245 bp, Artificial Sequence
  derived and/or modified sequence
atgcagacattcctgaagggaaaacgcgtgggatactggctgtctgaaaagaagatcaaaaaattgaatttccaggcgttcgccgaactgtgccggaaaagaggaatggaggtggtgcagttgaatctatccagaccaattgaggagcagggacccctcgacgtgattatccacaagctcaccgacgttattctcgaagccgaccagaacgatagccagtccctagaactggtccatcgcttccaagagtatattgatgcacatcctgaaaccatagtactggacccgctcccagcaatccggacattgttggacaggtcaaaaagttacgaactaattcgtaagattgaggcctacatggaggacgatcggatttgtagtcccccattcatggaacttacttcactctgcggcgatgatactatgcgattgctggagaagaacggcttgactttcccattcatatgcaagacacgcgtcgctcacgggaccaatagccatgaaatggccatcgtattcaatcaagagggcctgaacgccatccagccgccttgtgttgtacagaactttatcaaccataatgcagtgctgtacaaggtatttgtcgtgggcgaaagctacaccgtggtgcaaagaccaagcctgaagaacttctcagccggaaccagcgatcgcgaatcaatcttctttaactcgcacaatgtcagcaagcctgagagcagctccgtcctgacagaactagataagattgaaggtgtgtttgagagaccaagtgatgaggtgattagggaattgagcagagcccttcgccaggccttaggagtgtccctgttcgggattgacattatcatcaacaaccagaccggtcaacacgcagtgatcgacataaacgcctttccaggctacgaaggagtcagcgagtttttcactgatctgctcaatcacattgctaccgtactgcagggccagagtactgctatggctgctacaggcgatgtagctcttctgcggcattctaaactgctggctgaacccgcagggggactcgtgggtgaacgaacatgcagtgcgtcacccggttgttgtggtagcatgatgggtcaagatgccccttggaaggccgaggccgatgcaggcggaacagccaaattgccccaccagagactcggatgcaacgcaggtgtttctccctcattccaacagcattgtgtcgcctcactcgctaccaaagcatcgtcccaatag

SEQ ID NO: 54209 - DNA, 3069 bp, Artificial Sequence
  derived and/or modified sequence
gcgggcaggggcggcgagtgcgcgggcgctcgccgccgcccttctcggcgggcagcgcgcgaggaccaggccgaggaggaagtggcggcggcggcggcgggctccccgcccgaggaggaagatgcagacctttctgaaagggaagagagttggctactggctgagcgagaagaaaatcaagaagctgaatttccaggccttcgccgagctgtgcaggaagcgagggatggaggttgtgcagctgaaccttagccggccgatcgaggagcagggccccctggacgtcatcatccacaagctgactgacgtcatccttgaagccgaccagaatgatagccagtccctggagctggtgcacaggttccaggagtacatcgatgcccaccctgagaccatcgtcctggacccgctccctgccatcagaaccctgcttgaccgctccaagtcctatgagctcatccggaagattgaggcctacatggaagacgacaggatctgctcgccacccttcatggagctcacgagcctgtgcggggatgacaccatgcggctgctggagaagaacggcttgactttcccattcatttgcaaaaccagagtggctcatggcaccaactctcacgagatggctatcgtgttcaaccaggagggcctgaacgccatccagccaccctgcgtggtccagaatttcatcaaccacaacgccgtcctgtacaaggtgttcgtggttggcgagtcctacaccgtggtccagaggccctcactcaagaacttctccgcaggcacatcagaccgtgagtccatcttcttcaacagccacaacgtgtcaaagccggagtcgtcatcggtcctgacggagctggacaagatcgagggcgtgttcgagcggccgagcgacgaggtcatccgggagctctcccgggccctgcggcaggcactgggcgtgtcactcttcggcatcgacatcatcatcaacaaccagacagggcagcacgccgtcattgacatcaatgccttcccaggctacgagggcgtgagcgagttcttcacagacctcctgaaccacatcgccactgtcctgcagggccagagcacagccatggcagccacaggggacgtggccctgctgaggcacagcaagcttctggccgagccggcgggcggcctggtgggcgagcggacatgcagcgccagccccggctgctgcggcagcatgatgggccaggacgcgccctggaaggctgaggccgacgcgggcggcaccgccaagctgccgcaccagagactcggctgcaacgccggcgtgtcgcccagcttccagcagcattgtgtggcctccctggccaccaaggcctcctcccagtagccacggagccgggacccagaggggcagcgcagggcgcagagcacacccgctgggccagcagctcccaacggcgatgctactactaagaatccccagtgatctgattcttctgttttttaatttttaacctgattctctgatgtcatgatctaaatgaggggtagtgggggatggaagagagtaccaggtggtccaccgttggggagtggggccgtccgcctgctctctactgtgcagacctcctaactgagtttacacacgcttgtgtttgcaacactaggtctggatgggaggtgaggggtgtgcgtatggctgccatgccagtgtctgtgcacatccctgtctgttggtctccatggccactgtggaccgggacccttgggggaagcctgcccatgtcgggctgtgggaggctgatcggtgcatgtgagagtggcttcccttctgcctgactccccactccctgacctgccccttccttgtttttcctcctactggtctccaccaaggctttgttagcccccaccctgcctggtgtgcagctaacccctccctccccacagccagaggaggccacagacccctcaggggagttccgcgctggggtctgggctgtgctccctcactaaagggaaggaaaggaagctgggcgtcctctgggccccccaacacacgtcccatttagccctgcacagcggtctccttcccctaagccagcactgctgctccctggagcccgggaaggaggctgcctggctggaggcccgagccgatggcgcctgtgctgaggatttgtgctgtgatttgggcaaatcattccaggtctttgggcctccacccccttgtctctagtggacatttgagatcagagagcaccacagggctggctttgtgccctaacccctgggatgcagcctgcctttccataaagtcacctaggtgaggataggcgcgggagcctcggcatgacaccatggagatcggggccctcttcccagtgggttcactccttttcacacctgctgggtccctcctcacccagcaggcctggtccacctctcattgcaagccccaagcactgagccagcaggtgccagggagccacccgccccccatcgcttctgcacacctcagactcaccccatcaccttggcagcaaagcactggctctgccgtctgacccctgatccaggcagccccctctgcagagaaaagggttggggagaagcctctgcagtcctggaagatgtggggtgctgggtgagaggcatcagcccccacaagtatgtttttgtgtcttaagatagcagtttactttgaaaaagtgaaaaaggcttccgggctgtcctctgcccagtgagatggaggacgctagagaaagtgctgagtgtcccgagagaggcccccgagccagtgcatggaggtccttcggcctggctcagctgggctgcaggatgcccactttgaggagggaggcacagggcttgggcgaggggcagaggccatcagaactgcccggcttttttggaaactgaggacccaacaactaaccacgtttacacgacttgagttttgaaccccgattaatgtctgtacgtcacctttcctagttctgaccctgagccctggggaacaggaaagcgtggctggcctcttgcactgctttgtctccaaaataaactactgaaatcaaaccgcatttc

SEQ ID NO: 54210 - DNA, 3118 bp, Artificial Sequence
  derived and/or modified sequence
ggccgaggaggaagtggcggcggcggcggcgggactgcgcgccccagctccgatccccgttccgcgtccccgccgccgggaggaggtgcccactcgctcgcggcgcgcgccggccgccagactcggcctgtgggcgatttcctccggacccaggctccccgcccgaggaggaagatgcagacctttctgaaagggaagagagttggctactggctgagcgagaagaaaatcaagaagctgaatttccaggccttcgccgagctgtgcaggaagcgagggatggaggttgtgcagctgaaccttagccggccgatcgaggagcagggccccctggacgtcatcatccacaagctgactgacgtcatccttgaagccgaccagaatgatagccagtccctggagctggtgcacaggttccaggagtacatcgatgcccaccctgagaccatcgtcctggacccgctccctgccatcagaaccctgcttgaccgctccaagtcctatgagctcatccggaagattgaggcctacatggaagacgacaggatctgctcgccacccttcatggagctcacgagcctgtgcggggatgacaccatgcggctgctggagaagaacggcttgactttcccattcatttgcaaaaccagagtggctcatggcaccaactctcacgagatggctatcgtgttcaaccaggagggcctgaacgccatccagccaccctgcgtggtccagaatttcatcaaccacaacgccgtcctgtacaaggtgttcgtggttggcgagtcctacaccgtggtccagaggccctcactcaagaacttctccgcaggcacatcagaccgtgagtccatcttcttcaacagccacaacgtgtcaaagccggagtcgtcatcggtcctgacggagctggacaagatcgagggcgtgttcgagcggccgagcgacgaggtcatccgggagctctcccgggccctgcggcaggcactgggcgtgtcactcttcggcatcgacatcatcatcaacaaccagacagggcagcacgccgtcattgacatcaatgccttcccaggctacgagggcgtgagcgagttcttcacagacctcctgaaccacatcgccactgtcctgcagggccagagcacagccatggcagccacaggggacgtggccctgctgaggcacagcaagcttctggccgagccggcgggcggcctggtgggcgagcggacatgcagcgccagccccggctgctgcggcagcatgatgggccaggacgcgccctggaaggctgaggccgacgcgggcggcaccgccaagctgccgcaccagagactcggctgcaacgccggcgtgtcgcccagcttccagcagcattgtgtggcctccctggccaccaaggcctcctcccagtagccacggagccgggacccagaggggcagcgcagggcgcagagcacacccgctgggccagcagctcccaacggcgatgctactactaagaatccccagtgatctgattcttctgttttttaatttttaacctgattctctgatgtcatgatctaaatgaggggtagtgggggatggaagagagtaccaggtggtccaccgttggggagtggggccgtccgcctgctctctactgtgcagacctcctaactgagtttacacacgcttgtgtttgcaacactaggtctggatgggaggtgaggggtgtgcgtatggctgccatgccagtgtctgtgcacatccctgtctgttggtctccatggccactgtggaccgggacccttgggggaagcctgcccatgtcgggctgtgggaggctgatcggtgcatgtgagagtggcttcccttctgcctgactccccactccctgacctgccccttccttgtttttcctcctactggtctccaccaaggctttgttagcccccaccctgcctggtgtgcagctaacccctccctccccacagccagaggaggccacagacccctcaggggagttccgcgctggggtctgggctgtgctccctcactaaagggaaggaaaggaagctgggcgtcctctgggccccccaacacacgtcccatttagccctgcacagcggtctccttcccctaagccagcactgctgctccctggagcccgggaaggaggctgcctggctggaggcccgagccgatggcgcctgtgctgaggatttgtgctgtgatttgggcaaatcattccaggtctttgggcctccacccccttgtctctagtggacatttgagatcagagagcaccacagggctggctttgtgccctaacccctgggatgcagcctgcctttccataaagtcacctaggtgaggataggcgcgggagcctcggcatgacaccatggagatcggggccctcttcccagtgggttcactccttttcacacctgctgggtccctcctcacccagcaggcctggtccacctctcattgcaagccccaagcactgagccagcaggtgccagggagccacccgccccccatcgcttctgcacacctcagactcaccccatcaccttggcagcaaagcactggctctgccgtctgacccctgatccaggcagccccctctgcagagaaaagggttggggagaagcctctgcagtcctggaagatgtggggtgctgggtgagaggcatcagcccccacaagtatgtttttgtgtcttaagatagcagtttactttgaaaaagtgaaaaaggcttccgggctgtcctctgcccagtgagatggaggacgctagagaaagtgctgagtgtcccgagagaggcccccgagccagtgcatggaggtccttcggcctggctcagctgggctgcaggatgcccactttgaggagggaggcacagggcttgggcgaggggcagaggccatcagaactgcccggcttttttggaaactgaggacccaacaactaaccacgtttacacgacttgagttttgaaccccgattaatgtctgtacgtcacctttcctagttctgaccctgagccctggggaacaggaaagcgtggctggcctcttgcactgctttgtctccaaaataaactactgaaatcaaaccgca

SEQ ID NO: 54211 - DNA, 1363 bp, Artificial Sequence
  derived and/or modified sequence
cgccgccgcgggctcaagcggggcggccgggccagcgcggggcggcggcgggcaggggcggcgagtgcgcgggcgctcgccgccgcccttctcggcgggcagcgcgcgaggaccaggccgaggaggaagtggcggcggcggcggcgggactgcgcgccccagctccgatccccgttccgcgtccccgccgccgggaggaggtgcccactcgctcgcggcgcgcgccggccgccagactcggcctgtgggcgatttcctccggacccaggctccccgcccgaggaggaagatgcagacctttctgaaagggaagagagttggctactggctgagcgagaagaaaatcaagaagctgaatttccaggccttcgccgagctgtgcaggaagcgagggatggaggttgtgcagctgaaccttagccggccgatcgaggagcagggccccctggacgtcatcatccacaagctgactgacgtcatccttgaagccgaccagaatgatagccagtccctggagctggtgcacaggttccaggagtacatcgatgcccaccctgagaccatcgtcctggacccgctccctgccatcagaaccctgcttgaccgctccaagtcctatgagctcatccggaagattgaggcctacatggaagacgacaggatctgctcgccacccttcatggagctcacgagcctgtgcggggatgacaccatgcggctgctggagaagaacggcttgactttcccattcatttgcaaaaccagagtggctcatggcaccaactctcacgagatggctatcgtgttcaaccaggagggcctgaacgccatccagccaccctgcgtggtccagaatttcatcaaccacaacgccgtcctgtacaaggtgttcgtggttggcgagtcctacaccgtggtccagaggccctcactcaagaacttctccgcaggcacatcagaccgtgagtccatcttcttcaacagccacaacgtgtcaaagccggagtcgtcatcggtcctgacggagctggacaagatcgagggcgtgttcgagcggccgagcgacgaggtcatccgggagctctcccgggccctgcggcaggcactgggcgtgtcactcttcggcatcgacatcatcatcaacaaccagacagggcagcacgccgtcattgacatcaatgccttcccaggctacgagggcgtgagcgagttcttcacagacctcctgaaccacatcgccactgtcctgcagggccagagcacagccatggcagccccctcaggggagttccgcgctggggatttgtgctgtgatttgggcaaatcattccaggtctttgggcctccacccccttgtctctag

SEQ ID NO: 54212 - DNA, 1245 bp, Artificial Sequence
  derived and/or modified sequence
atgcagaccttcctgaagggcaagagagtgggctactggctgagcgagaagaagatcaagaagctgaacttccaggccttcgccgagctgtgcagaaagagaggcatggaggtggtgcagctgaacctgagcagacccatcgaggagcagggccccctggacgtgatcatccacaagctgaccgacgtgatcctggaggccgaccagaacgacagccagagcctggagctggtgcacagattccaggagtacatcgacgcccaccccgagaccatcgtgctggaccccctgcccgccatcagaaccctgctggacagaagcaagagctacgagctgatcagaaagatcgaggcctacatggaggacgacagaatctgcagcccccccttcatggagctgaccagcctgtgcggcgacgacaccatgagactgctggagaagaacggcctgaccttccccttcatctgcaagaccagagtggcccacggcaccaacagccacgagatggccatcgtgttcaaccaggagggcctgaacgccatccagcccccctgcgtggtgcagaacttcatcaaccacaacgccgtgctgtacaaggtgttcgtggtgggcgagagctacaccgtggtgcagagacccagcctgaagaacttcagcgccggcaccagcgacagagagagcatcttcttcaacagccacaacgtgagcaagcccgagagcagcagcgtgctgaccgagctggacaagatcgagggcgtgttcgagagacccagcgacgaggtgatcagagagctgagcagagccctgagacaggccctgggcgtgagcctgttcggcatcgacatcatcatcaacaaccagaccggccagcacgccgtgatcgacatcaacgccttccccggctacgagggcgtgagcgagttcttcaccgacctgctgaaccacatcgccaccgtgctgcagggccagagcaccgccatggccgccaccggcgacgtggccctgctgagacacagcaagctgctggccgagcccgccggcggcctggtgggcgagagaacctgcagcgccagccccggctgctgcggcagcatgatgggccaggacgccccctggaaggccgaggccgacgccggcggcaccgccaagctgccccaccagagactgggctgcaacgccggcgtgagccccagcttccagcagcactgcgtggccagcctggccaccaaggccagcagccagtag

SEQ ID NO: 54213 - DNA, 1074 bp, Artificial Sequence
  derived and/or modified sequence
atgcagaccttcctgaagggcaagagagtgggctactggctgagcgagaagaagatcaagaagctgaacttccaggccttcgccgagctgtgcagaaagagaggcatggaggtggtgcagctgaacctgagcagacccatcgaggagcagggccccctggacgtgatcatccacaagctgaccgacgtgatcctggaggccgaccagaacgacagccagagcctggagctggtgcacagattccaggagtacatcgacgcccaccccgagaccatcgtgctggaccccctgcccgccatcagaaccctgctggacagaagcaagagctacgagctgatcagaaagatcgaggcctacatggaggacgacagaatctgcagcccccccttcatggagctgaccagcctgtgcggcgacgacaccatgagactgctggagaagaacggcctgaccttccccttcatctgcaagaccagagtggcccacggcaccaacagccacgagatggccatcgtgttcaaccaggagggcctgaacgccatccagcccccctgcgtggtgcagaacttcatcaaccacaacgccgtgctgtacaaggtgttcgtggtgggcgagagctacaccgtggtgcagagacccagcctgaagaacttcagcgccggcaccagcgacagagagagcatcttcttcaacagccacaacgtgagcaagcccgagagcagcagcgtgctgaccgagctggacaagatcgagggcgtgttcgagagacccagcgacgaggtgatcagagagctgagcagagccctgagacaggccctgggcgtgagcctgttcggcatcgacatcatcatcaacaaccagaccggccagcacgccgtgatcgacatcaacgccttccccggctacgagggcgtgagcgagttcttcaccgacctgctgaaccacatcgccaccgtgctgcagggccagagcaccgccatggccgcccccagcggcgagttcagagccggcgacctgtgctgcgacctgggcaagagcttccaggtgttcggccccccccccccctgcctgtag

SEQ ID NO: 54214 - protein, 314 aa, Artificial Sequence
  derived and/or modified sequence
MQTFLKGKRVGYWLSEKKIKKLNFQAFAELCRKRGMEVVQLNLSRPIEEQGPLDVIIHKLTDVILEADQNDSQSLELVHRFQEYIDAHPETIVLDPLPAIRTLLDRSKSYELIRKIEAYMEDDRICSPPFMELTSLCGDDTMRLLEKNGLTFPFICKTRVAHGTNSHEMAIVFNQEGLNAIQPPCVVQNFINHNAVLYKVFVVGESYTVVQRPSLKNFSAGTSDRESIFFNSHNVSKPESSSVLTELDKIEGVFERPSDEVIRELSRALRQALGVSLFGIDIIINNQTGQHAVIDINAFPGDCQVCFIEGWKTD

SEQ ID NO: 54215 - DNA, 945 bp, Artificial Sequence
  derived and/or modified sequence
atgcagaccttcctgaagggcaagagagtgggctactggctgagcgagaagaagatcaagaagctgaacttccaggccttcgccgagctgtgcagaaagagaggcatggaggtggtgcagctgaacctgagcagacccatcgaggagcagggccccctggacgtgatcatccacaagctgaccgacgtgatcctggaggccgaccagaacgacagccagagcctggagctggtgcacagattccaggagtacatcgacgcccaccccgagaccatcgtgctggaccccctgcccgccatcagaaccctgctggacagaagcaagagctacgagctgatcagaaagatcgaggcctacatggaggacgacagaatctgcagcccccccttcatggagctgaccagcctgtgcggcgacgacaccatgagactgctggagaagaacggcctgaccttccccttcatctgcaagaccagagtggcccacggcaccaacagccacgagatggccatcgtgttcaaccaggagggcctgaacgccatccagcccccctgcgtggtgcagaacttcatcaaccacaacgccgtgctgtacaaggtgttcgtggtgggcgagagctacaccgtggtgcagagacccagcctgaagaacttcagcgccggcaccagcgacagagagagcatcttcttcaacagccacaacgtgagcaagcccgagagcagcagcgtgctgaccgagctggacaagatcgagggcgtgttcgagagacccagcgacgaggtgatcagagagctgagcagagccctgagacaggccctgggcgtgagcctgttcggcatcgacatcatcatcaacaaccagaccggccagcacgccgtgatcgacatcaacgccttccccggcgactgccaggtgtgcttcatcgagggctggaagaccgactag

SEQ ID NO: 54216 - DNA, 2803 bp, Artificial Sequence
  derived and/or modified sequence
cgccgccgcgggctcaagcggggcggccgggccagcgcggggcggcggcgggcaggggcggcgagtgcgcgggcgctcgccgccgcccttctcggcgggcagcgcgcgaggaccaggccgaggaggaagtggcggcggcggcggcgggactgcgcgccccagctccgatccccgttccgcgtccccgccgccgggaggaggtgcccactcgctcgcggcgcgcgccggccgccagactcggcctgtgggcgatttcctccggacccaggctccccgcccgaggaggaagatgcagacctttctgaaagggaagagagttggctactggctgagcgagaagaaaatcaagaagctgaatttccaggccttcgccgagctgtgcaggaagcgagggatggaggttgtgcagctgaaccttagccggccgatcgaggagcagggccccctggacgtcatcatccacaagctgactgacgtcatccttgaagccgaccagaatgatagccagtccctggagctggtgcacaggttccaggagtacatcgatgcccaccctgagaccatcgtcctggacccgctccctgccatcagaaccctgcttgaccgctccaagtcctatgagctcatccggaagattgaggcctacatggaagacgacaggatctgctcgccacccttcatggagctcacgagcctgtgcggggatgacaccatgcggctgctggagaagaacggcttgactttcccattcatttgcaaaaccagagtggctcatggcaccaactctcacgagatggctatcgtgttcaaccaggagggcctgaacgccatccagccaccctgcgtggtccagaatttcatcaaccacaacgccgtcctgtacaaggtgttcgtggttggcgagtcctacaccgtggtccagaggccctcactcaagaacttctccgcaggcacatcagaccgtgagtccatcttcttcaacagccacaacgtgtcaaagccggagtcgtcatcggtcctgacggagctggacaagatcgagggcgtgttcgagcggccgagcgacgaggtcatccgggagctctcccgggccctgcggcaggcactgggcgtgtcactcttcggcatcgacatcatcatcaacaaccagacagggcagcacgccgtcattgacatcaatgccttcccaggggactgccaagtgtgctttatagaaggctggaagaccgactgaagtaggaagctgtcacatgtttgagccaactgagcaaagcagctgttgcctgccagacagccaccccaagaccaagggagccagcctgtcgtttgtccttctagcctggaagaccagttcttggctcttgggcactcacattggccactggccacaactgctgaatggcttcactaatgtccctggggtctgtatctgccctctcttctattccctagaaactctggccgggcatggcggctcacgcctgtcatcccagcacttagggaggctgaggcaggtggatcacaaggtcaagagatcgacaccatcctggccaacatggtgaaaccccatctctactaaaaatacaaaaattagctggacatggtggtgggcgcctgtagtcccagctacttgggaggctgaggcaggagaattgcttgaactcgggaggcgtaggttgcagtgagccaagatcgcaccactgcactccagcctggcaacagagcaagactcctcaaaaaacaaacaaacaaacaaacaaactctgatcattcacccggtgggatccccggcagctccttctccttcccgagctgtggctcatgggccattggattcagagaccttgagctgggtgctggctgccctaaaggagcacgacccctccagcctggtgaccgggaggcagagaagtgcagctgtccttgacaaaggcccagcctctgctgcctcaggccagcctggccacaccccgatgccacagtcatctgccccgcccaggcataagcctgactcaggtgatacaggcgaggcttctcccatgggtcctccccttgtgagaaagggtctgtgctgtgtaccttctctctgcacagccattgtcagtgtggtttggagtgagtgagcctcccgcactgctcaggggagagctggtgagcatgactccatggcctcctgctggttggggtcttcttctgattctcacccgcaggagcacccagacccccccttttcagaaatgattacattttcccttcaagagtcatctgtgacctggtggtgtggagggactgtcccctcctgcagcctggccgacccccttcctccagggctgtgtggaatcacctctcagaagctcactctgaaaagccactcacagggatttcaccaggatgttgctgttcctgccgacacctgggctttgtgacaaatgctgtttgcttcaagctgttcacaagcaacttcaccagaatcccaagctggttcgtacttaatttgtgtacatacatatgcataatatacatgaccatgtatgagatacagacaccatggcttctgtccattggctcattcgcctggtcgcatgttcactccatgaggttaggacactgcgggtggctttgggatgggtggtttcagggacaaggtgtcgctatgatctctgtatttgctaactagtcttgttttgatttctaacggtctagtggagtacagttaatgttgtgtttatttctgtaactgtaggggtggagtataaacctaacttttggaaacatgaagaaataaacaatagcgccagccgtt

SEQ ID NO: 54217 - DNA, 507 bp, Artificial Sequence
  derived and/or modified sequence
atgcagaccttcctgaagggcaagagagtgggctactggctgagcgagaagaagatcaagaagctgaacttccaggccttcgccgagctgtgcagaaagagaggcatggaggtggtgcagctgaacctgagcagacccatcgaggagcagggccccctggacgtgatcatccacaagctgaccgacgtgatcctggaggccgaccagaacgacagccagagcctggagctggtgcacagattccaggagtacatcgacgcccaccccgagaccatcgtgctggaccccctgcccgccatcagaaccctgctggacagaagcaagagctacgagctgatcagaaagatcgaggcctacatggaggacgacagaatctgcagcccccccttcatggagctgaccagcctgtgcggcgacgacaccatgagactgctggagaagaacggcctgaccttccccttcatctgcaagaccagagtggcccacggcaccaacagccacgagtag

SEQ ID NO: 54218 - DNA, 945 bp, Artificial Sequence
  derived and/or modified sequence
atgcaaacatttctcaaaggcaaacgggtcggatactggctgtccgagaaaaagattaagaaactcaattttcaggccttcgcagagctatgtcgtaaacgcggtatggaggtcgtgcaactgaatctgagtagaccaatcgaggaacagggcccattggacgtcattatccacaagctgaccgatgtgatcctggaggccgatcaaaacgatagtcagtcccttgaactggttcatcggtttcaggagtatatagacgcacaccctgaaactatcgttctggaccccctgcccgccattcgcactctgctggaccgctcaaagtcgtacgagctaattcgtaaaatagaggcctatatggaagacgatcgcatctgtagtccgccttttatggaactgacttccttatgcggagacgatactatgcgactcctggagaaaaatgggctcacttttcccttcatttgtaagactagagtggcccatggcactaactctcatgaaatggctatcgtctttaaccaggagggcctgaatgctatccaaccaccatgtgtggtacagaattttatcaaccacaatgccgtgctttacaaagtgtttgtagttggcgaatcctatacggttgttcagcgcccctcgcttaaaaacttcagcgccggaacctccgacagagaaagcatcttttttaacagtcacaacgtctctaagcctgagtcctccagtgtccttactgagctggacaaaattgagggggtgttcgaaaggcccagtgacgaagttattcgcgagctctctcgggcactccgccaggccctgggagtatcgctctttggtatcgacattatcatcaacaaccaaacggggcagcacgccgtgattgacatcaacgccttccctggtgactgtcaggtgtgctttattgaagggtggaaaactgattag

SEQ ID NO: 54219 - DNA, 507 bp, Artificial Sequence
  derived and/or modified sequence
atgcagactttcctaaaagggaaaagggtcgggtattggctgagcgagaagaaaattaaaaaactaaatttccaggctttcgccgagttatgcagaaagagaggaatggaggtcgtgcagttgaacctcagccgcccaatcgaggaacaggggccactcgatgtgattatacataagctaacggatgtgatcctcgaagcagaccagaatgattcccagtctcttgaattagtgcataggttccaggagtacattgacgctcacccagaaactattgtactggacccgctccccgccattcggacactgctagataggtccaaaagctatgaactcattagaaagattgaggcgtatatggaggatgaccgcatttgttcaccaccattcatggaactgacatccctgtgtggtgatgacaccatgagactgctcgagaaaaacggcttgacctttccttttatctgtaagacccgagtggcacatgggaccaatagtcatgaatag

SEQ ID NO: 54220 - DNA, 507 bp, Artificial Sequence
  derived and/or modified sequence
atgcagacctttcttaagggtaaacgtgtgggctattggctgagcgagaagaaaatcaaaaagctgaacttccaggctttcgcggaattgtgtaggaaacgaggaatggaagtagtacagctgaatctgtcccggcccatcgaggagcagggaccactggacgtaattattcataaacttaccgatgtaattttagaagccgatcagaatgactctcagtcactcgaactcgtacacaggttccaggagtatatcgatgcccacccagagaccatcgtacttgacccgttgccggcgatcagaactctgcttgacaggtcaaagagctacgagctgatacgcaaaatcgaggcgtatatggaggatgatagaatctgctctccacccttcatggagctcacctcgctatgcggtgatgatactatgagacttctagagaaaaacggacttaccttcccattcatatgcaaaactagggtggcccacggtaccaactcccacgagtag

SEQ ID NO: 54221 - DNA, 945 bp, Artificial Sequence
  derived and/or modified sequence
atgcagaccttcctgaagggcaagagggtgggctactggctgtctgagaagaagatcaagaagctgaacttccaggcctttgctgagctgtgcaggaagaggggcatggaggtggtgcagctgaacctgagccggcccatcgaggagcagggccccctggatgtgatcatccacaagctgacagatgtgatcctggaggccgaccagaatgacagccagagcctggagctggtgcaccgcttccaggagtacattgatgcccaccctgagaccatcgtgctggaccccctgcctgccatccgcaccctgctggacaggagcaagagctatgagctgatcaggaagattgaggcctacatggaggatgaccgcatctgcagcccccccttcatggagctgaccagcctgtgtggagatgacaccatgaggctgctggagaagaatggcctgaccttccccttcatctgcaagaccagggtggcccacggcaccaacagccatgagatggccatcgtgttcaaccaggagggcctgaatgccatccagcccccctgtgtggtgcagaacttcatcaaccacaatgctgtgctgtacaaggtgtttgtggtgggggagagctacacagtggtgcagaggcccagcctgaagaacttctctgctggcaccagtgaccgggagagcatcttcttcaacagccacaacgtgtccaagccagagagcagctctgtgctgacagagctggacaagattgagggcgtgtttgagcggcccagtgatgaagtcatccgggagctgagccgggccctgcggcaggccctgggcgtgtccctgtttggcatcgacatcatcatcaacaaccagacaggccagcacgccgtcatcgacatcaatgccttccctggggactgccaggtgtgcttcatcgagggctggaagacagactag

SEQ ID NO: 54222 - DNA, 507 bp, Artificial Sequence
  derived and/or modified sequence
atgcagaccttcctgaagggcaagagggtgggctactggctgtctgagaagaagatcaagaagctgaacttccaggcctttgctgagctgtgcaggaagaggggcatggaggtggtgcagctgaacctgagccggcccatcgaggagcagggccccctggatgtgatcatccacaagctgacagatgtgatcctggaggccgaccagaatgacagccagagcctggagctggtgcaccgcttccaggagtacattgatgcccaccctgagaccatcgtgctggaccccctgcctgccatccgcaccctgctggacaggagcaagagctatgagctgatcaggaagattgaggcctacatggaggatgaccgcatctgcagcccccccttcatggagctgaccagcctgtgtggagatgacaccatgaggctgctggagaagaatggcctgaccttccccttcatctgcaagaccagggtggcccacggcaccaacagccatgaatag

SEQ ID NO: 54223 - DNA, 945 bp, Artificial Sequence
  derived and/or modified sequence
atgcagaccttcctgaagggcaagcgggtgggctactggctgagcgaaaaaaagattaagaagctcaacttccaagcgtttgccgaactctgccgaaaacggggtatggaagtagttcagcttaacctaagtaggccgattgaggagcagggccccctggatgtgattatacataaattgacggacgtgattctagaggccgatcaaaatgacagtcagagcctggaactggttcaccgcttccaggagtatattgatgcccaccccgagacgattgtgttggacccgcttcccgcgatacgcacactgcttgacagaagcaaaagctacgaattaatcaggaagattgaggcgtatatggaggacgacagaatttgcagtcccccttttatggaacttacttcgctctgtggtgatgatacgatgagactcctggagaagaacggcctgacttttccctttatttgcaagacacgcgttgcccacggtaccaatagccacgagatggccatcgtattcaaccaggaggggcttaatgctatacaacccccatgtgtggtccagaattttataaaccataatgctgtgctctacaaggtcttcgtggtcggggaatcgtacacagtggtgcagcgcccttccctcaagaacttcagcgcaggaactagcgatcgcgagtcaatcttttttaattcacataatgtttctaaacccgaatctagctcagttctcaccgagcttgacaagattgaaggcgtgttcgagagacccagcgatgaggtgatccgcgaactctctcgtgccctaagacaggctctgggagttagccttttcggcattgatataattattaataaccagacaggacaacatgctgtcattgacattaatgctttcccaggggactgccaagtgtgttttattgaggggtggaagaccgactag

SEQ ID NO: 54224 - DNA, 507 bp, Artificial Sequence
  derived and/or modified sequence
atgcagaccttcctgaagggcaagcgggtgggctactggctgagcgaaaaaaagatcaagaagctgaacttccaggctttcgcggaattgtgtaggaagcgtggcatggaagttgtccagctgaatctcagcaggccaatcgaagaacaggggcccttggacgttatcatccacaagctgaccgacgtgatactggaagctgaccaaaacgatagccagagcctcgagttggtccacaggtttcaagaatacattgacgcccaccccgagacaatcgtcctcgatcccttgccggccatccgcactttgcttgaccgctcaaagtcctacgagttgattcggaaaatagaagcgtacatggaagacgatcgaatctgctccccaccttttatggagctgacctctttatgcggcgatgacaccatgcgcctcttggaaaagaacggtttaacattcccatttatatgcaagacaagggtcgcacacggcacaaattcccacgagtag

SEQ ID NO: 54225 - DNA, 507 bp, Artificial Sequence
  derived and/or modified sequence
atgcagaccttcctgaagggcaagcgggtgggctactggctgagcgagaagaagatcaagaagcttaatttccaggccttcgcagaactgtgcagaaaacgtggcatggaagtggtacagcttaatctcagtcggcccatcgaggagcagggacccctcgacgttattatccacaaactgactgacgtcatccttgaggcagaccagaatgattcccagtcacttgagctggttcatcgctttcaggaatatattgatgcacacccagaaactatagtgttggatcctctccctgctatcaggaccctgctggaccggtccaagtcctacgagctgattaggaaaattgaagcctatatggaggatgataggatctgtagtccaccctttatggagcttacatccctgtgtggcgatgatacgatgcgcctgctggagaagaatgggcttaccttccccttcatttgtaaaacccgggtggctcatggtaccaactctcacgagtag

SEQ ID NO: 54226 - DNA, 945 bp, Artificial Sequence
  derived and/or modified sequence
atgcagacctttctaaaaggaaagagagtgggctactggctcagtgaaaaaaaaatcaagaaactgaacttccaggcctttgccgagctctgccggaaacgcggaatggaggtggttcagctaaacctgtctcgtccaattgaggaacagggccctcttgatgtcattatccataagctgacagacgtgattttggaggctgaccagaacgactcccagagtctggaattggtacatcggttccaagaatacattgatgcccaccctgaaaccattgttttggaccccctccccgctatccgcaccctcctcgatcgtagcaaatcatacgagcttatacgtaaaattgaggcttatatggaagacgatcgaatttgttcccccccatttatggagctgacatccctatgtggggatgacaccatgagactgttggagaagaacggcctgacttttccattcatttgtaaaacgcgggtggcacatggaactaacagccatgaaatggcaatagtgtttaatcaggagggactgaacgctatccagcctccatgtgtcgttcaaaattttatcaaccataatgctgttctctataaagtgttcgttgttggagagtcttataccgtggtccagcgcccatctttaaaaaatttttctgctggcacaagtgatcgtgagtccattttctttaatagtcacaacgtcagcaaaccagaaagctcatcagtacttaccgagctggacaaaatagaaggggtctttgagagaccctctgacgaggttattagggagctcagtcgggctttgagacaggctttaggtgtgtccctattcggtatcgatattattattaataaccagacaggccagcatgctgttatcgatatcaacgctttccctggggattgccaagtctgtttcatcgagggctggaagacagattag

SEQ ID NO: 54227 - DNA, 507 bp, Artificial Sequence
  derived and/or modified sequence
atgcagacatttctcaaaggaaagagagtcggctactggcttagtgagaagaagattaaaaaactcaactttcaggcattcgccgagctgtgtcggaaacgagggatggaggtcgtccaactaaacctttcaagacctatagaggagcaaggcccacttgacgttatcatccacaagctgacagatgtgatcttggaggcagaccaaaatgacagccagtccctggagctagtgcaccggtttcaggaatatatcgatgcccatccagagactattgtgttggacccactgcccgcaatccgtacactactagacaggtccaaatcgtatgagctcattcgaaaaatcgaggcctatatggaagatgaccggatatgttcaccccctttcatggaactcacctccctgtgtggcgatgatacaatgagacttttggagaaaaacgggctgacctttccctttatctgcaaaacccgggtggcccacggcacaaattcccatgagtag

SEQ ID NO: 54228 - DNA, 507 bp, Artificial Sequence
  derived and/or modified sequence
atgcagactttcttgaaaggcaagcgcgtcggctattggctgagcgaaaagaagatcaaaaagctgaatttccaggccttcgccgagctgtgtagaaagcgcggaatggaggtggtgcagttaaacctcagccgtcctatagaggaacaaggaccattggatgtgataattcataaacttacagacgtgatcctcgaggccgaccaaaacgactctcagtccttggaactggtacataggttccaggagtacattgatgcgcacccagagaccattgttttagaccctctgcctgccattcgtactctgctcgatcgaagtaagagctatgagctaatccgcaaaatcgaagcatacatggaagatgataggatctgcagccctcccttcatggagcttacctccctatgcggggacgatacaatgcggctcctggagaaaaatggcctcacatttccgttcatatgcaagacccgcgtggcgcatggaactaatagccatgaatag

SEQ ID NO: 54229 - DNA, 609 bp, Artificial Sequence
  derived and/or modified sequence
gggcagcgcgcgaggaccaggccgaggaggaagtggcggcggcggcggcggactcggcctgtgggcgatttcctccggacccaggctccccgcccgaggaggaagatgcagacctttctgaaagggaagagagttggctactggctgagcgagaagaaaatcaagaagctgaatttccaggccttcgccgagctgtgcaggaagcgagggatggaggttgtgcagctgaaccttagccggccgatcgaggagcagggccccctggacgtcatcatccacaagctgactgacgtcatccttgaagccgaccagaatgatagccagtccctggagctggtgcacaggttccaggagtacatcgatgcccaccctgagaccatcgtcctggacccgctccctgccatcagaaccctgcttgaccgctccaagtcctatgagctcatccggaagattgaggcctacatggaagacgacaggatctgctcgccacccttcatggagctcacgagcctgtgcggggatgacaccatgcggctgctggagaagaacggcttgactttcccattcatttgcaaaaccagagtggctcatggcaccaactctcacgag

SEQ ID NO: 54230 - DNA, 770 bp, Artificial Sequence
  derived and/or modified sequence
ctacgcctaggagggcccctgggtgttcacccacccccccggggggccccatcctgggccagggtccgcttcctcgagggaaggggcgaattcctggaaggtctccttccgggcgcagttgcaatggattgccttgggggtgctgaaccctgctgggggtacagagacgtttccgaaactcagcggctcggtcgcccccaaaggccaggcggaacacacgcccacaccgcggctcccttcccgaagctccccgcccgaggaggaagatgcagacctttctgaaagggaagagagttggctactggctgagcgagaagaaaatcaagaagctgaatttccaggccttcgccgagctgtgcaggaagcgagggatggaggttgtgcagctgaaccttagccggccgatcgaggagcagggccccctggacgtcatcatccacaagctgactgacgtcatccttgaagccgaccagaatgatagccagtccctggagctggtgcacaggttccaggagtacatcgatgcccaccctgagaccatcgtcctggacccgctccctgccatcagaaccctgcttgaccgctccaagtcctatgagctcatccggaagattgaggcctacatggaagacgacaggatctgctcgccacccttcatggagctcacgagcctgtgcggggatgacaccatgcggctgctggagaagaacggcttgactttcccattcatttgcaaaaccagagtggctcatggcaccaactctcacgag

SEQ ID NO: 54231 - protein, 534 aa, Artificial Sequence
  derived and/or modified sequence
MIWYILIIGILLPQSLAHPGFFTSIGQMTDLIHTEKDLVTSLKDYIKAEEDKLEQIKKWAEKLDRLTSTATKDPEGFVGHPVNAFKLMKRLNTEWSELENLVLKDMSDGFISNLTIQRQYFPNDEDQVGAAKALLRLQDTYNLDTDTISKGNLPGVKHKSFLTAEDCFELGKVAYTEADYYHTELWMEQALRQLDEGEISTIDKVSVLDYLSYAVYQQGDLDKALLLTKKLLELDPEHQRANGNLKYFEYIMAKEKDVNKSASDDQSDQKTTPKKKGVAVDYLPERQKYEMLCRGEGIKMTPRRQKKLFCRYHDGNRNPKFILAPAKQEDEWDKPRIIRFHDIISDAEIEIVKDLAKPRLRRATISNPITGDLETVHYRISKSAWLSGYENPVVSRINMRIQDLTGLDVSTAEELQVANYGVGGQYEPHFDFARKDEPDAFKELGTGNRIATWLFYMSDVSAGGATVFPEVGASVWPKKGTAVFWYNLFASGEGDYSTRHAACPVLVGNKWVSNKWLHERGQEFRRPCTLSELE

SEQ ID NO: 54232 - DNA, 1605 bp, Artificial Sequence
  derived and/or modified sequence
atgatttggtacatcctcattatcgggattcttcttccacaatctctggcccatccaggctttttcacttcaatagggcagatgactgatcttattcataccgaaaaggatctggtgacatcactgaaggactatataaaggctgaagaagacaaactagagcaaattaaaaagtgggccgagaagctcgataggctcacctccactgctactaaagaccctgagggttttgttgggcacccggtgaatgcttttaaattgatgaagcggcttaacacagaatggagcgagcttgaaaatcttgtgttaaaagacatgtctgacggattcattagcaatctgactatccagcgacaatactttccgaatgacgaggatcaggtcggcgccgctaaggccttactgcggttacaggacacttacaacttagacacagacactatttccaagggcaacctgcctggggtgaagcacaagagcttcttaactgcagaggactgctttgaactcgggaaagtggcttataccgaggcagactactatcatactgagctgtggatggagcaggcgttgcggcaactagacgagggggaaatcagtacgattgacaaggtgtctgtgctggactatctgtcctacgccgtgtatcaacagggcgacttagacaaagcactcttgctaaccaagaagctgcttgaactcgatcctgagcaccaacgcgctaacggtaacctgaagtatttcgaatatatcatggctaaggagaaagatgtaaataagtcggctagcgatgatcagagtgaccaaaagactaccccaaagaagaagggcgtggctgtcgactaccttcccgagcgacagaaatatgaaatgctgtgccgcggagagggaatcaaaatgacccccaggcggcagaaaaaattattctgtagataccacgatggcaaccgcaatcccaagtttatcctggcgccagctaagcaggaagacgaatgggataaaccccgcatcattcggttccacgatattatcagtgacgcggaaatagagattgtcaaggatctggcaaagccccgtttgcgccgtgctacgatctctaacccgatcactggtgacttggagactgtccactaccgcataagcaagagcgcatggctatcagggtatgagaatcccgtcgtgtcaagaatcaacatgcgcattcaagacctcactgggttggacgtgtctaccgccgaagagctgcaagtcgccaattatggggtggggggacagtatgagccgcacttcgattttgctcgcaaggacgaacccgacgcttttaaagagcttggcacggggaatcgaatcgccacatggttgttctacatgtccgacgtgagcgcaggcggcgcaactgtgttcccagaagtcggagctagcgtttggcccaaaaagggaactgcagtgttctggtataatttgttcgcaagcggcgaaggggattactcaactaggcacgcagcctgccctgtattagtgggcaacaaatgggtgagcaacaaatggctgcatgagaggggccaagagttccgacgaccctgcacacttagtgaactggaatag

SEQ ID NO: 54233 - DNA, 1605 bp, Artificial Sequence
  derived and/or modified sequence
atgatctggtacattttgatcattgggatcctgctaccccagtctctggctcacccaggcttcttcacatccatcggacagatgactgatttaatccacaccgaaaaggatttggtgacctctctgaaggattacattaaagccgaggaagataaactcgagcagatcaagaagtgggccgagaagctggacaggctgacctccaccgctactaaagaccccgaaggatttgtgggccaccccgtcaacgcctttaagctaatgaagcggctgaatacagagtggtccgaacttgagaatttggtactgaaggacatgtccgacggattcatatcaaacttaacaattcagcggcagtacttcccgaacgacgaagatcaggtgggcgccgccaaagctttgctcagactgcaggacacatacaatctggacaccgataccatcagtaaaggtaatctgccaggagtgaagcacaaatccttcctgacagccgaggactgttttgagctagggaaagtcgcgtatactgaagctgactactatcatacagaactttggatggagcaggcgttaagacaattagatgagggcgagatcagcacaatagataaggtgtctgtcctggattatctgtcctatgccgtataccagcagggagatctcgacaaggctcttttgctgacaaagaagctgcttgaactcgaccccgagcaccagcgagccaacggtaatctgaagtactttgagtatattatggccaaagaaaaggacgtaaacaaatctgccagtgacgaccagagcgaccagaaaacgactcccaaaaagaagggcgtcgccgtcgactatctgcccgaaaggcagaagtacgagatgctctgtcgtggggagggcatcaagatgactccacgccgccagaaaaagctgttctgtagatatcacgacggcaataggaatcctaaattcatattggccccagctaaacaagaagacgagtgggataagccaagaattatccggtttcatgatatcatcagcgatgcagaaattgaaattgtaaaggatctggctaagccccgattgcggcgcgcaacgatatcaaacccaatcactggtgatcttgagactgtgcactaccgcatttcaaagtccgcctggttaagcggctacgagaatcccgttgtgagccggatcaatatgcgtattcaagacctgaccggcctggatgtgtcaacagctgaggagctgcaggtagcgaattatggtgttggagggcaatacgaaccccacttcgatttcgctaggaaggatgaacccgacgctttcaaagagctgggcaccggtaaccgtatcgccacctggctgttctacatgagcgatgttagcgctggcggcgccactgtgttccccgaggttggcgcttctgtttggcctaaaaaaggtacggccgtcttttggtataatctttttgcctctggcgaaggggactactctacccgccatgccgcttgccccgtgctggtcgggaacaaatgggtgtcaaataaatggttacacgagcgagggcaagaattcagacgcccctgtacgctatctgaactcgagtag

SEQ ID NO: 54234 - DNA, 1605 bp, Artificial Sequence
  derived and/or modified sequence
atgatatggtacatccttatcataggaattttactgccacaatctcttgcacatccaggcttttttacaagcattgggcagatgaccgacctgattcacactgagaaggacttggttacgtcactgaaagactatatcaaggcagaagaagataagctcgagcagataaaaaagtgggctgaaaagctggatcggctgacgtccaccgccaccaaagatcctgaagggtttgttggacacccagtaaacgctttcaaactgatgaagagattgaatacagagtggagtgaactggaaaatctcgtgctcaaggatatgagtgatggctttataagtaatctgaccatccaaagacaatactttcccaacgatgaggatcaagtgggtgctgcaaaggcactgctgcgtctgcaagatacctacaatctggacactgatactatctccaaagggaacctacccggggtaaagcacaagagctttctaactgcagaggattgctttgagctgggaaaggtagcatacaccgaggcggactactaccataccgaactttggatggaacaggccctgagacaactggatgagggcgaaatttccacgattgataaagtgtcagttctggactatttgtcctacgcggtgtaccagcagggagatctggacaaagcactgctcttaacgaagaaactcctcgaactggaccctgagcatcagagggctaatggcaatctcaagtatttcgaatacatcatggccaaggagaaggatgtgaataagagcgctagcgacgaccaaagtgatcagaagaccacccccaagaagaaaggagtcgctgtagattacctccctgagcggcagaaatacgaaatgctttgccggggagagggcattaagatgacaccacgccggcagaaaaagcttttttgtaggtaccacgatggcaataggaatcctaaattcatcctggcacctgctaaacaggaggacgaatgggacaaaccccggattatccgattccatgatatcatctccgatgctgagatcgaaatagtgaaggaccttgccaagccccggttgcgccgggccacaattagcaatcccatcacaggggacctagaaactgtgcattatagaatttcaaaatctgcttggttaagtggttatgaaaaccctgtggtctcgagaatcaatatgaggattcaggacctcaccgggctcgacgtgtctaccgcagaggagcttcaagtcgccaactacggcgttgggggacagtacgaaccacattttgattttgcgagaaaggatgaacccgacgccttcaaagagctcgggaccgggaatcgaattgctacgtggcttttttacatgtcagacgtcagcgctggcggcgccactgtgtttccagaggtgggtgccagtgtctggcctaagaagggcaccgctgtcttttggtataatctgttcgcttctggcgagggtgactacagcacaaggcacgctgcttgcccagtgttagttggtaataaatgggtctccaacaagtggcttcacgagagaggccaagagttccgcaggccttgcaccctgagtgaactggagtag

SEQ ID NO: 54235 - DNA, 1605 bp, Artificial Sequence
  derived and/or modified sequence
atgatctggtacatcctgatcatcggcatcctgctgccccagagcctggcccaccctggcttcttcaccagcatcggccagatgacagacctgatccacacagagaaggacctggtgaccagcctgaaggactacatcaaggccgaggaggacaagctggagcagatcaagaagtgggccgagaagctggaccggctgaccagcacagccaccaaggaccctgagggctttgtgggccaccctgtgaatgccttcaagctgatgaagaggctgaacacagagtggagcgagctggagaacctggtgctgaaggacatgtctgatggcttcatcagcaacctgaccatccagaggcagtacttccccaatgatgaggaccaggtgggcgccgccaaggccctgctgcggctgcaggacacctacaacctggacacagacaccatcagcaagggcaacctgcccggggtgaagcacaagagcttcctgacagctgaggactgctttgagctgggcaaggtggcctacacagaggccgactactaccacacagagctgtggatggagcaggccctgcggcagctggatgaaggagagatcagcaccatcgacaaggtgtctgtgctggactacctgtcctatgctgtgtaccagcagggcgacctggacaaggccctgctgctgaccaagaagctgctggagctggaccctgagcaccagagggccaacggcaacctgaagtactttgagtacatcatggccaaggagaaggatgtgaacaagagcgccagtgatgaccagagcgaccagaagaccacccccaagaagaagggcgtggccgtggactacctgcctgagcggcagaagtatgagatgctgtgccgcggggagggcatcaagatgaccccccggcggcagaagaagctgttctgccgctaccatgatggcaacagaaaccccaagttcatcctggccccagccaagcaggaggatgagtgggacaagccccgcatcatccgcttccatgacatcatcagtgatgctgagattgaaattgtgaaggacctggccaagccccggctgcggcgggccaccatcagcaaccccatcaccggggacctggagaccgtgcactaccgcatcagcaagagcgcctggctgagcggctatgagaaccctgtggtgagccgcatcaacatgaggatccaggacctgaccggcctggatgtgtccacagctgaggagctgcaggtggccaactacggcgtgggcggccagtatgagccccactttgattttgccaggaaggatgagccagatgccttcaaggagctgggcaccggcaaccgcatcgccacctggctgttctacatgtctgatgtgtctgctgggggcgccaccgtcttccctgaggtgggcgcctctgtgtggcccaagaagggcacagctgtgttctggtacaacctgtttgccagcggggagggggactacagcaccaggcatgctgcctgccctgtgctggtgggcaacaagtgggtgagcaacaagtggctgcacgagcggggccaggagttcagaagaccctgcaccctgtctgagctggagtag

SEQ ID NO: 54236 - DNA, 1605 bp, Artificial Sequence
  derived and/or modified sequence
atgatctggtacatcctgatcatcggcatcctgctgccccagagcctggctcatcccggcttttttaccagtattgggcagatgaccgatctcatccatacggagaaggacctggtgacttccctcaaagattacattaaggccgaggaggataagctggaacagattaagaagtgggcggagaagcttgaccgtctcacatcgacagccaccaaggaccccgaggggttcgtgggtcaccccgtgaacgcattcaagctgatgaagagactgaacacagagtggtcagagctcgaaaatttggtgctgaaagacatgtcagacgggtttattagtaacttgacaatccaaagacaatattttcccaatgacgaagaccaagtgggcgccgcgaaggccctgctgcgcctgcaggacacatataaccttgacaccgacaccataagtaagggaaatctccccggtgtgaaacataagagcttcctaaccgctgaggattgcttcgaacttgggaaggtggcatacacagaagctgactactatcacacagaactctggatggaacaggctcttcgccagctggacgaaggcgaaatctcaacaatcgataaggtgagtgtgctcgattacctatcttacgcagtgtaccagcaaggagatctggataaagccctccttctgaccaaaaagttgcttgagctggaccccgaacatcagcgggcaaacggcaatctcaaatactttgagtatatcatggctaaggagaaagacgttaacaaatccgcctccgatgaccagtccgatcagaaaacaactccgaagaagaagggagtggcggtagattatctccctgagagacagaagtatgaaatgctttgccggggagagggaattaaaatgacgcccagacggcagaaaaagcttttctgtcgttatcacgacggcaacaggaatccaaagttcatcctcgcacctgccaaacaggaagacgagtgggacaagccccgaatcatccggttccatgacatcattagtgacgccgagatcgaaattgtcaaggatttggccaagcctcggctgcgccgcgctacaatttcaaaccccatcactggagacctcgagaccgtgcactaccggatttcaaagagcgcatggctttccggctacgagaacccggtggttagtcgcattaacatgagaatccaggacttgacaggcctagatgtaagtacagccgaagagctccaggtggccaactacggggtgggcgggcagtatgaaccacactttgactttgcccgcaaagatgagcctgatgcctttaaagaactcggtactggaaatcgaattgcaacttggcttttctacatgtccgacgtgtcagcaggtggggcaactgtgtttccagaagttggggccagtgtttggccgaaaaaagggacagccgttttttggtacaacttattcgctagcggagaaggcgactatagtaccagacatgcagcctgcccagtgctggttggaaataagtgggtcagcaacaaatggctacacgaaaggggtcaggagtttaggcgcccatgtaccctttcagaactggagtag

SEQ ID NO: 54237 - DNA, 1605 bp, Artificial Sequence
  derived and/or modified sequence
atgatctggtacatcctgatcatcggcatcctgctgccccagagcctggctcacccaggtttctttactagcattggacaaatgacagacctcattcatactgaaaaggatctggtcactagtctcaaagactacataaaagccgaggaagataaattggagcagataaaaaaatgggctgagaaactcgaccgtctgacaagcacggcaaccaaagatcccgaaggctttgtcgggcaccctgttaacgcctttaaactgatgaagaggctaaacaccgaatggtctgagctagaaaatctggtcctaaaagatatgtcagacggtttcatctctaatcttacaatccagcgccaatattttccaaacgacgaggatcaagtgggagcggcaaaggccctgttaagactacaggacacatataacctagatacggacaccattagcaagggcaatctcccaggggtaaagcacaagagctttttgacagctgaggactgctttgagctcgggaaagtggcctatactgaggccgactactaccacaccgaactgtggatggagcaggccctccgccagctcgacgaaggcgaaattagcactatcgataaggtgtccgtgctggactatctttcctacgctgtgtatcagcagggggatctcgataaggctttgctactgacaaagaaactccttgagctggacccagagcaccaaagggcgaacggaaacttaaagtattttgagtatatcatggccaaggaaaaagatgtgaacaaatccgctagtgatgatcaatctgaccagaagactacccctaaaaaaaaaggggtcgccgtagactatctcccggagcggcagaagtatgaaatgctctgtcgtggagagggaataaaaatgacgcccagaaggcagaagaagctgttctgcagatatcatgacggcaacagaaaccccaaattcattcttgcccctgcaaaacaggaggacgaatgggataagcctcgtatcatacgctttcatgacatcatttctgacgccgaaattgaaatcgtaaaggatctggccaaacccaggctgcgccgggctacgatctctaaccccatcaccggggacctggaaaccgtgcattacagaatctctaagagtgcatggctgtcaggctatgaaaatccggtagtgtctcgtataaatatgcggattcaagatctcaccggactcgatgtgtctaccgccgaggagctgcaggttgcaaattacggtgtcggaggccaatacgagcctcatttcgacttcgccaggaaggatgagccagacgcgttcaaagagcttggcaccggtaatagaattgcaacttggctgttctatatgtccgatgtgtccgcaggcggagctacagtgtttcctgaagtgggagcctcagtatggcctaagaaagggactgctgtcttttggtacaacttgtttgcatctggggaaggcgactactcaacacggcacgccgcgtgccctgttctggtaggcaataagtgggtctcaaataaatggctccacgagcgcgggcaggagttcaggcggccatgtacactgagcgagttggagtag

SEQ ID NO: 54238 - DNA, 1605 bp, Artificial Sequence
  derived and/or modified sequence
atgatctggtacatcctgatcatcggcatcctgctgccccagagcctggcccaccctggattttttacctccattggacaaatgaccgacctcatccacacagagaaggacctggtaacgagtctgaaagattacatcaaagcagaggaggataagcttgaacagattaaaaagtgggcagagaagctggatcggctgacttccacagctacaaaagatcctgagggttttgtagggcaccctgtgaatgcttttaaactgatgaaacgtttaaacaccgagtggtccgagcttgaaaatctcgttttgaaggatatgagtgatggtttcatttctaatttaactatccaacggcagtattttccgaacgacgaagatcaggtcggcgccgccaaggccctgctgagactccaggacacatataacctcgataccgacactattagcaaaggcaatctgcccggcgtgaagcacaaatcatttctgactgccgaagactgctttgagctcgggaaagtggcctacacagaggcagattattatcacacagaactgtggatggagcaagcactgcggcagttagatgaaggtgaaatctcgactatagacaaggtctctgtcttggattacctgagttatgcagtttaccagcagggtgacctcgacaaggccctcctgctgactaaaaagctactggaactggaccccgagcatcagagggctaatggtaatctgaagtacttcgagtatattatggctaaggagaaagacgtgaataagtcagcctcagacgaccagtccgaccaaaagactaccccaaaaaaaaagggggtagcggtggattacctgccagagaggcaaaaatacgagatgctttgcagaggagaaggaatcaagatgaccccacgccgtcagaagaaacttttctgtcggtaccacgacggcaatagaaacccaaaattcattcttgcccctgcaaagcaagaggacgagtgggacaagcctaggattattcggttccacgacattatatccgatgctgagattgaaatagtgaaagacctggccaagccccgtctccgccgggcaaccatcagtaatcccattacaggcgatctagaaactgtccattatagaatatctaagtcagcctggctgtctggctacgagaatcctgtggtttctagaattaatatgaggattcaggatctgaccggactggacgtttccaccgccgaggagcttcaggtagcaaattacggcgtaggtggacagtatgagccacatttcgactttgccagaaaagatgagcccgatgccttcaaagagctgggcacaggaaatagaattgctacttggctgttctacatgagcgacgtcagtgctgggggcgctactgtgttccccgaggtaggtgcttccgtgtggccaaagaaagggaccgccgtcttctggtacaatctgtttgcatctggagagggtgattactctacgaggcatgcggcatgccccgtcctcgtcggaaataagtgggtgtccaataagtggctccacgaaagaggacaagaatttcgcaggccctgcacccttagcgagttggaatag

SEQ ID NO: 54239 - DNA, 1605 bp, Artificial Sequence
  derived and/or modified sequence
atgatctggtatatactgattataggcattttgctgccacagtcactcgctcacccaggcttcttcacctccatcggccagatgacagatcttattcataccgagaaggatcttgtaacatccttaaaagattacattaaagcggaagaggacaaactggagcaaattaaaaaatgggctgagaaattagatcggttaacttctacagcaacgaaagacccagagggcttcgtgggacaccccgtcaatgctttcaagttaatgaagcgactgaacactgagtggtctgagcttgagaatctggtcttaaaggatatgagtgatggcttcatctccaacctcaccatacaacgacagtattttcctaacgacgaagaccaggtgggggctgccaaagccctgctaagacttcaggatacctataaccttgacacggacactatctctaaaggcaacttaccaggtgtgaaacataaatccttcctcactgccgaggactgctttgaattaggaaaagtggcctataccgaggcggattattatcacaccgagttgtggatggagcaggctctgagacaactggacgaaggcgagatctctacaattgacaaggtgtctgtgttggattatttgtcatatgccgtgtatcaacagggcgacctagacaaggctctgctgcttaccaaaaagcttctggaacttgaccctgagcatcagagggcgaatggaaatctcaagtatttcgagtacatcatggccaaagagaaggatgtgaataagtctgcatctgatgatcagtctgatcagaagacgactcccaagaaaaagggcgtcgccgtcgactacctcccagaacgccagaaatatgaaatgctttgcagaggagagggaattaaaatgacgcctcggaggcaaaaaaagctcttttgccgataccacgatggcaacagaaatcccaagttcatcctggcccctgccaagcaggaggatgaatgggataagccaagaatcatacgctttcacgatattatcagcgacgccgagatcgaaatcgtgaaggacttggccaagccccgtctccgcagggccacaattagtaaccctatcaccggcgacctagagactgtgcactatagaatttccaaatccgcctggttatcaggctacgagaatccagttgtttcccgaatcaatatgcgaattcaggatctaactggtctggacgtgagcactgccgaagaattgcaagttgcaaattacggggtggggggacagtacgaaccacatttcgactttgcccgaaaagacgaacctgacgccttcaaagagctgggcaccggaaaccgaatagctacttggctgttctatatgtcagatgtgtccgcagggggagcaacagtctttcctgaagtcggcgctagtgtgtggccaaagaagggcacagctgttttttggtacaacctgtttgcatctggagagggtgattattctacacggcacgccgcttgtccagtgctcgtgggcaacaagtgggtaagtaacaaatggctccacgaaagaggccaggagtttcgcaggccttgcacgctgtcagagcttgagtag

SEQ ID NO: 54240 - DNA, 1605 bp, Artificial Sequence
  derived and/or modified sequence
atgatttggtatattttgattattggcattctactgccccagtccctggcgcacccaggatttttcaccagcatcggacagatgactgatctcattcatacagaaaaggacctggtcacctccctgaaggactatattaaagcagaggaggacaagttagagcagatcaagaagtgggccgagaagttggaccgtctgactagtacagctacaaaagaccccgaaggctttgtgggacaccctgtgaacgctttcaaactcatgaaaaggctgaacaccgaatggagtgagctggagaacctggtcttaaaagatatgtctgacggatttataagtaacctcacaatccagcgccaatacttccctaacgacgaagatcaggtgggtgccgctaaagcgctattgcggcttcaggacacctacaatctcgacaccgacaccatctcaaaagggaacctgccaggcgtgaagcataagtcctttctcaccgccgaggactgcttcgagctgggtaaggtggcctatacagaagccgattactaccataccgaactctggatggagcaagctctgaggcagctggacgagggagagatttctactatcgataaggtgagcgtgctggactatctgagctatgcggtctaccagcagggagatctggacaaagccctcctgctgaccaagaaacttctcgaactcgacccagaacaccagcgggctaacggcaatctgaaatatttcgaatacataatggcgaaggaaaaggacgttaataagtctgcaagcgacgaccagtccgaccaaaagacgacccccaagaagaagggggtggccgttgactatctgcccgagcgacagaagtatgagatgttatgcaggggcgaggggatcaaaatgacccccagaagacaaaagaaattgttctgtaggtaccatgatggcaataggaaccccaaatttattctcgctcccgctaagcaagaagacgagtgggacaaaccacggattattcgtttccatgacattattagtgatgcggagattgagatcgtgaaagacctcgccaagccaagacttaggcgagccacgatttccaatccgattactggggatttggaaaccgtgcattataggatttctaagagtgcttggctgagtggttacgagaatccagtggtgtcgcgcattaacatgcgtatccaggacctgaccggccttgatgttagcacagcagaagaacttcaggtggccaactacggggttggaggccagtacgagcctcattttgactttgcgagaaaagacgaacccgatgcatttaaggagttggggactggaaataggattgcaacttggctgttctatatgagcgatgtgtccgccggtggagccacagtattcccagaagtgggtgcaagtgtatggcctaagaaggggactgcagtgttttggtacaacctcttcgccagtggcgagggcgattacagcaccaggcatgccgcatgccccgtcctggtcggcaacaagtgggtgtcaaacaagtggctgcacgagagggggcaggagttccgaaggccctgcactctctctgaactggaatag

SEQ ID NO: 54241 - DNA, 1605 bp, Artificial Sequence
  derived and/or modified sequence
atgatttggtacatactgattatcggcattcttttaccacaaagcttggctcatcccggattctttactagcattggccaaatgaccgacctcatacatacagagaaagacctcgtgactagcttgaaggactacatcaaggccgaagaggataagctggaacaaattaaaaagtgggccgaaaagctggacaggctcacaagcacagccacaaaggaccctgaggggtttgtgggacatccagtaaacgcctttaaactgatgaagaggctgaacaccgagtggtcagagctcgaaaatttagttcttaaggacatgagtgatggcttcattagcaatctcacaattcagcgccagtactttccgaatgatgaggaccaggtgggggctgctaaggcactgctccgcctgcaggatacctataacctcgataccgataccattagtaaaggcaacctgcccggtgttaagcataagtctttcctcactgccgaggattgtttcgagctcggaaaggtcgcctatacggaggcggattattaccatactgagttgtggatggagcaagccctccggcagctcgacgagggggagatttccactatcgacaaggtgtcagtcctggactacttgagttatgctgtctaccagcaaggcgacctggacaaggctctgctgttgactaagaagctccttgaactcgatccggagcatcagagagctaacggaaacctgaaatattttgaatacattatggctaaggagaaggacgtcaataaatccgctagtgatgaccagtctgaccagaagaccactcccaaaaaaaaaggggtggctgtggattatctgcctgagagacagaaatacgagatgctctgccgaggggaaggaatcaagatgactccaagaagacagaagaaactgttttgtcgataccatgatggtaacaggaaccccaagtttatcctggccccagctaaacaggaggatgagtgggataaacccaggatcattcggttccacgacatcatctcagacgcagagatcgagatcgtaaaagatcttgctaaacctcgcttacgacgtgccactatctccaatcccataacaggggatttggaaaccgttcattatcggatcagcaagtcagcttggttgagtggatatgagaatcccgtagtgagtaggattaatatgcgcatccaggacttaacagggctcgatgtgtctacagccgaggaactgcaggtggccaactatggagtgggcggacagtacgaaccccatttcgacttcgcaagaaaggatgagcccgacgccttcaaggagctgggaaccggaaaccgcatcgccacatggctcttttatatgagcgacgtgagcgccggaggagccacagttttccccgaagtgggggcatctgtgtggccaaaaaagggtactgctgtattctggtacaaccttttcgcttcaggcgagggagattactctacacggcacgcagcgtgtccagtgctggtagggaataagtgggtgagcaacaagtggttgcacgagcgagggcaagaatttcggagaccttgtacgctttctgagctggaatag

SEQ ID NO: 54242 - DNA, 2727 bp, Artificial Sequence
  derived and/or modified sequence
agcgggctgagggtaggaagtagccgctccgagtggaggcgactgggggctgaagagcgcgccgccctctcgtcccactttccaggtgtgtgatcctgtaaaattaaatcttccaagatgatctggtatatattaattataggaattctgcttccccagtctttggctcatccaggcttttttacttcaattggtcagatgactgatttgatccatactgagaaagatctggtgacttctctgaaagattatattaaggcagaagaggacaagttagaacaaataaaaaaatgggcagagaagttagatcggctaactagtacagcgacaaaagatccagaaggatttgttgggcatccagtaaatgcattcaaattaatgaaacgtctgaatactgagtggagtgagttggagaatctggtccttaaggatatgtcagatggctttatctctaacctaaccattcagagacagtactttcctaatgatgaagatcaggttggggcagccaaagctctgttacgtctccaggatacctacaatttggatacagataccatctcaaagggtaatcttccaggagtgaaacacaaatcttttctaacggctgaggactgctttgagttgggcaaagtggcctatacagaagcagattattaccatacggaactgtggatggaacaagccctaaggcaactggatgaaggcgagatttctaccatagataaagtctctgttctagattatttgagctatgcggtatatcagcagggagacctggataaggcacttttgctcacaaagaagcttcttgaactagatcctgaacatcagagagctaatggtaacttaaaatattttgagtatataatggctaaagaaaaagatgtcaataagtctgcttcagatgaccaatctgatcagaaaactacaccaaagaaaaaaggggttgctgtggattacctgccagagagacagaagtacgaaatgctgtgccgtggggagggtatcaaaatgacccctcggagacagaaaaaactcttttgccgctaccatgatggaaaccgtaatcctaaatttattctggctccagctaaacaggaggatgaatgggacaagcctcgtattattcgcttccatgatattatttctgatgcagaaattgaaatcgtcaaagacctagcaaaaccaaggctgaggcgagccaccatttcaaacccaataacaggagacttggagacggtacattacagaattagcaaaagtgcctggctctctggctatgaaaatcctgtggtgtctcgaattaatatgagaatacaagatctaacaggactagatgtttccacagcagaggaattacaggtagcaaattatggagttggaggacagtatgaaccccattttgactttgcacggaaagatgagccagatgctttcaaagagctggggacaggaaatagaattgctacatggctgttttatatgagtgatgtgtctgcaggaggagccactgtttttcctgaagttggagctagtgtttggcccaaaaaaggaactgctgttttctggtataatctgtttgccagtggagaaggagattatagtacacggcatgcagcctgtccagtgctagttggcaacaaatgggtatccaataaatggctccatgaacgtggacaagaatttcgaagaccttgtacgttgtcagaattggaatgacaaacaggcttccctttttctcctattgttgtactcttatgtgtctgatatacacatttcctagtcttaactttcaggagtttacaattgactaacactccatgattgattcagtcatgaacctcatcccatgtttcatctgtggacaattgcttactttgtgggttcttttaaaagtaacacgaaatcatcatattgcataaaaccttaaagttctgttggtatcacagaagacaaggcagagtttaaagtgaggaattttatatttaaagaactttttggttggataaaaacataatttgagcatccagttttagtatttcactacatctcagttggtgggtgttaagctagaatgggctgtgtgataggaaacaaatgccttacagatgtgcctaggtgttctgtttacctagtgtcttactctgttttctggatctgaagactagtaataaactaggacactaactgggttccatgtgattgccctttcatatgatcttctaagttgatttttttcctcccaagtcttttttaaagaaagtatactgtattttaccaaccccctctcttttcttttagctcctctgtggtgaattaaacgtacttgagttaaaatatttcgattttttttttttttttaatggaaagtcctgcataacaacactgggccttcttaactaaaatgctcaccacttagcctgtttttttatcccttttttaaaatgacagatgattttgttcaggaattttgctgtttttcttagtgctaataccttgcctcttattcctgctacagcagggtggtaatattggcattctgattaaatactgtgccttaggagactggaagtttaaaaatgtacaagtcctttcagtgatgagggaattgattttttttaaaagtctttttcttagaaagccaaaatgtttgtttttttaagattctgaaatgtgttgtgacaacaatgacctatttatgatcttaaatcttttttaaaaaaa

SEQ ID NO: 54243 - DNA, 2844 bp, Artificial Sequence
  derived and/or modified sequence
ggggcgctggtgtgatcgagctcacgtagcgagggctgcagtcgcctcctccctggcgctgccatcgcggcctagaggttataaaagggctaacgggctccctctgctgcccagtcgcgccgccagcgggctgagggtaggaagtagccgctccgagtggaggcgactgggggctgaagagcgcgccgccctctcgtcccactttccaggtgtgtgatcctgtaaaattaaatcttccaagatgatctggtatatattaattataggaattctgcttccccagtctttggctcatccaggcttttttacttcaattggtcagatgactgatttgatccatactgagaaagatctggtgacttctctgaaagattatattaaggcagaagaggacaagttagaacaaataaaaaaatgggcagagaagttagatcggctaactagtacagcgacaaaagatccagaaggatttgttgggcatccagtaaatgcattcaaattaatgaaacgtctgaatactgagtggagtgagttggagaatctggtccttaaggatatgtcagatggctttatctctaacctaaccattcagagacagtactttcctaatgatgaagatcaggttggggcagccaaagctctgttacgtctccaggatacctacaatttggatacagataccatctcaaagggtaatcttccaggagtgaaacacaaatcttttctaacggctgaggactgctttgagttgggcaaagtggcctatacagaagcagattattaccatacggaactgtggatggaacaagccctaaggcaactggatgaaggcgagatttctaccatagataaagtctctgttctagattatttgagctatgcggtatatcagcagggagacctggataaggcacttttgctcacaaagaagcttcttgaactagatcctgaacatcagagagctaatggtaacttaaaatattttgagtatataatggctaaagaaaaagatgtcaataagtctgcttcagatgaccaatctgatcagaaaactacaccaaagaaaaaaggggttgctgtggattacctgccagagagacagaagtacgaaatgctgtgccgtggggagggtatcaaaatgacccctcggagacagaaaaaactcttttgccgctaccatgatggaaaccgtaatcctaaatttattctggctccagctaaacaggaggatgaatgggacaagcctcgtattattcgcttccatgatattatttctgatgcagaaattgaaatcgtcaaagacctagcaaaaccaaggctgaggcgagccaccatttcaaacccaataacaggagacttggagacggtacattacagaattagcaaaagtgcctggctctctggctatgaaaatcctgtggtgtctcgaattaatatgagaatacaagatctaacaggactagatgtttccacagcagaggaattacaggtagcaaattatggagttggaggacagtatgaaccccattttgactttgcacggaaagatgagccagatgctttcaaagagctggggacaggaaatagaattgctacatggctgttttatatgagtgatgtgtctgcaggaggagccactgtttttcctgaagttggagctagtgtttggcccaaaaaaggaactgctgttttctggtataatctgtttgccagtggagaaggagattatagtacacggcatgcagcctgtccagtgctagttggcaacaaatgggtatccaataaatggctccatgaacgtggacaagaatttcgaagaccttgtacgttgtcagaattggaatgacaaacaggcttccctttttctcctattgttgtactcttatgtgtctgatatacacatttcctagtcttaactttcaggagtttacaattgactaacactccatgattgattcagtcatgaacctcatcccatgtttcatctgtggacaattgcttactttgtgggttcttttaaaagtaacacgaaatcatcatattgcataaaaccttaaagttctgttggtatcacagaagacaaggcagagtttaaagtgaggaattttatatttaaagaactttttggttggataaaaacataatttgagcatccagttttagtatttcactacatctcagttggtgggtgttaagctagaatgggctgtgtgataggaaacaaatgccttacagatgtgcctaggtgttctgtttacctagtgtcttactctgttttctggatctgaagactagtaataaactaggacactaactgggttccatgtgattgccctttcatatgatcttctaagttgatttttttcctcccaagtcttttttaaagaaagtatactgtattttaccaaccccctctcttttcttttagctcctctgtggtgaattaaacgtacttgagttaaaatatttcgattttttttttttttttaatggaaagtcctgcataacaacactgggccttcttaactaaaatgctcaccacttagcctgtttttttatcccttttttaaaatgacagatgattttgttcaggaattttgctgtttttcttagtgctaataccttgcctcttattcctgctacagcagggtggtaatattggcattctgattaaatactgtgccttaggagactggaagtttaaaaatgtacaagtcctttcagtgatgagggaattgattttttttaaaagtctttttcttagaaagccaaaatgtttgtttttttaagattctgaaatgtgttgtgacaacaatgacctatttatgatcttaaatctttttt

SEQ ID NO: 54244 - DNA, 2937 bp, Artificial Sequence
  derived and/or modified sequence
ggggcgctggtgtgatcgagctcacgtagcgagggctgcagtcgcctcctccctggcgctgccatcgcggcctagaggttataaaagggctaacgggctccctctgctgcccagtcgcgccgccagcgggctgagggtaggaagtagccgctccgagtggaggcgactgggggctgaagagcgcgccgccctctcgtcccactttccagagatgaagtcttgctatgttgcccggcctggtctcaaactcctgagctcaagtgatcctctttccttggcctcccaaagtactgggattacaggtgtgtgatcctgtaaaattaaatcttccaagatgatctggtatatattaattataggaattctgcttccccagtctttggctcatccaggcttttttacttcaattggtcagatgactgatttgatccatactgagaaagatctggtgacttctctgaaagattatattaaggcagaagaggacaagttagaacaaataaaaaaatgggcagagaagttagatcggctaactagtacagcgacaaaagatccagaaggatttgttgggcatccagtaaatgcattcaaattaatgaaacgtctgaatactgagtggagtgagttggagaatctggtccttaaggatatgtcagatggctttatctctaacctaaccattcagagacagtactttcctaatgatgaagatcaggttggggcagccaaagctctgttacgtctccaggatacctacaatttggatacagataccatctcaaagggtaatcttccaggagtgaaacacaaatcttttctaacggctgaggactgctttgagttgggcaaagtggcctatacagaagcagattattaccatacggaactgtggatggaacaagccctaaggcaactggatgaaggcgagatttctaccatagataaagtctctgttctagattatttgagctatgcggtatatcagcagggagacctggataaggcacttttgctcacaaagaagcttcttgaactagatcctgaacatcagagagctaatggtaacttaaaatattttgagtatataatggctaaagaaaaagatgtcaataagtctgcttcagatgaccaatctgatcagaaaactacaccaaagaaaaaaggggttgctgtggattacctgccagagagacagaagtacgaaatgctgtgccgtggggagggtatcaaaatgacccctcggagacagaaaaaactcttttgccgctaccatgatggaaaccgtaatcctaaatttattctggctccagctaaacaggaggatgaatgggacaagcctcgtattattcgcttccatgatattatttctgatgcagaaattgaaatcgtcaaagacctagcaaaaccaaggctgaggcgagccaccatttcaaacccaataacaggagacttggagacggtacattacagaattagcaaaagtgcctggctctctggctatgaaaatcctgtggtgtctcgaattaatatgagaatacaagatctaacaggactagatgtttccacagcagaggaattacaggtagcaaattatggagttggaggacagtatgaaccccattttgactttgcacggaaagatgagccagatgctttcaaagagctggggacaggaaatagaattgctacatggctgttttatatgagtgatgtgtctgcaggaggagccactgtttttcctgaagttggagctagtgtttggcccaaaaaaggaactgctgttttctggtataatctgtttgccagtggagaaggagattatagtacacggcatgcagcctgtccagtgctagttggcaacaaatgggtatccaataaatggctccatgaacgtggacaagaatttcgaagaccttgtacgttgtcagaattggaatgacaaacaggcttccctttttctcctattgttgtactcttatgtgtctgatatacacatttcctagtcttaactttcaggagtttacaattgactaacactccatgattgattcagtcatgaacctcatcccatgtttcatctgtggacaattgcttactttgtgggttcttttaaaagtaacacgaaatcatcatattgcataaaaccttaaagttctgttggtatcacagaagacaaggcagagtttaaagtgaggaattttatatttaaagaactttttggttggataaaaacataatttgagcatccagttttagtatttcactacatctcagttggtgggtgttaagctagaatgggctgtgtgataggaaacaaatgccttacagatgtgcctaggtgttctgtttacctagtgtcttactctgttttctggatctgaagactagtaataaactaggacactaactgggttccatgtgattgccctttcatatgatcttctaagttgatttttttcctcccaagtcttttttaaagaaagtatactgtattttaccaaccccctctcttttcttttagctcctctgtggtgaattaaacgtacttgagttaaaatatttcgattttttttttttttttaatggaaagtcctgcataacaacactgggccttcttaactaaaatgctcaccacttagcctgtttttttatcccttttttaaaatgacagatgattttgttcaggaattttgctgtttttcttagtgctaataccttgcctcttattcctgctacagcagggtggtaatattggcattctgattaaatactgtgccttaggagactggaagtttaaaaatgtacaagtcctttcagtgatgagggaattgattttttttaaaagtctttttcttagaaagccaaaatgtttgtttttttaagattctgaaatgtgttgtgacaacaatgacctatttatgatcttaaatctttttt

SEQ ID NO: 54245 - DNA, 1605 bp, Artificial Sequence
  derived and/or modified sequence
atgatctggtacatcctgatcatcggcatcctgctgccccagagcctggcccaccccggcttcttcaccagcatcggccagatgaccgacctgatccacaccgagaaggacctggtgaccagcctgaaggactacatcaaggccgaggaggacaagctggagcagatcaagaagtgggccgagaagctggacagactgaccagcaccgccaccaaggaccccgagggcttcgtgggccaccccgtgaacgccttcaagctgatgaagagactgaacaccgagtggagcgagctggagaacctggtgctgaaggacatgagcgacggcttcatcagcaacctgaccatccagagacagtacttccccaacgacgaggaccaggtgggcgccgccaaggccctgctgagactgcaggacacctacaacctggacaccgacaccatcagcaagggcaacctgcccggcgtgaagcacaagagcttcctgaccgccgaggactgcttcgagctgggcaaggtggcctacaccgaggccgactactaccacaccgagctgtggatggagcaggccctgagacagctggacgagggcgagatcagcaccatcgacaaggtgagcgtgctggactacctgagctacgccgtgtaccagcagggcgacctggacaaggccctgctgctgaccaagaagctgctggagctggaccccgagcaccagagagccaacggcaacctgaagtacttcgagtacatcatggccaaggagaaggacgtgaacaagagcgccagcgacgaccagagcgaccagaagaccacccccaagaagaagggcgtggccgtggactacctgcccgagagacagaagtacgagatgctgtgcagaggcgagggcatcaagatgacccccagaagacagaagaagctgttctgcagataccacgacggcaacagaaaccccaagttcatcctggcccccgccaagcaggaggacgagtgggacaagcccagaatcatcagattccacgacatcatcagcgacgccgagatcgagatcgtgaaggacctggccaagcccagactgagaagagccaccatcagcaaccccatcaccggcgacctggagaccgtgcactacagaatcagcaagagcgcctggctgagcggctacgagaaccccgtggtgagcagaatcaacatgagaatccaggacctgaccggcctggacgtgagcaccgccgaggagctgcaggtggccaactacggcgtgggcggccagtacgagccccacttcgacttcgccagaaaggacgagcccgacgccttcaaggagctgggcaccggcaacagaatcgccacctggctgttctacatgagcgacgtgagcgccggcggcgccaccgtgttccccgaggtgggcgccagcgtgtggcccaagaagggcaccgccgtgttctggtacaacctgttcgccagcggcgagggcgactacagcaccagacacgccgcctgccccgtgctggtgggcaacaagtgggtgagcaacaagtggctgcacgagagaggccaggagttcagaagaccctgcaccctgagcgagctggagtag

SEQ ID NO: 54246 - protein, 516 aa, Artificial Sequence
  derived and/or modified sequence
MIWYILIIGILLPQSLAHPGFFTSIGQMTDLIHTEKDLVTSLKDYIKAEEDKLEQIKKWAEKLDRLTSTATKDPEGFVGHPVNAFKLMKRLNTEWSELENLVLKDMSDGFISNLTIQRQYFPNDEDQVGAAKALLRLQDTYNLDTDTISKGNLPGVKHKSFLTAEDCFELGKVAYTEADYYHTELWMEQALRQLDEGEISTIDKVSVLDYLSYAVYQQGDLDKALLLTKKLLELDPEHQRANGNLKYFEYIMAKEKDVNKSASDDQSDQKTTPKKKGVAVDYLPERQKYEMLCRGEGIKMTPRRQKKLFCRYHDGNRNPKFILAPAKQEDEWDKPRIIRFHDIISDAEIEIVKDLAKPRLSRATVHDPETGKLTTAQYRVSKSAWLSGYENPVVSRINMRIQDLTGLDVSTAEELQKDEPDAFKELGTGNRIATWLFYMSDVSAGGATVFPEVGASVWPKKGTAVFWYNLFASGEGDYSTRHAACPVLVGNKWVSNKWLHERGQEFRRPCTLSELE

SEQ ID NO: 54247 - DNA, 1551 bp, Artificial Sequence
  derived and/or modified sequence
atgatttggtatatccttatcataggaattctcctaccacagagcctagcccacccaggcttcttcacttccatcggccagatgacagatctcatccatacagaaaaagacctggtgacctccctaaaggactacattaaggccgaggaagacaaactggaacagatcaagaaatgggctgaaaaactcgataggctgacctcgacagcaacaaaagatccagaaggctttgtcggccaccctgtgaacgcctttaagcttatgaagcggctaaataccgaatggtccgagctggagaacctggtgctgaaggatatgtctgacgggttcatttctaatcttactatacagagacagtattttcccaatgacgaggaccaggtgggcgctgccaaagccctactaagactccaggatacgtacaatctagacacagatactataagcaaggggaatcttcctggggtgaaacataagagctttctgaccgccgaggactgttttgaactcggcaaggtagcttacaccgaagccgactattaccacactgagctctggatggagcaggccctgaggcagctcgatgaaggcgagatctccaccattgacaaggtgagcgtgctggattacctaagttatgccgtgtatcagcaaggcgatctagacaaagcactgctgctgaccaagaagctgctggagctggaccctgagcaccagcgtgctaatggcaatcttaaatactttgagtacatcatggcaaaggagaaggatgtgaacaagtcagcgtccgatgaccagagcgaccaaaagaccaccccgaagaaaaagggcgtagccgtggattacctacccgagcggcaaaaatacgagatgctgtgtagaggcgaaggaattaaaatgacaccccggcggcagaaaaaacttttctgccgataccacgacggcaaccgaaaccctaagtttattttggcccccgcaaaacaggaggatgagtgggacaaacctcgcattattcggtttcacgacatcatttctgacgctgaaattgaaattgttaaggacctggccaaaccacgcctttcacgagccaccgttcacgatccagaaaccggcaaacttacgaccgcacagtaccgggttagtaagtccgcatggctgtcggggtacgaaaatcccgttgtctcaagaattaacatgaggatacaagacctcaccgggttggacgtgtccactgccgaggaacttcagaaagatgaacccgacgcattcaaggagcttggaaccgggaacaggatagccacctggctgttctacatgtccgatgtttcagccggaggggccaccgtgttcccagaagtgggtgcttctgtttggccaaagaagggtacggccgtgttctggtataacctattcgcatctggagaaggtgactactccacccggcacgcagcatgtccagtattagtgggtaacaagtgggtgtcgaacaagtggctccacgaaagagggcaggagttcagaagaccatgtactctcagcgaacttgagtag

SEQ ID NO: 54248 - DNA, 1551 bp, Artificial Sequence
  derived and/or modified sequence
atgatctggtacatcctgatcatcggcatcctgctgccccagagcctggcccaccctggcttcttcaccagcatcggccagatgacagacctgatccacacagagaaggacctggtgaccagcctgaaggactacatcaaggccgaggaggacaagctggagcagatcaagaagtgggccgagaagctggaccggctgaccagcacagccaccaaggaccctgagggctttgtgggccaccctgtgaatgccttcaagctgatgaagaggctgaacacagagtggagcgagctggagaacctggtgctgaaggacatgtctgatggcttcatcagcaacctgaccatccagaggcagtacttccccaatgatgaggaccaggtgggcgccgccaaggccctgctgcggctgcaggacacctacaacctggacacagacaccatcagcaagggcaacctgcccggggtgaagcacaagagcttcctgacagctgaggactgctttgagctgggcaaggtggcctacacagaggccgactactaccacacagagctgtggatggagcaggccctgcggcagctggatgaaggagagatcagcaccatcgacaaggtgtctgtgctggactacctgtcctatgctgtgtaccagcagggcgacctggacaaggccctgctgctgaccaagaagctgctggagctggaccctgagcaccagagggccaacggcaacctgaagtactttgagtacatcatggccaaggagaaggatgtgaacaagagcgccagtgatgaccagagcgaccagaagaccacccccaagaagaagggcgtggccgtggactacctgcctgagcggcagaagtatgagatgctgtgccgcggggagggcatcaagatgaccccccggcggcagaagaagctgttctgccgctaccatgatggcaacagaaaccccaagttcatcctggccccagccaagcaggaggatgagtgggacaagccccgcatcatccgcttccatgacatcatcagtgatgctgagattgaaattgtgaaggacctggccaagccccggctgagccgggccaccgtgcatgaccctgagaccgggaagctgaccacagcccagtacagagtgtccaagagcgcctggctgagcggctatgagaaccctgtggtgagccgcatcaacatgaggatccaggacctgaccggcctggatgtgtccacagctgaggagctgcagaaggatgagccagatgccttcaaggagctgggcaccggcaaccgcatcgccacctggctgttctacatgtctgatgtgtctgctgggggcgccaccgtcttccctgaggtgggcgcctctgtgtggcccaagaagggcacagctgtgttctggtacaacctgtttgccagcggggagggggactacagcaccaggcatgctgcctgccctgtgctggtgggcaacaagtgggtgagcaacaagtggctgcacgagcggggccaggagttcagaagaccctgcaccctgtctgagctggagtag

SEQ ID NO: 54249 - DNA, 1551 bp, Artificial Sequence
  derived and/or modified sequence
atgatctggtacatcctgatcatcggcatcctgctgccccagagcctcgctcaccccggatttttcacttccataggccagatgacagaccttatccatacggaaaaggatttagtcacctctttgaaggattacatcaaagccgaggaagacaagctcgaacaaatcaaaaaatgggctgagaaattggaccggctgacatccaccgccaccaaggatcccgaggggtttgtgggccacccggtgaacgccttcaaattaatgaaaagactcaacacggaatggagcgagctcgaaaatcttgttcttaaggacatgtcggatgggttcatcagcaacctgacaatccagagacagtactttcctaacgacgaggatcaagtaggagccgctaaagccctgctgaggctgcaagacacatacaacctcgacacagacaccatctccaaagggaatctccccggggtgaaacataagagtttccttactgcagaagactgcttcgagctcgggaaggtggcctatacggaggccgactactaccatactgaactctggatggaacaggccctgagacagctggacgaaggggagatatcaacaatcgacaaggtgtctgttctcgactatctgagctacgctgtctaccagcaaggagatctggataaggctctgttgttaaccaaaaaactattggagctcgatcccgaacaccagagagccaacggcaatctgaagtactttgaatatatcatggcgaaagagaaagacgtgaataagtctgcctctgatgatcagagcgatcaaaagaccactcccaagaagaaaggcgtggctgtcgactatctgccggaacggcagaaatacgagatgctttgccggggagagggtatcaagatgaccccccggaggcaaaaaaaactcttttgtagataccatgatggcaatagaaatccaaagtttattctcgcccctgctaaacaggaagatgaatgggataaaccccgtatcattagatttcacgatatcatttcggatgcagagatcgagatcgtgaaagacctggctaagccccgcctcagcagggctactgttcacgaccccgagacgggcaagcttaccactgctcagtacagagtttcgaagtccgcctggctatcaggttacgagaatccggtcgtgtctagaatcaatatgcgaatccaagatcttacgggcctggatgtctctactgccgaagaactgcagaaggatgaacccgatgcctttaaggaactggggacagggaataggattgccacttggcttttctatatgtcagacgttagtgccgggggagctaccgtgtttcccgaagtaggggctagcgtctggcctaagaaggggacggccgtgttctggtacaacctgtttgcctccggcgagggcgattactccacacggcatgccgcctgccccgttcttgtgggaaataagtgggtgagtaataaatggcttcacgaaagaggccaggaattccggcgaccatgcactttaagcgagttggagtag

SEQ ID NO: 54250 - DNA, 1551 bp, Artificial Sequence
  derived and/or modified sequence
atgatttggtacattctgattattggcattttactgcctcagagtctggcacatcctggtttctttaccagtattggtcaaatgacggacctgatccatacagaaaaggacctcgtcacttccttaaaggattatattaaagccgaagaagacaaactggaacagatcaagaaatgggcagaaaagctcgacagactgacaagcacagcaactaaagatccagagggcttcgtgggtcacccggtcaacgcctttaaattgatgaagaggcttaataccgagtggagcgagttggagaatctcgtgctgaaggacatgagcgatgggtttatctccaatctgaccatccaaaggcagtacttccccaacgatgaggaccaggtcggcgcagctaaggccctcctgagactacaggacacttacaacctggatacagacacaatttctaagggcaacctcccaggcgtaaagcataagagcttcctgacggccgaggactgtttcgagctggggaaggtcgcatataccgaggccgactattatcacacggagctttggatggagcaagctctcagacaactagatgagggggagatctcaaccatagataaagttagtgtgctagattacctaagctacgcggtttaccagcagggagatttggataaagccctgctccttacaaagaagctgttggagttggatcctgaacaccagcgggcaaacggtaacctgaaatattttgaatacatcatggccaaagagaaggacgtcaataaaagtgcaagcgacgaccagagtgatcagaaaacgactcccaagaaaaaaggcgtggctgtcgactatttacctgagcggcaaaagtatgagatgctgtgcaggggtgagggcattaagatgactcccagacgccagaagaagctgttttgcagataccatgacggaaaccgcaaccccaagttcatattagcccctgctaagcaggaggacgagtgggacaagccgagaattatccgtttccacgatatcatcagcgatgcagagattgaaatcgtgaaggaccttgccaagccacggctctcacgcgctaccgtgcatgatccagagaccggaaaattaactaccgctcagtatcgcgtgtccaaaagcgcatggttatctggctacgagaatcccgtggttagtcgaattaatatgagaatccaagacctgactgggctggatgtgagtaccgccgaggagctgcagaaggacgagccagacgccttcaaggaactgggaaccggtaatcgcatcgcaacctggctgttctacatgagcgatgtgagcgcaggcggtgccactgtctttccagaggtaggcgctagcgtgtggcctaagaagggcacagctgtgttttggtataacctgttcgcgagcggtgagggggactatagtactcgacatgctgcctgccccgttttggttggtaataaatgggtaagcaacaaatggctgcatgagcgtggacaggagttccgtcgaccctgtactctaagcgagctcgagtag

SEQ ID NO: 54251 - DNA, 2790 bp, Artificial Sequence
  derived and/or modified sequence
ggggcgctggtgtgatcgagctcacgtagcgagggctgcagtcgcctcctccctggcgctgccatcgcggcctagaggttataaaagggctaacgggctccctctgctgcccagtcgcgccgccagcgggctgagggtaggaagtagccgctccgagtggaggcgactgggggctgaagagcgcgccgccctctcgtcccactttccaggtgtgtgatcctgtaaaattaaatcttccaagatgatctggtatatattaattataggaattctgcttccccagtctttggctcatccaggcttttttacttcaattggtcagatgactgatttgatccatactgagaaagatctggtgacttctctgaaagattatattaaggcagaagaggacaagttagaacaaataaaaaaatgggcagagaagttagatcggctaactagtacagcgacaaaagatccagaaggatttgttgggcatccagtaaatgcattcaaattaatgaaacgtctgaatactgagtggagtgagttggagaatctggtccttaaggatatgtcagatggctttatctctaacctaaccattcagagacagtactttcctaatgatgaagatcaggttggggcagccaaagctctgttacgtctccaggatacctacaatttggatacagataccatctcaaagggtaatcttccaggagtgaaacacaaatcttttctaacggctgaggactgctttgagttgggcaaagtggcctatacagaagcagattattaccatacggaactgtggatggaacaagccctaaggcaactggatgaaggcgagatttctaccatagataaagtctctgttctagattatttgagctatgcggtatatcagcagggagacctggataaggcacttttgctcacaaagaagcttcttgaactagatcctgaacatcagagagctaatggtaacttaaaatattttgagtatataatggctaaagaaaaagatgtcaataagtctgcttcagatgaccaatctgatcagaaaactacaccaaagaaaaaaggggttgctgtggattacctgccagagagacagaagtacgaaatgctgtgccgtggggagggtatcaaaatgacccctcggagacagaaaaaactcttttgccgctaccatgatggaaaccgtaatcctaaatttattctggctccagctaaacaggaggatgaatgggacaagcctcgtattattcgcttccatgatattatttctgatgcagaaattgaaatcgtcaaagacctagcaaaaccaaggctgagccgagctacagtacatgaccctgagactggaaaattgaccacagcacagtacagagtatctaagagtgcctggctctctggctatgaaaatcctgtggtgtctcgaattaatatgagaatacaagatctaacaggactagatgtttccacagcagaggaattacagaaagatgagccagatgctttcaaagagctggggacaggaaatagaattgctacatggctgttttatatgagtgatgtgtctgcaggaggagccactgtttttcctgaagttggagctagtgtttggcccaaaaaaggaactgctgttttctggtataatctgtttgccagtggagaaggagattatagtacacggcatgcagcctgtccagtgctagttggcaacaaatgggtatccaataaatggctccatgaacgtggacaagaatttcgaagaccttgtacgttgtcagaattggaatgacaaacaggcttccctttttctcctattgttgtactcttatgtgtctgatatacacatttcctagtcttaactttcaggagtttacaattgactaacactccatgattgattcagtcatgaacctcatcccatgtttcatctgtggacaattgcttactttgtgggttcttttaaaagtaacacgaaatcatcatattgcataaaaccttaaagttctgttggtatcacagaagacaaggcagagtttaaagtgaggaattttatatttaaagaactttttggttggataaaaacataatttgagcatccagttttagtatttcactacatctcagttggtgggtgttaagctagaatgggctgtgtgataggaaacaaatgccttacagatgtgcctaggtgttctgtttacctagtgtcttactctgttttctggatctgaagactagtaataaactaggacactaactgggttccatgtgattgccctttcatatgatcttctaagttgatttttttcctcccaagtcttttttaaagaaagtatactgtattttaccaaccccctctcttttcttttagctcctctgtggtgaattaaacgtacttgagttaaaatatttcgattttttttttttttttaatggaaagtcctgcataacaacactgggccttcttaactaaaatgctcaccacttagcctgtttttttatcccttttttaaaatgacagatgattttgttcaggaattttgctgtttttcttagtgctaataccttgcctcttattcctgctacagcagggtggtaatattggcattctgattaaatactgtgccttaggagactggaagtttaaaaatgtacaagtcctttcagtgatgagggaattgattttttttaaaagtctttttcttagaaagccaaaatgtttgtttttttaagattctgaaatgtgttgtgacaacaatgacctatttatgatcttaaatctttttt

SEQ ID NO: 54252 - DNA, 1551 bp, Artificial Sequence
  derived and/or modified sequence
atgatctggtacatcctgatcatcggcatcctgctgccccagagcctggcccaccccggcttcttcaccagcatcggccagatgaccgacctgatccacaccgagaaggacctggtgaccagcctgaaggactacatcaaggccgaggaggacaagctggagcagatcaagaagtgggccgagaagctggacagactgaccagcaccgccaccaaggaccccgagggcttcgtgggccaccccgtgaacgccttcaagctgatgaagagactgaacaccgagtggagcgagctggagaacctggtgctgaaggacatgagcgacggcttcatcagcaacctgaccatccagagacagtacttccccaacgacgaggaccaggtgggcgccgccaaggccctgctgagactgcaggacacctacaacctggacaccgacaccatcagcaagggcaacctgcccggcgtgaagcacaagagcttcctgaccgccgaggactgcttcgagctgggcaaggtggcctacaccgaggccgactactaccacaccgagctgtggatggagcaggccctgagacagctggacgagggcgagatcagcaccatcgacaaggtgagcgtgctggactacctgagctacgccgtgtaccagcagggcgacctggacaaggccctgctgctgaccaagaagctgctggagctggaccccgagcaccagagagccaacggcaacctgaagtacttcgagtacatcatggccaaggagaaggacgtgaacaagagcgccagcgacgaccagagcgaccagaagaccacccccaagaagaagggcgtggccgtggactacctgcccgagagacagaagtacgagatgctgtgcagaggcgagggcatcaagatgacccccagaagacagaagaagctgttctgcagataccacgacggcaacagaaaccccaagttcatcctggcccccgccaagcaggaggacgagtgggacaagcccagaatcatcagattccacgacatcatcagcgacgccgagatcgagatcgtgaaggacctggccaagcccagactgagcagagccaccgtgcacgaccccgagaccggcaagctgaccaccgcccagtacagagtgagcaagagcgcctggctgagcggctacgagaaccccgtggtgagcagaatcaacatgagaatccaggacctgaccggcctggacgtgagcaccgccgaggagctgcagaaggacgagcccgacgccttcaaggagctgggcaccggcaacagaatcgccacctggctgttctacatgagcgacgtgagcgccggcggcgccaccgtgttccccgaggtgggcgccagcgtgtggcccaagaagggcaccgccgtgttctggtacaacctgttcgccagcggcgagggcgactacagcaccagacacgccgcctgccccgtgctggtgggcaacaagtgggtgagcaacaagtggctgcacgagagaggccaggagttcagaagaccctgcaccctgagcgagctggagtag

SEQ ID NO: 54253 - protein, 361 aa, Artificial Sequence
  derived and/or modified sequence
MGEEANDDKKPTTKFELERETELRFEVEASQSVQLELLTGMAEIFGTELTRNKKFTFDAGAKVAVFTWHGCSVQLSGRTEVAYVSKDTPMLLYLNTHTALEQMRRQAEKEEERGPRVMVVGPTDVGKSTVCRLLLNYAITSRLADVFNQRCEVNRRASVSGCVINTCGWVKGSGYQALVHAASAFEVDVVVVLDQERLYNELKRDLPHFVRTVLLPKSGGVVERSKDFRRECRDERIREYFYGFRGCFYPHAFNVKFSDVKIYKVGAPTIPDSCLPLGMSQEDNQLKLVPVTPGRDMVHHLLSVSTAEGTEENLSETSVAGFIVVTSVDLEHQVFTVLSPAPRPLPKNFLLIMDIRFMDLK

SEQ ID NO: 54254 - DNA, 1086 bp, Artificial Sequence
  derived and/or modified sequence
atgggagaggaggccaacgacgataagaaacctactactaagtttgagttggagcgggagacagaactacggtttgaggtggaggctagccagtcagtccagctggagcttctcacagggatggcagaaatattcgggacagaattgacacgaaataaaaagttcacatttgatgccggtgctaaggttgctgtgtttacctggcatggctgctcggtccagctgagcggcagaaccgaggtcgcatacgtgtcaaaggataccccaatgctcctgtatctcaatacacacactgcactggagcagatgcgcagacaggctgaaaaggaggaagaacggggccctagagtcatggtcgttggacctactgacgtcggaaaaagcaccgtgtgcagactgttactgaattatgccataacctccaggctagcagatgtattcaatcagaggtgcgaggtcaaccggagggctagtgtgagtggatgtgtgattaatacatgtggatgggttaaagggtcggggtatcaggccctcgtgcacgcagcttcagccttcgaagtggatgtggttgttgtgctggatcaggagcggctgtacaatgagctgaagcgagatcttcctcacttcgtcaggactgtgctccttcccaaaagcgggggggtggtcgaacggtcaaaagactttagacgcgagtgtcgtgacgagaggattagagagtacttctacgggttccggggatgtttttacccacacgcatttaacgtgaaatttagtgacgtgaagatttacaaagtgggagcacccacaattccagacagctgtctgcccctgggaatgagtcaggaagataatcaactgaagctcgtcccggtgacacctgggcgtgatatggtgcaccacttgctgagtgtaagcactgcagagggaaccgaagaaaatttgtccgaaacttccgtggccggctttattgtcgtgaccagtgttgatctcgaacaccaggtctttacagtgctgagtcccgcccccaggcctctgccgaagaattttcttctgattatggacattcgtttcatggatcttaaatag

SEQ ID NO: 54255 - DNA, 279 bp, Artificial Sequence
  derived and/or modified sequence
atgggggaggaggccaatgatgataaaaagcccacaacaaaatttgaactggagagagagacggagttgcgctttgaagtggaagcgagccagtcggtccagctcgagctgctcaccggaatggctgagatcttcggaacagagctcaccagaaataaaaagtttacctttgacgctggtgcaaaagtggccgtttttacctggcatggttgttcagtgcaactttccgggcgcaccgaggttgcctatgtgtcaaaggatactccgatgctgctgtag

SEQ ID NO: 54256 - DNA, 399 bp, Artificial Sequence
  derived and/or modified sequence
atgggcgaggaggccaacgacgataaaaagcctaccactaagtttgagctcgaaagggagacagagttgagattcgaagtcgaggcaagtcagtccgtacaattggagttgcttacaggaatggccgagatcttcggcacggaactgactagaaacaaaaagtttactttcgatgccggcgcaaaggtggcagtgttcacctggcatggctgctcagtgcagctttcgggcaggactgaggtggcttatgttagcaaagatacacccatgttactgtatttgaatactcatacggccctcgagcagatgaggagacaagccgaaaaggaggaggagaggggtcctagagtgatggtagttggcccaactgatgtcggcaagagcacggtctgcaggtag

SEQ ID NO: 54257 - DNA, 1086 bp, Artificial Sequence
  derived and/or modified sequence
atgggagaggaggccaatgatgacaagaagcccaccaccaagtttgagctggagcgggagacagagctgcgctttgaggtggaggccagccagagcgtgcagctggagctgctgaccggcatggccgagatctttggaacagagctgaccaggaacaagaagttcacctttgatgctggggccaaggtggccgtgttcacctggcacggctgcagcgtgcagctgagcggccgcacagaggtggcctacgtgtccaaggacacccccatgctgctgtacctgaacacccacacagccctggagcagatgaggcggcaggccgagaaggaggaggagcggggcccccgggtgatggtggtgggccccacagatgtgggcaagagcacagtgtgccgcctgctgctgaactatgccatcaccagccggctggctgatgtgttcaaccagagatgtgaggtgaacagaagagcctctgtgtctggctgcgtcatcaacacctgtggctgggtgaagggcagcggctaccaggccctggtgcatgctgccagcgcctttgaggtggatgtggtggtggtgctggaccaggagcggctgtacaatgagctgaagagggacctgccccactttgtgaggacagtgctgctgcccaagagcggcggcgtggtggagaggagcaaggacttcagaagagaatgtagagatgagcgcatccgggagtacttctacggcttccggggctgcttctacccccacgccttcaacgtgaagttcagtgatgtgaagatctacaaggtgggcgcccccaccatcccagacagctgcctgcccctgggcatgagccaggaggacaaccagctgaagctggtgcctgtgaccccaggccgggacatggtgcaccacctgctgtctgtgtccacagctgagggcacagaggagaacctgtctgagacctctgtggccggcttcatcgtggtgacctctgtggacctggagcaccaggtgttcaccgtgctgagccctgccccccggcccctgcccaagaacttcctgctgatcatggacatccgcttcatggacctgaagtag

SEQ ID NO: 54258 - DNA, 279 bp, Artificial Sequence
  derived and/or modified sequence
atgggagaggaggccaatgatgacaagaagcccaccaccaagtttgagctggagcgggagacagagctgcgctttgaggtggaggccagccagagcgtgcagctggagctgctgaccggcatggccgagatctttggaacagagctgaccaggaacaagaagttcacctttgatgctggggccaaggtggccgtgttcacctggcacggctgcagcgtgcagctgagcggccgcacagaggtggcctacgtgtccaaggacacccccatgctgctgtag

SEQ ID NO: 54259 - DNA, 399 bp, Artificial Sequence
  derived and/or modified sequence
atgggagaggaggccaatgatgacaagaagcccaccaccaagtttgagctggagcgggagacagagctgcgctttgaggtggaggccagccagagcgtgcagctggagctgctgaccggcatggccgagatctttggaacagagctgaccaggaacaagaagttcacctttgatgctggggccaaggtggccgtgttcacctggcacggctgcagcgtgcagctgagcggccgcacagaggtggcctacgtgtccaaggacacccccatgctgctgtacctgaacacccacacagccctggagcagatgaggcggcaggccgagaaggaggaggagcggggcccccgggtgatggtggtgggccccacagatgtgggcaagagcacagtgtgcaggtag

SEQ ID NO: 54260 - DNA, 1086 bp, Artificial Sequence
  derived and/or modified sequence
atgggcgaggaggccaacgacgacaagaagcccaccaccaagttcgagcttgagagagagacagagctaaggttcgaggtggaggcgtctcagtctgtgcaactggagttgcttaccggcatggccgagatcttcggtacagaactgacaagaaataagaaatttaccttcgatgcaggagccaaagtcgcagtcttcacatggcacgggtgtagcgtccaactgagtggtagaacagaggtggcttatgttagcaaagacacgcctatgctactgtatctgaacacacatacagcccttgaacagatgaggcgccaggccgagaaagaggaagagcgggggccccgtgtgatggtagtcggccctaccgacgtggggaagagcactgtttgcaggctgctcttaaattatgccattacttcccgcctggcagatgtgttcaaccaaagatgcgaggttaaccggcgcgccagcgtgtccgggtgcgtcataaacacctgcggttgggtcaagggcagcgggtaccaggccctggtccacgccgcctccgccttcgaggtcgacgtggtagtggtactggaccaagaaagactctacaacgagctgaaaagagatctgccccacttcgtgagaacagtcctgttacccaagtctggaggcgtcgtggaacggagcaaggacttcagacgcgaatgccgagacgaaaggatacgcgaatatttctacggttttagggggtgcttttacccccacgcatttaatgtaaaatttagcgatgttaagatatataaagtgggggcacctaccatccccgactcttgtctccccctggggatgagccaagaggacaatcagctgaagctggtaccagtgacccctggacgcgatatggtgcatcacctgctctcagtaagcacggccgaggggacagaggagaaccttagtgaaacctccgtcgccggattcatcgtcgtgactagcgtagatctcgagcaccaagtctttactgtgctgagtcccgcaccgagaccactcccaaaaaactttctcctcataatggatattaggtttatggacttaaaatag

SEQ ID NO: 54261 - DNA, 279 bp, Artificial Sequence
  derived and/or modified sequence
atgggcgaggaggccaacgacgacaagaagcccaccaccaagttcgagctggagcgggaaaccgagctgcgcttcgaggtggaagcatcccaatcagtacagctcgagctgctcacaggtatggcagaaatcttcggcactgagctaacccgtaacaagaagtttacatttgacgccggagcaaaagttgcagtgtttacatggcacggatgctcagttcaactgtccggcaggactgaggttgcctacgtcagtaaagacacacccatgttgctttag

SEQ ID NO: 54262 - DNA, 399 bp, Artificial Sequence
  derived and/or modified sequence
atgggcgaggaggccaacgacgacaagaagcccaccaccaagttcgagctggagagagaaaccgaattgcgattcgaggttgaagccagccaaagcgttcagcttgaactgctgaccggaatggcggagatcttcggaacagagctgaccagaaacaagaagtttacattcgacgccggggccaaggtggctgttttcacttggcacgggtgtagtgttcaactgtcggggcggaccgaagttgcttacgtctcaaaggatacaccaatgttgctctatttgaacacacacacagctctggagcaaatgcgaagacaagccgagaaggaagaagaaagaggtccgcgagtgatggtggtaggtcctaccgatgtgggcaaatctacagtgtgccggtag

SEQ ID NO: 54263 - DNA, 1086 bp, Artificial Sequence
  derived and/or modified sequence
atgggggaagaggcaaacgatgacaaaaaaccaactacaaaattcgagctggagcgggagaccgagctccgcttcgaggtggaagcctcccagagcgtccagctagaacttctgacgggcatggctgagatctttggaacagagctcacccgtaataaaaagttcacatttgacgcgggagccaaggtggcggtgttcacatggcatggctgtagcgtgcagctgagcggcagaaccgaggtggcttatgtgtcaaaagatacgccgatgctcctgtatttgaacactcacactgccctcgaacagatgaggagacaggccgagaaagaggaggagcgcggaccccgtgtcatggtggtaggccctacagatgtcggaaaatcaaccgtttgccgtctgctgctgaactacgcgatcacaagcagactagctgatgtgttcaatcagcggtgcgaggtgaataggcgcgctagtgtgtccggttgcgtcatcaatacctgcggatgggttaagggatctggttatcaggcactggtacacgccgcaagcgctttcgaagtggacgtggtggttgtgcttgatcaggaacgcttgtataatgaactcaaaagggacctccctcactttgttcgcactgtacttctaccaaagagcggtggggtcgtggaacgctccaaagactttcgtcgcgagtgcagggatgagcgcatccgcgagtacttttacggtttccggggttgtttctaccctcacgctttcaacgtgaaattctcggatgtcaagatctataaggtgggcgcacccacaatcccagattcctgtcttcctctaggaatgtctcaggaggacaatcagttaaaattggttccggttacccctggacgcgacatggtgcaccatctgttgagtgtcagcacagctgaagggactgaggagaacctttcagagactagcgtggcaggatttattgtggtgacaagtgttgacttggaacaccaagtctttaccgtgttatctccagccccacggcctctccctaagaacttcctcttgatcatggacatccgctttatggacctcaagtag

SEQ ID NO: 54264 - DNA, 279 bp, Artificial Sequence
  derived and/or modified sequence
atgggcgaagaggcaaatgacgataagaagcctactacgaagttcgagctggaaagagaaacggagttaaggtttgaggtggaggcgtcacaaagtgtccagctagagcttcttaccggaatggcggagatcttcggcacggagctgaccaggaataagaagttcactttcgacgctggggcaaaagtggcggttttcacctggcatggctgttcagtccaactctcagggcgtacggaagtggcttacgtctccaaggacacacccatgttgttatag

SEQ ID NO: 54265 - DNA, 399 bp, Artificial Sequence
  derived and/or modified sequence
atgggtgaagaagccaatgacgataaaaaacctactacgaagttcgaactcgagagggagactgaactacgtttcgaggtggaagcttcccagagcgtgcagcttgagttacttactggcatggccgaaatttttgggacagagctcactcgtaacaagaagtttacttttgacgcaggtgctaaagtagcagtgtttacctggcatggatgctccgtccagctctcgggccgtacagaggtagcctatgttagcaaagatactccaatgcttctataccttaatacccacacggctttagagcagatgagaagacaagctgagaaggaggaagaaagaggacccagggttatggtagttggacccaccgacgtagggaaatcgaccgtgtgtcgatag

SEQ ID NO: 54266 - DNA, 1634 bp, Artificial Sequence
  derived and/or modified sequence
tttccggcgtgggtccgggcaagaaccgcttgtagtttggtttaaattctgcacgggaggaccttctgagtttacctgttgggctcctggctgcgcaggcacagcagctacacagaagagatgggagaagaggctaatgatgacaagaagccaaccactaaatttgaactagagcgagaaacagaacttcgctttgaggtggaggcatctcagtcagttcagttggagttgttgactggcatggcagagatctttggcacagagctgacccgaaacaagaaattcacctttgatgctggtgccaaggtggctgttttcacttggcatggctgttctgtgcaactgagcggccgcactgaggtggcttatgtctccaaggacactcctatgttgctttacctcaacactcacacagccttggaacagatgcggaggcaagcggaaaaggaagaagagcgaggtccccgagtgatggtagtgggccccactgatgtgggcaagtctacagtgtgtcgccttctgctcaactacgcaattacatctcgtttagcagatgtgttcaaccaaaggtgtgaggtgaaccgaagggcatctgtgagtggctgtgtcattaacacctgtggctgggtcaagggctctggttaccaggctctggtgcatgcagcctcagcttttgaggtggatgtcgttgttgttctggatcaagaacgactgtacaatgaactgaaacgggacctcccccactttgtacgcactgtgctgctccctaaatctgggggtgtggtggagcgctccaaggacttccggcgggaatgtagggatgagcgtatccgtgagtatttttatggattccgaggctgtttctatccccatgccttcaatgtcaaattttcagatgtgaaaatctacaaagttggggcacccaccatcccagactcctgtttacctttgggcatgtctcaagaggataatcagctcaagctagtacctgtcactcctgggcgagatatggtgcaccacctactgagtgttagcactgccgagggtacagaggagaacctgtccgagacaagtgtagctggcttcattgtggtgaccagtgtggacctggagcatcaggtgtttactgttctgtctccagcccctcgcccactgcctaagaacttccttctcatcatggatatccggttcatggatctgaagtagagatcagcaggaagccttgctgcctgggacatagagatcatctggccacccctagaggcagatgggctgagataaaagactgttggggccacctgaccagtaaactgtggactagtagaaagttcatattctacctctaaaaacaggtagtggtaacctgactcttctaatcttgaaccaaaaggaaaaccatgagactgtaattggtttcttagaccacctaagatgccactttgaattctctaagaccctggagaattgcatttctttcactgtgctactatgtggtttttaaaaaatcaatgctttatattccatatgtggttcttacccatttatctaggatgaaagtgtgaattagagggactccttccaataaagttcaaacttaaaaaaaatcattttaataaatatttttgccatatcat

SEQ ID NO: 54267 - DNA, 566 bp, Artificial Sequence
  derived and/or modified sequence
attcccagtcaagccaaggaaaggctgcacagaaggccagagaatcacaaaggggagtaggggtcattttttcacccatctcggatcacagggagaagcaagttgggcaaatgactggagaaaaaacaaaggcaagccgagtgctggggagagatgttcccctgaagtgagacggggctggaccgtaggagaaaggggagagggagggctggcgggggcaactgacagctgacagcagaggcgccgaggcggaggctggaggaaccaggcacagcagctacacagaagagatgggagaagaggctaatgatgacaagaagccaaccactaaatttgaactagagcgagaaacagaacttcgctttgaggtggaggcatctcagtcagttcagttggagttgttgactggcatggcagagatctttggcacagagctgacccgaaacaagaaattcacctttgatgctggtgccaaggtggctgttttcacttggcatggctgttctgtgcaactgagcggccgcactgaggtggcttatgtctccaaggacactcctatgttgctt

SEQ ID NO: 54268 - DNA, 553 bp, Artificial Sequence
  derived and/or modified sequence
aactgcgtttgtttccggcgtgggtccgggcaagaaccgcttgtagtttggtttaaattctgcacgggaggaccttctgagtttacctgttgggctcctggctgcgcagatctgatatttaatttgtgttctaggcacagcagctacacagaagagatgggagaagaggctaatgatgacaagaagccaaccactaaatttgaactagagcgagaaacagaacttcgctttgaggtggaggcatctcagtcagttcagttggagttgttgactggcatggcagagatctttggcacagagctgacccgaaacaagaaattcacctttgatgctggtgccaaggtggctgttttcacttggcatggctgttctgtgcaactgagcggccgcactgaggtggcttatgtctccaaggacactcctatgttgctttacctcaacactcacacagccttggaacagatgcggaggcaagcggaaaaggaagaagagcgaggtccccgagtgatggtagtgggccccactgatgtgggcaagtctacagtgtgtcgcc

SEQ ID NO: 54269 - DNA, 1086 bp, Artificial Sequence
  derived and/or modified sequence
atgggcgaggaggccaacgacgacaagaagcccaccaccaagttcgagctggagagagagaccgagctgagattcgaggtggaggccagccagagcgtgcagctggagctgctgaccggcatggccgagatcttcggcaccgagctgaccagaaacaagaagttcaccttcgacgccggcgccaaggtggccgtgttcacctggcacggctgcagcgtgcagctgagcggcagaaccgaggtggcctacgtgagcaaggacacccccatgctgctgtacctgaacacccacaccgccctggagcagatgagaagacaggccgagaaggaggaggagagaggccccagagtgatggtggtgggccccaccgacgtgggcaagagcaccgtgtgcagactgctgctgaactacgccatcaccagcagactggccgacgtgttcaaccagagatgcgaggtgaacagaagagccagcgtgagcggctgcgtgatcaacacctgcggctgggtgaagggcagcggctaccaggccctggtgcacgccgccagcgccttcgaggtggacgtggtggtggtgctggaccaggagagactgtacaacgagctgaagagagacctgccccacttcgtgagaaccgtgctgctgcccaagagcggcggcgtggtggagagaagcaaggacttcagaagagagtgcagagacgagagaatcagagagtacttctacggcttcagaggctgcttctacccccacgccttcaacgtgaagttcagcgacgtgaagatctacaaggtgggcgcccccaccatccccgacagctgcctgcccctgggcatgagccaggaggacaaccagctgaagctggtgcccgtgacccccggcagagacatggtgcaccacctgctgagcgtgagcaccgccgagggcaccgaggagaacctgagcgagaccagcgtggccggcttcatcgtggtgaccagcgtggacctggagcaccaggtgttcaccgtgctgagccccgcccccagacccctgcccaagaacttcctgctgatcatggacatcagattcatggacctgaagtag

SEQ ID NO: 54270 - DNA, 279 bp, Artificial Sequence
  derived and/or modified sequence
atgggcgaggaggccaacgacgacaagaagcccaccaccaagttcgagctggagagagagaccgagctgagattcgaggtggaggccagccagagcgtgcagctggagctgctgaccggcatggccgagatcttcggcaccgagctgaccagaaacaagaagttcaccttcgacgccggcgccaaggtggccgtgttcacctggcacggctgcagcgtgcagctgagcggcagaaccgaggtggcctacgtgagcaaggacacccccatgctgctgtag

SEQ ID NO: 54271 - DNA, 399 bp, Artificial Sequence
  derived and/or modified sequence
atgggcgaggaggccaacgacgacaagaagcccaccaccaagttcgagctggagagagagaccgagctgagattcgaggtggaggccagccagagcgtgcagctggagctgctgaccggcatggccgagatcttcggcaccgagctgaccagaaacaagaagttcaccttcgacgccggcgccaaggtggccgtgttcacctggcacggctgcagcgtgcagctgagcggcagaaccgaggtggcctacgtgagcaaggacacccccatgctgctgtacctgaacacccacaccgccctggagcagatgagaagacaggccgagaaggaggaggagagaggccccagagtgatggtggtgggccccaccgacgtgggcaagagcaccgtgtgcagatag

SEQ ID NO: 54272 - protein, 937 aa, Artificial Sequence
  derived and/or modified sequence
MDDDDDDDDVGDHDDDHPGMEVVLHEDKKYYPTAEEVYGPEVETIVQEEDTQPLTEPIIKPVKTKKFTLMEQTLPVTVYEMDFLADLMDNSELIRNVTLCGHLHHGKTCFVDCLIEQTHPEIRKRYDQDLCYTDILFTEQERGVGIKSTPVTVVLPDTKGKSYLFNIMDTPGHVNFSDEVTAGLRISDGVVLFIDAAEGVMLNTERLIKHAVQERLAVTVCINKIDRLILELKLPPTDAYYKLRHIVDEVNGLISMYSTDENLILSPLLGNVCFSSSQYSICFTLGSFAKIYADTFGDINYQEFAKRLWGDIYFNPKTRKFTKKAPTSSSQRSFVEFILEPLYKILAQVVGDVDTSLPRTLDELGIHLTKEELKLNIRPLLRLVCKKFFGEFTGFVDMCVQHIPSPKVGAKPKIEHTYTGGVDSDLGEAMSDCDPDGPLMCHTTKMYSTDDGVQFHAFGRVLSGTIHAGQPVKVLGENYTLEDEEDSQICTVGRLWISVARYHIEVNRVPAGNWVLIEGVDQPIVKTATITEPRGNEEAQIFRPLKFNTTSVIKIAVEPVNPSELPKMLDGLRKVNKSYPSLTTKVEESGEHVILGTGELYLDCVMHDLRKMYSEIDIKVADPVVTFCETVVETSSLKCFAETPNKKNKITMIAEPLEKGLAEDIENEVVQITWNRKKLGEFFQTKYDWDLLAARSIWAFGPDATGPNILVDDTLPSEVDKALLGSVKDSIVQGFQWGTREGPLCDELIRNVKFKILDAVVAQEPLHRGGGQIIPTARRVVYSAFLMATPRLMEPYYFVEVQAPADCVSAVYTVLARRRGHVTQDAPIPGSPLYTIKAFIPAIDSFGFETDLRTHTQGQAFSLSVFHHWQIVPGDPLDKSIVIRPLEPQPAPHLAREFMIKTRRRKGLSEDVSISKFFDDPMLLELAKQDVVLNYPM

SEQ ID NO: 54273 - protein, 1036 aa, Artificial Sequence
  derived and/or modified sequence
MEVVGDFEYSKRDLVGHGAFAVVFRGRHRQKTDWEVAIKSINKKNLSKSQILLGKEIKILKELQHENIVALYDVQELPNSVFLVMEYCNGGDLADYLQAKGTLSEDTIRVFLHQIAAAMRILHSKGIIHRDLKPQNILLSYANRRKSSVSGIRIKIADFGFARYLHSNMMAATLCGSPMYMAPEVIMSQHYDAKADLWSIGTVIYQCLVGKPPFQANSPQDLRMFYEKNRSLMPSIPRETSPYLANLLLGLLQRNQKDRMDFEAFFSHPFLEQGPVKKSCPVPVPMYSGSVSGSSCGSSPSCRFASPPSLPDMQHIQEENLSSPPLGPPNYLQVSKDSASTSSKNSSCDTDDFVLVPHNISSDHSCDMPVGTAGRRASNEFLVCGGQCQPTVSPHSETAPIPVPTQIRNYQRIEQNLTSTASSGTNVHGSPRSAVVRRSNTSPMGFLRPGSCSPVPADTAQTVGRRLSTGSSRPYSPSPLVGTIPEQFSQCCCGHPQGHDSRSRNSSGSPVPQAQSPQSLLSGARLQSAPTLTDIYQNKQKLRKQHSDPVCPSHTGAGYSYSPQPSRPGSLGTSPTKHLGSSPRSSDWFFKTPLPTIIGSPTKTTAPFKIPKTQASSNLLALVTRHGPAEEQSKDGNEPRECAHCLLVQGSERQRAEQQSKAVFGRSVSTGKLSDQQGKTPICRHQGSTDSLNTERPMDIAPAGACGGVLAPPAGTAASSKAVLFTVGSPPHSAAAPTCTHMFLRTRTTSVGPSNSGGSLCAMSGRVCVGSPPGPGFGSSPPGAEAAPSLRYVPYGASPPSLEGLITFEAPELPEETLMEREHTDTLRHLNVMLMFTECVLDLTAMRGGNPELCTSAVSLYQIQESVVVDQISQLSKDWGRVEQLVLYMKAAQLLAASLHLAKAQIKSGKLSPSTAVKQVVKNLNERYKFCITMCKKLTEKLNRFFSDKQRFIDEINSVTAEKLIYNCAVEMVQSAALDEMFQQTEDIVYRYHKAALLLEGLSRILQDPADIENVHKYKCSIERRLSALCHSTATV

SEQ ID NO: 54274 - DNA, 3111 bp, Artificial Sequence
  derived and/or modified sequence
atggaggtggtgggcgacttcgagtacagcaagagagacctggtgggccacggcgccttcgccgtggtgttcagaggcagacacagacagaagaccgactgggaggtggccatcaagagcatcaacaagaagaacctgagcaagagccagatcctgctgggcaaggagatcaagatcctgaaggagctgcagcacgagaacatcgtggccctgtacgacgtgcaggagctgcccaacagcgtgttcctggtgatggagtactgcaacggcggcgacctggccgactacctgcaggccaagggcaccctgagcgaggacaccatcagagtgttcctgcaccagatcgccgccgccatgagaatcctgcacagcaagggcatcatccacagagacctgaagccccagaacatcctgctgagctacgccaacagaagaaagagcagcgtgagcggcatcagaatcaagatcgccgacttcggcttcgccagatacctgcacagcaacatgatggccgccaccctgtgcggcagccccatgtacatggcccccgaggtgatcatgagccagcactacgacgccaaggccgacctgtggagcatcggcaccgtgatctaccagtgcctggtgggcaagccccccttccaggccaacagcccccaggacctgagaatgttctacgagaagaacagaagcctgatgcccagcatccccagagagaccagcccctacctggccaacctgctgctgggcctgctgcagagaaaccagaaggacagaatggacttcgaggccttcttcagccaccccttcctggagcagggccccgtgaagaagagctgccccgtgcccgtgcccatgtacagcggcagcgtgagcggcagcagctgcggcagcagccccagctgcagattcgccagcccccccagcctgcccgacatgcagcacatccaggaggagaacctgagcagcccccccctgggcccccccaactacctgcaggtgagcaaggacagcgccagcaccagcagcaagaacagcagctgcgacaccgacgacttcgtgctggtgccccacaacatcagcagcgaccacagctgcgacatgcccgtgggcaccgccggcagaagagccagcaacgagttcctggtgtgcggcggccagtgccagcccaccgtgagcccccacagcgagaccgcccccatccccgtgcccacccagatcagaaactaccagagaatcgagcagaacctgaccagcaccgccagcagcggcaccaacgtgcacggcagccccagaagcgccgtggtgagaagaagcaacaccagccccatgggcttcctgagacccggcagctgcagccccgtgcccgccgacaccgcccagaccgtgggcagaagactgagcaccggcagcagcagaccctacagccccagccccctggtgggcaccatccccgagcagttcagccagtgctgctgcggccacccccagggccacgacagcagaagcagaaacagcagcggcagccccgtgccccaggcccagagcccccagagcctgctgagcggcgccagactgcagagcgcccccaccctgaccgacatctaccagaacaagcagaagctgagaaagcagcacagcgaccccgtgtgccccagccacaccggcgccggctacagctacagcccccagcccagcagacccggcagcctgggcaccagccccaccaagcacctgggcagcagccccagaagcagcgactggttcttcaagacccccctgcccaccatcatcggcagccccaccaagaccaccgcccccttcaagatccccaagacccaggccagcagcaacctgctggccctggtgaccagacacggccccgccgaggagcagagcaaggacggcaacgagcccagagagtgcgcccactgcctgctggtgcagggcagcgagagacagagagccgagcagcagagcaaggccgtgttcggcagaagcgtgagcaccggcaagctgagcgaccagcagggcaagacccccatctgcagacaccagggcagcaccgacagcctgaacaccgagagacccatggacatcgcccccgccggcgcctgcggcggcgtgctggccccccccgccggcaccgccgccagcagcaaggccgtgctgttcaccgtgggcagccccccccacagcgccgccgcccccacctgcacccacatgttcctgagaaccagaaccaccagcgtgggccccagcaacagcggcggcagcctgtgcgccatgagcggcagagtgtgcgtgggcagcccccccggccccggcttcggcagcagcccccccggcgccgaggccgcccccagcctgagatacgtgccctacggcgccagcccccccagcctggagggcctgatcaccttcgaggcccccgagctgcccgaggagaccctgatggagagagagcacaccgacaccctgagacacctgaacgtgatgctgatgttcaccgagtgcgtgctggacctgaccgccatgagaggcggcaaccccgagctgtgcaccagcgccgtgagcctgtaccagatccaggagagcgtggtggtggaccagatcagccagctgagcaaggactggggcagagtggagcagctggtgctgtacatgaaggccgcccagctgctggccgccagcctgcacctggccaaggcccagatcaagagcggcaagctgagccccagcaccgccgtgaagcaggtggtgaagaacctgaacgagagatacaagttctgcatcaccatgtgcaagaagctgaccgagaagctgaacagattcttcagcgacaagcagagattcatcgacgagatcaacagcgtgaccgccgagaagctgatctacaactgcgccgtggagatggtgcagagcgccgccctggacgagatgttccagcagaccgaggacatcgtgtacagataccacaaggccgccctgctgctggagggcctgagcagaatcctgcaggaccccgccgacatcgagaacgtgcacaagtacaagtgcagcatcgagagaagactgagcgccctgtgccacagcaccgccaccgtgtag

SEQ ID NO: 54275 - DNA, 3111 bp, Artificial Sequence
  derived and/or modified sequence
atggaggtggtgggcgattttgagtatagtaagcgagacctggtcggtcacggagcctttgccgtggtattccgggggcgtcatcggcagaaaaccgactgggaagtagcaatcaagagtatcaacaagaaaaatctctccaagagccaaatcttattggggaaggaaattaagatcctgaaagagcttcaacacgagaatattgtggcattatatgacgtccaggaactgccgaactcagtattcctggtcatggaatactgcaatggcggcgatctggccgactaccttcaggctaaggggacactgagtgaggacacgatcagagtgtttctgcatcagattgctgccgccatgagaattcttcacagtaaaggcattatccaccgcgatctgaagccccagaacatccttctgtcctacgctaaccgaaggaagtctagcgtgtcaggtatccgtattaagattgcagactttggtttcgcccgatacttacatagtaatatgatggccgcaacactctgcgggtctcctatgtatatggcccccgaagtgattatgagtcagcattacgatgccaaagccgatctttggtctatcgggacagtcatttatcaatgccttgtgggcaaaccgccatttcaggctaacagtccccaggacctgaggatgttttacgaaaaaaacagaagtttaatgccctcgatccctagggaaaccagcccttacttggctaacctgttgttgggcctcctgcagaggaatcaaaaggaccggatggattttgaagcctttttcagtcacccgtttttagaacagggacctgtgaagaaatcatgtccagttccagtccccatgtactccggatccgtgtcagggtcatcctgtggaagctctccaagctgtaggtttgccagcccgccctcactgccggacatgcagcatattcaggaggagaacttgagcagcccaccattaggcccccccaactaccttcaggtaagtaaagatagtgcttctacatcaagtaagaattctagctgtgacacagacgacttcgtgctcgtgccccacaacataagttccgaccattcttgtgatatgccagttggaaccgcagggcgcagagcatcaaacgagtttctggtgtgcggcggccagtgccagccaacggtgtcaccccattctgagactgccccaattcccgttccgacgcaaattcgaaactatcaacggattgaacagaatctgacgtctaccgctagcagtggaactaatgtacacggctcaccgagaagcgcagtcgtccgtcgctctaatacctctcccatgggctttctgagacccggctcttgtagccccgttcccgctgacaccgcccaaacagtgggccgccggcttagtacgggttcctcaagaccatactcaccctcaccactggtcgggaccataccagaacagttctctcagtgctgttgtggtcaccctcagggccacgactctcggtctcgcaatagttcaggctcacctgtaccccaggcccagagtccccaatccctgcttagcggggccaggctgcagagcgcaccgaccctgaccgacatttatcagaacaagcagaaactgcgaaagcagcactcagaccctgtgtgcccctcccatactggcgccggctattcctactccccgcagccatcacgcccaggaagtttaggaacaagccccacgaagcacctcggctcttcccccaggagttccgattggttcttcaagacgcccctgcctacaatcattggctctcccactaaaacaacagctcctttcaagatcccaaagacacaagctagctctaatcttctcgctctggtaacacggcatgggcctgccgaggaacaatccaaggatggaaatgaacctcgtgaatgcgcacactgcctacttgtacagggaagcgagcggcagagggctgagcagcaaagcaaggccgtgttcggaaggtcagtgtctacaggcaaactctcagatcagcagggcaaaaccccaatctgtcggcaccaggggagtacagattcactgaacactgaaagacccatggatatcgcccctgccggggcctgcgggggtgttctggctcccccggctgggactgctgcgagctctaaagcagtgctatttaccgtcgggtcccccccacacagtgccgcagcacccacttgtacccatatgtttctgcgtactcgcaccactagtgttggaccctcgaacagcggtgggtctctttgtgccatgagtgggcgtgtctgcgttgggagtccccctggaccaggtttcggttcctctccacccggggccgaggcggctccgtcactgagatatgtcccgtatggagccagtccaccatcccttgagggcttaataacattcgaagctcctgaactgccggaagagactctgatggagagggagcacactgacacacttcgtcatcttaatgtgatgctcatgttcactgagtgtgtgttggacctgacagctatgaggggcgggaaccctgaactttgcactagcgctgtttctctgtatcagattcaggagagcgtcgtagttgatcagattagtcagctctcaaaggattgggggagggttgaacagttggtgctgtatatgaaagccgcccaacttctggctgccagcttacaccttgccaaagctcagataaaaagcgggaagcttagcccgagcaccgcagtgaagcaggtggtgaaaaaccttaatgagcgctacaagttttgcataaccatgtgcaagaaactgacagaaaaacttaaccgctttttcagcgacaaacagcgtttcatcgacgagattaactcggtcaccgccgagaaactgatatataactgtgctgtagagatggtccagtccgccgccttggacgagatgttccaacaaaccgaggacatcgtgtacaggtaccacaaagcagccctgctactggagggcctgagtcgcatcctgcaggatcctgcagatatagaaaacgtgcacaaatacaagtgcagtatcgaacggcgtctctcagctctttgtcactccactgcgaccgtctag

SEQ ID NO: 54276 - DNA, 3111 bp, Artificial Sequence
  derived and/or modified sequence
atggaagtggtcggcgactttgaatattcaaagcgagacctggtgggccatggagcgttcgccgtcgtatttagaggcagacacaggcagaaaacagattgggaggttgccatcaaatcaattaataaaaagaatctttctaaatctcagattcttctgggaaaagaaatcaagattctgaaggagctccagcacgaaaacatagtggccctctatgatgtgcaggagctgccgaacagcgtcttcctggtaatggagtactgcaatggcggcgacttagccgattaccttcaggcgaaaggaacgctgtcagaggatacaattcgggttttcttgcatcaaattgccgcagccatgagaatcctacactccaaaggcatcattcaccgggacctgaaaccacaaaatatacttctcagttatgctaataggcggaaaagctccgtctccggcatcaggatcaagatcgccgactttggtttcgccagatatcttcactccaatatgatggccgccactctttgtggctcccccatgtacatggcccctgaggttatcatgtcacagcattatgacgccaaggccgacctgtggtctattgggactgtcatctaccaatgtctagttggtaagccgccgttccaggcaaactcgccacaggatcttagaatgttctatgaaaaaaaccgcagcctgatgccgtctatcccaagggagacttccccatacctggcaaacctgctcctggggttgctgcagcggaaccagaaggacagaatggactttgaagccttcttctctcatccctttctggaacagggccctgttaagaagtcctgtccagtaccagtgcccatgtatagcggaagtgtcagtgggtctagctgtggatccagtccatcttgtcgtttcgcttcaccgccgtccttgcctgacatgcagcatatccaggaggagaatctgtcctccccaccactgggtcccccaaactacttgcaagtgtcaaaggattctgctagcactagcagcaagaactcttcttgcgacaccgacgattttgttttagtgccccacaatatatcttctgatcactcctgcgatatgcccgtcggtacagctggacggagggcgtctaatgagttcctcgtgtgcggaggccagtgccagcctacagtttccccacattcagaaactgcccccataccagtgcccactcagatccgaaactatcagcgcatagagcagaatctgacctctaccgcttcctccggaacgaacgtccatggaagtccccgtagcgctgtggtgaggaggagcaatacctctcctatgggctttctgagacctggatcatgctctccagtacctgcggacacggcccaaacggtggggcgacggctgagtaccggatccagccggccctacagtccttcgcctctcgtaggtactatccccgaacagttctcacagtgttgctgcggccatccacagggacacgactcccggagccgcaatagcagcgggtctccggtcccgcaggcacagagtcctcagtccctattgagcggagcccgcctccagtcggccccgactctgaccgatatctatcaaaacaagcagaagctgcgcaagcagcactccgatcctgtgtgccccagtcacactggcgccgggtattcttacagcccgcagccctcacggcccggatcactcggtaccagccccaccaagcacttaggaagctccccacggagtagtgactggttctttaagacgcctctgcctaccatcattggatccccaacgaaaacaacagccccgtttaagatccccaaaacccaggccagcagcaatttgttagccctcgtgacacggcacgggcccgctgaggagcagagcaaggacgggaacgagcccagggaatgcgctcattgtctgcttgtgcagggttctgaacgtcagcgggccgagcagcagagtaaggccgtgtttggtaggagcgtgtctactggaaaattgagtgatcagcaaggcaagactcctatttgtcggcaccagggcagcactgattcactgaacaccgagagaccaatggatatcgcaccagcaggagcttgtgggggcgtgctggcgcccccggccggaactgctgcatccagtaaggctgttttattcactgttgggtcgccaccccactcagcagccgctccaacttgcacccacatgtttctcagaacccggaccacctctgtcggcccctctaatagcggggggagcctgtgcgctatgtcaggccgggtctgtgtggggtctcccccagggcctgggttcgggtcatcccccccaggcgcagaagcggcccctagtttgcgctacgtaccttatggagcttcacctccgagcctggaaggactgattacttttgaggcgcccgagcttcccgaagaaactcttatggaacgcgagcacaccgatactctgagacacctgaatgtgatgttgatgttcaccgaatgcgtcctagacttgacagccatgaggggaggaaatcccgaactatgtactagtgccgtgtccctctatcagattcaggagagcgtcgtcgttgatcagatctcccagctgagcaaggactgggggcgggtagagcagctcgttctttatatgaaagcagctcaattactcgcagcctcattgcaccttgcaaaagcacagattaagagcggcaagctgtcgcctagcacagcagtgaagcaagtggttaagaacctgaatgaaaggtataagttttgcattactatgtgcaagaagttgactgaaaaattgaacaggttcttttcggacaaacagaggttcatagatgaaataaactcagtgacggcagagaaacttatctacaactgcgccgtggaaatggtgcaatccgctgcactagatgagatgttccaacagacggaagacattgtttaccgttatcacaaagccgctcttctgctggagggattgtcccggatccttcaggatccggctgatatcgaaaatgtgcataagtataagtgcagtattgaaagaaggctaagtgccctatgtcacagcacagctactgtctag

SEQ ID NO: 54277 - DNA, 3111 bp, Artificial Sequence
  derived and/or modified sequence
atggaggtggtgggggactttgagtacagcaagagggacctggtgggccatggagcctttgctgtggtgttccggggccgccaccggcagaagacagactgggaggtggccatcaagagcatcaacaagaagaacctgagcaagagccagatcctgctgggcaaggagatcaagatcctgaaggagctgcagcacgagaacatcgtggccctgtatgatgtgcaggagctgcccaacagcgtcttcctggtgatggagtactgcaatggaggagacctggccgactacctgcaggccaagggcaccctgtctgaggacaccatccgggtcttcctgcaccagattgctgctgccatgaggatcctgcacagcaagggcatcatccaccgggacctgaagccccagaacatcctgctgtcctatgccaacagaaggaagagctctgtgtctggcatccgcatcaagattgctgactttggatttgcccgctacctgcacagcaacatgatggccgccaccctgtgtggcagccccatgtacatggcccctgaggtgatcatgagccagcactatgatgccaaggctgacctgtggagcatcggcaccgtcatctaccagtgcctggtgggcaagccacccttccaggccaacagcccccaggacctgaggatgttttatgagaagaacagaagcctgatgcccagcatcccccgggagaccagcccctacctggccaacctgctgctgggcctgctgcagaggaaccagaaggacaggatggactttgaggccttcttcagccaccccttcctggagcagggccctgtgaagaagagctgccctgtgcctgtgcccatgtacagcggctctgtgtctggcagcagctgtggcagcagccccagctgccgctttgccagcccccccagcctgcctgacatgcagcacatccaggaggagaacctgagcagcccccccctgggcccccccaactacctgcaggtgtccaaggacagcgccagcaccagcagcaagaacagcagctgtgacacagatgactttgtgctggtgccccacaacatcagcagtgaccacagctgtgacatgcctgtgggcacagctggaagaagagccagcaatgagttcctggtgtgtggcggccagtgccagcccaccgtgagcccccacagcgagacagcccccatccctgtgcccacccagatccggaactaccagagaattgagcagaacctgaccagcacagccagcagcggcaccaacgtgcacggcagccccaggtctgctgtggtgagaagaagcaacaccagccccatgggcttcctgcggcccggcagctgcagccctgtgcctgctgacacagcccagacagtgggccgccgcctgagcacaggcagcagccggccctacagccccagccccctggtgggcaccatccctgagcagttcagccagtgctgctgcggccacccccagggccatgacagccgcagcaggaacagcagcggcagccctgtgccccaggcccagagcccccagagcctgctgagcggggcccggctgcagagcgcccccaccctgacagacatctaccagaacaagcagaagctgaggaagcagcacagcgaccctgtgtgccccagccacactggagctggctacagctacagcccccagcccagccggcccggcagcctgggcaccagccccaccaagcacctgggcagcagccccaggagcagtgactggttcttcaagacccccctgcccaccatcatcggcagccccaccaagaccacagcccccttcaagatccccaagacccaggccagcagcaacctgctggccctggtgaccaggcatggccctgctgaggagcagagcaaggatggaaatgagcccagagaatgtgcccactgcctgctggtgcagggcagcgagcggcagagagctgagcagcagagcaaggctgtgtttggccgctctgtgtccacaggcaagctgagtgaccagcagggcaagacccccatctgccgccaccagggcagcacagacagcctgaacacagagcggcccatggacatcgccccagctggggcctgtggcggcgtgctggcccccccagctggaacagctgccagcagcaaggctgtgctcttcaccgtgggcagccccccccacagcgctgctgcccccacctgcacccacatgttcctgcggaccaggaccacctctgtgggccccagcaacagcggcggcagcctgtgtgccatgagcggccgggtgtgtgtgggcagccccccaggccctggcttcggcagcagccccccaggagctgaggccgcccccagcctgcgctacgtgccctatggagccagcccccccagcctggagggcctcatcacctttgaggcccctgagctgcctgaggagaccctgatggagcgggagcacacagacaccctgcggcacctgaatgtgatgctgatgttcacagaatgtgtgctggacctgacagccatgaggggcggcaaccctgagctgtgcaccagcgctgtgtccctgtaccagatccaggagagcgtggtggtggaccagatcagccagctgagcaaggactggggccgggtggagcagctggtgctgtacatgaaggccgcccagctgctggccgccagcctgcacctggccaaggcccagatcaagagcggcaagctgagccccagcacagctgtgaagcaggtggtgaagaacctgaatgaaagatacaagttctgcatcaccatgtgcaagaagctgacagagaagctgaaccgcttcttcagtgacaagcagcgcttcattgatgagatcaacagcgtgacagctgagaagctgatctacaactgtgctgtggagatggtgcagagcgctgccctggatgagatgttccagcagacagaggacatcgtgtaccgctaccacaaggccgccctgctgctggagggcctgagccgcatcctgcaggaccctgctgacattgaaaatgtgcacaagtacaagtgcagcattgaaagaaggctgagcgccctgtgccacagcacagccaccgtgtag

SEQ ID NO: 54278 - DNA, 3111 bp, Artificial Sequence
  derived and/or modified sequence
atggaggtggtgggcgacttcgagtacagcaagcgggacctggtgggccacggagcctttgcggttgtgtttcgtggacgccatcggcagaaaactgattgggaagtagccatcaagtcaataaacaagaaaaatctcagtaagagccagattctgctcggaaaagagattaaaatcttgaaggaactgcagcatgaaaacatcgtagcactttacgacgtccaggagttgcctaacagcgtctttctggttatggagtactgcaatggcggggatcttgcagattacctgcaggccaaagggacgctgagtgaggacactatcagagttttcctgcaccagatcgccgccgccatgaggatcctgcactccaagggaatcattcacagggatttgaaaccccagaacattctcctaagctacgccaatagaagaaaatcgagcgttagcgggatcaggatcaaaatcgcagacttcggattcgctcggtacctccacagcaacatgatggccgcaaccctgtgtggcagtccaatgtacatggcccctgaagtcattatgagtcagcactatgacgccaaagctgatctctggtccattggaacagtaatctaccagtgcctcgtcggtaagcctccatttcaggctaactcgcctcaggatcttaggatgttctatgagaaaaatcgcagcctcatgccaagtattccacgggaaacttccccatatctggcaaacctgctgctgggtcttctccagagaaaccagaaagaccgaatggacttcgaggcgttcttcagtcatccttttctggagcaggggccagtgaaaaagtcatgccccgtgccagtccctatgtattctggaagtgtgtctggctcctcatgtggcagcagcccttcttgtcgctttgcgtctcctccctcattaccagacatgcagcacattcaggaagagaacctcagttctccaccactgggcccccccaactatcttcaggtgtctaaagattcagcatccacttcgtctaaaaactcctcctgcgacactgacgacttcgtgcttgtcccacataatatcagctcagatcatagttgtgacatgcctgtgggcactgccggaaggagggccagcaatgaattcctggtgtgcgggggacagtgtcagcctacagtgagcccacatagcgaaaccgctcctatccccgtgccgacccagataagaaactatcaacgaatagagcagaatcttacatcaacagcaagctccgggaccaatgtccatggaagcccccgatccgctgtagtccggcgctcgaatactagtccaatgggcttcctccgcccggggagctgtagtcctgtccctgccgacacagcgcagaccgtgggaagacgactgagcacggggtcttcgaggccttatagtccaagcccacttgtgggcaccatccctgagcagttttctcagtgttgttgcggccatccacagggccatgattccagatccagaaatagcagcgggagccccgtgccccaggcccagagccctcagtcattactcagcggggctagactacagagcgctccgacgctgactgacatttaccagaacaaacaaaaattgcgaaagcagcatagtgacccagtttgtccaagtcacacgggtgctggatatagttactcccctcagccatcacggcccggtagcttgggaaccagtcctactaaacatctgggctcatcgccccgatcaagtgattggttcttcaagacccctctgcccacaatcatcgggagtccgacaaagaccaccgccccgtttaaaatccccaaaacccaagcatccagtaacctgttggcgctggtaactagacacgggcccgcggaggaacagagtaaggacggcaatgagccgagagagtgtgcacactgcctcttagtgcagggttcagaaaggcagcgagccgaacagcaatcgaaggcggtgtttgggagaagtgtttcaacgggcaagctttctgatcagcagggaaaaacccctatatgtcgtcatcaaggttccactgacagtctgaataccgagcgaccgatggatatagctccagccggagcctgtggaggcgtattagcaccgccggccggaaccgccgcttccagcaaagcagtcctctttactgtcggtagtcctccacatagtgcagccgccccgacctgtacgcacatgttcctccgtacccgcactacgtccgtgggtccctcaaattccggtgggtcactgtgcgccatgtccggcagggtctgcgttggaagtcctccaggaccaggctttggatcttcccctcctggcgcagaggccgctccctctcttcgatacgtgccatacggggcctctccacccagcctcgaagggttaattacctttgaagcgcctgagctgcccgaggagaccctgatggagagagagcataccgacacactccgccacctaaatgtgatgcttatgtttacagaatgtgttcttgatctcaccgcaatgcggggcggtaacccagagctttgcacctcagcagtttcattgtaccagatacaggagtctgtggtggtcgaccagatctcacagctgtccaaggactggggccgagttgaacagcttgtcctgtacatgaaggccgcccaactgctggcagcaagcctgcatctcgctaaagctcagatcaaatctggtaagctgtccccctcaaccgccgtgaagcaggtggtgaagaacctgaacgagaggtacaagttttgtatcaccatgtgtaagaaactgactgagaagctgaaccggtttttctcagataaacaaagattcattgacgagattaattcggtcactgcagaaaagctcatatacaactgtgcagtggagatggtgcagtctgccgccctcgacgaaatgttccagcagactgaggacattgtctatcgttatcacaaggccgccctgctgcttgagggactctcccggatcctgcaggatcccgcagacatcgagaatgtgcataagtacaagtgctccatcgagagacgtctctccgctctctgccattccacagccaccgtctag

SEQ ID NO: 54279 - DNA, 3111 bp, Artificial Sequence
  derived and/or modified sequence
atggaggtggtgggcgacttcgagtacagcaagcgggacctggtgggacacggagctttcgctgtcgtgtttaggggcaggcaccgacagaagaccgattgggaagtggcgatcaagtcaattaataagaagaatctgagcaaaagtcaaatacttttgggaaaggagattaagatcctgaaggaactccaacacgaaaatattgtggccctctatgacgtgcaagagctccccaatagcgtgtttctggtcatggagtattgtaacggtggtgacttagccgactacctccaagctaaaggtacactgtctgaagacaccatcagggtgtttctgcatcagatcgctgcagctatgcggatcttgcattcaaagggcatcattcatagggaccttaagccccagaatatcttgctgtcatacgcaaacaggagaaagagtagtgtgagcggaatccgcatcaaaatcgcagacttcgggttcgcccggtatctgcatagcaatatgatggcagccacactctgtggatctcccatgtatatggcaccggaggtgattatgtctcagcattacgatgctaaggctgatttatggagtattggtacggtgatttaccagtgcttagtagggaaacctccttttcaggcaaacagcccccaggatttgcgcatgttctacgaaaagaaccgctctctcatgccgagtattccacgcgagacgagcccctatcttgctaacctgctgctggggcttcttcaaagaaaccagaaagatagaatggatttcgaagctttctttagtcacccgttcctggagcaaggtccggtaaaaaagtcgtgtcccgttcctgtgcctatgtatagtggcagcgtgtcaggcagtagttgtggcagctccccctcatgccgattcgcgtccccaccctccttacctgacatgcagcacattcaggaggagaatctgtcctcgccacccctgggccctccaaattatctgcaagtgtccaaagactctgcgtctaccagttcaaaaaactcgtcttgtgatacagacgacttcgttctcgtgccgcataacatcagttccgaccacagctgtgatatgccagtggggacggctggtcgcagggcttctaacgaattcctggtgtgcgggggccagtgccagccgaccgtgtcacctcacagtgagactgcgccaattcctgtgcccactcagatcagaaactaccagagaattgaacagaatctcacatccacggcctcctcaggaactaatgtacatgggtccccccgctccgccgtggttagacgctcaaatacttcgcctatgggattcctccgcccgggcagctgtagccctgtcccagccgatacagctcaaacagtgggtcgcaggctgagcacagggtcatcaagaccttactcaccctcacccctggtgggcaccataccagagcagttctcacagtgctgttgcggacatccccaaggccatgattcgagatcaaggaattcttctgggtcacccgtgccccaggcccagtctcctcagtctctgcttagcggagctagactgcagtccgctccaaccctgactgacatataccagaacaagcaaaaactcaggaagcagcactccgatcccgtatgcccctcccacacaggggccgggtacagttacagtccccagccttctaggcctggctctcttggaacctcacctactaagcatctgggctcctcccctaggtctagtgactggttttttaaaacccccttacctaccattattgggagccctaccaaaacaaccgccccctttaagataccaaaaacacaggcttccagtaacctccttgcattagtgactcggcacgggccggcagaggagcaatcaaaggacggcaacgaaccccgggaatgtgcacactgtctcctggttcaggggagtgaaaggcaaagggcagaacagcaatccaaagcagttttcggacggtcagtgtcaaccggaaagctgtcagaccagcaggggaaaaccccgatttgccgccatcagggatcgaccgattcactgaacactgaacggcctatggatatcgcccctgccggcgcatgcggaggcgtcctcgccccacctgccggaaccgctgcatcgtccaaggcggtactgttcacagtgggctcccctccgcattccgccgccgccccaacttgcacccatatgtttctgcggacccgtacaacctccgtgggaccatcaaacagcggcggctcactatgtgcaatgagcggcagagtttgtgtcgggagcccgccagggccgggattcgggagcagcccccccggcgccgaggccgcaccatccttacgctatgtcccatacggcgcttcccccccgtctttagagggactaatcaccttcgaggccccagagctcccagaggagacattgatggagagggagcacactgataccctccggcacctgaacgtcatgctcatgtttaccgagtgcgtgctggacctcaccgcgatgcgaggcggcaaccccgagttgtgtacttcagccgtgagcctgtaccagatacaggaatccgttgtagtggatcaaatctcgcagctgtcaaaggattggggacgggtagaacagcttgttctctatatgaaagccgcccaactgctggctgcttctctgcatctagctaaggcgcagatcaagtctggcaagctgagcccgagcactgctgtgaagcaggttgtgaagaacctcaacgagagatacaagttttgcatcacaatgtgtaaaaagttaacagaaaagctcaatagattttttagcgataagcagcgcttcatcgatgaaattaatagcgtaaccgcagaaaaactcatctacaattgcgctgtcgaaatggtgcaatccgctgcactcgatgagatgttccaacagactgaagacattgtgtacagatatcacaaggccgcactcctactggaaggcctgtctcggatcttacaggaccctgccgatatcgagaatgtgcataagtataagtgcagcatagaaaggcgcctctctgctctgtgtcactcaacggccaccgtgtag

SEQ ID NO: 54280 - DNA, 3111 bp, Artificial Sequence
  derived and/or modified sequence
atggaggtcgtcggcgatttcgagtactcaaaacgggacctggtcgggcacggcgcatttgctgtggtatttagagggagacaccgccaaaagacggattgggaagtagccatcaagagcattaataaaaagaatttgtctaaatctcagatacttcttgggaaggagatcaagattttaaaggagttgcagcacgagaacatcgtggcactatatgatgttcaggagctcccgaattcagtgttcctggtcatggaatactgtaacggtggcgatctagccgactatctgcaggccaaaggcacgctgtcagaagataccatccgggtatttttgcatcagattgctgcggctatgaggatactacacagcaagggcattattcaccgtgacctgaaaccccagaatatcctgctgtcctacgcgaatcgccgtaaatcttctgtaagcggaatccggatcaagattgctgactttggcttcgcgagatatctccacagtaacatgatggctgccactctttgcggttcacccatgtatatggctcctgaggttattatgtcacagcactacgacgcgaaagctgacttgtggtccatcggaactgtgatctatcagtgcctagtcggtaagccaccttttcaggcaaactccccacaggacctgcgcatgttttacgagaagaacagaagccttatgccctccattccgcgtgagacatccccctacctggccaacctcctcttaggcctgctgcagcgaaaccaaaaagatagaatggattttgaggcattcttttcccacccattcctggagcagggcccagtgaagaaaagttgccccgtacctgtccccatgtacagtggcagcgtatcaggatccagttgcggatcttctccgtcctgtcggtttgcaagtcctccttccttgcctgatatgcagcacatccaggaagagaatttatccagccccccactgggaccaccaaattatctccaggtgtcgaaagattctgcttctacgtccagcaagaattcatcctgtgatacagatgactttgtgcttgtcccacacaatatctcctccgaccactcctgcgatatgcctgtgggaaccgcgggacggagggccagtaacgagtttctcgtctgcggcggtcaatgtcaacctactgtcagccctcacagtgagacagcccctatcccagtgcctacacaaatcaggaactatcagaggattgaacaaaacctgacatcaacggccagcagtggcactaacgtgcatggatctcccaggtctgctgtggtccgcaggtcaaatacatccccaatggggtttctgagacccggttcttgcagcccagtccccgctgacacagcccagaccgtgggacgtagactgtcgaccgggtcatctagaccgtatagcccatcgccattagtgggcacgatccctgaacagttctcccagtgctgttgcgggcacccccaggggcacgatagccgatccaggaattcctccggctcccctgtgccacaggctcagtccccacaatctctcttaagcggcgcacggttgcaatctgctcccactctgacagatatttaccagaacaaacaaaagctgagaaagcagcacagtgacccggtctgtccaagtcacactggagccggatatagctacagccctcaacctagcagaccgggatctctgggcacaagtcccaccaaacacctgggcagttctccccgttcaagtgattggttttttaagacccccctccctaccatcatcggatctcccacgaaaactaccgcgcctttcaaaatccccaaaactcaagctagctctaacttgttggctctagtgactcgccacggccctgctgaggagcaatctaaagacggaaacgaaccacgcgaatgcgctcattgcctgctcgtccaggggagcgaaagacagagagcagaacaacagtccaaggccgtatttggcagaagcgtcagcacaggaaaactttccgatcaacaggggaaaacccctatatgtagacaccaaggaagcacagattctctgaacacagaacgcccaatggatattgctcccgctggcgcttgtggcggtgtgttggccccaccagcgggtactgcggcttcgagcaaagccgtgctatttaccgtaggcagtcccccacacagtgccgcagctccaacctgcacgcacatgtttttgcggaccaggaccacttccgtgggcccttctaatagtgggggatcattatgtgccatgtcaggacgagtgtgtgttgggagtccacccggacctggctttggttcctcgccacctggagcagaggcggcaccttccttgcgctatgtgccgtatggagcgtctcctccttctttggaagggctgatcactttcgaggctcccgaactgcctgaggagactctgatggagcgggagcacaccgatacactccgccatcttaatgtgatgctgatgttcaccgagtgtgtactagatctgactgccatgaggggtggtaatcccgaattatgtacgtctgcagtcagtctctaccagatccaagaatcagtcgtggtggatcagatctcccagctgtctaaagactggggaagagtggagcagcttgtcctgtacatgaaggctgcgcaattgctcgccgcatctttgcacctggccaaagctcagattaaatcaggcaagctcagcccgagcacagccgtgaagcaggttgtgaagaatctcaatgagaggtacaaattttgtattacgatgtgcaaaaagctcacagaaaagctgaatcggttctttagcgacaaacagcggtttatcgacgagatcaacagcgtgactgctgaaaagctaatctataattgcgcagtggaaatggtgcagagcgccgctctagatgagatgttccaacaaacagaagacatcgtgtatagataccataaggcggcactgcttctcgaagggctttccagaatcctgcaggatcctgccgatattgagaatgtgcacaaatacaaatgcagcatcgagaggagactgagcgccctttgtcactctactgctaccgtctag

SEQ ID NO: 54281 - DNA, 3111 bp, Artificial Sequence
  derived and/or modified sequence
atggaggtggtgggtgattttgaatattccaagcgggatttagtagggcacggtgcatttgcagtagtcttcagaggcagacaccgccagaagacagattgggaggttgcaatcaagagcatcaataagaaaaatttatcaaagagccagattctactcgggaaggagattaaaatcctgaaggaattgcaacatgaaaatatagtggccctgtacgatgtccaagagctgcctaactctgtcttcctggtgatggagtactgcaacggtggtgatttggccgactacctccaggcaaagggtaccctgtcagaagacaccatacgggtgtttctacatcagattgcagctgcgatgagaatcctgcacagcaagggaatcattcatagagacttgaaaccgcagaatatcctgttatcatacgcaaatagaagaaagagctccgtttccggaatacgtattaagattgccgatttcgggttcgcgaggtacttgcattccaacatgatggccgctactctgtgcgggtctccaatgtacatggcgcctgaggtcataatgagtcaacactacgatgccaaggcagatctgtggtcaatcgggaccgtgatttaccagtgtttagtggggaaaccaccctttcaagcgaactctccacaggacctgagaatgttttatgaaaaaaaccggagcctgatgccctcaatacctagggaaacgagtccctacctcgctaacttgcttctggggctactacaacgcaatcaaaaggacaggatggactttgaagccttctttagtcacccttttctggaacagggtcctgtgaagaagtcatgtcctgtgccagtacccatgtatagcgggtctgtatccggctctagctgcggttcctcccctagttgtcgatttgcctcccctccttccttgcccgacatgcagcatatccaggaagagaatttaagttcccctcccttgggcccacctaattaccttcaggtgtctaaggactccgcctccaccagctccaagaactccagctgtgacacagacgacttcgtcctggtcccccataatatctcctctgaccacagctgcgatatgccagttggcaccgccggaagaagagcctcaaacgagttcctggtgtgtgggggacagtgccagcctaccgtgtctcctcatagcgagaccgctccaataccagtccctacccagatccgaaattaccagaggatcgaacaaaacctgacttctacagcttctagcggcaccaatgtgcacggaagccctcggtccgcagttgtgaggaggagtaatactagtcccatgggattcctcagaccaggttcatgtagtccggtcccagccgataccgcgcagacggttggcagacgactctcgacagggtcctccagaccctactctccaagccccctggtaggtacaatcccggaacagttctcacagtgctgctgtggccacccgcagggccatgattctaggagcagaaatagttctggcagtccggtgcctcaggcccagagtccacagtccctgctgtctggggctcggctccagtcagcccctactcttactgacatttaccaaaataaacagaagctgcggaagcagcacagcgacccagtatgcccctctcacacaggggctggttatagctatagtccccagccaagccggccaggctccctggggacctctccaacaaaacatctggggagctcacctcggagctctgattggttcttcaaaacccccctgcctactattatcggctctccaactaaaactacagcaccgttcaagatcccaaagactcaggctagctccaatctgcttgccctagtgacgcgacatggacctgcagaggagcagtccaaggatggaaatgaacccagggaatgcgctcattgtttgctcgtgcaaggcagtgagcgtcagagggcggagcaacaaagcaaggcagtctttggtcgatctgtgtcaactggcaagctgtcagaccagcagggaaagacaccaatttgccggcatcaggggtctacagactcgctgaatacagaaagacctatggacatagctcccgctggggcttgcggcggtgtcctggccccacctgccggaaccgccgcaagttccaaagccgtcctctttaccgttggcagcccccctcactccgcagcagcacccacctgtacacacatgttcctgcgcacccgtaccacctccgtgggtcccagcaatagcggtgggtcactttgcgctatgagcgggagagtgtgtgtaggcagtcctcctgggccaggctttggctcatcaccccctggggcagaagctgcaccctctctacgttatgttccttacggggcatctcctccctctctagaaggactgatcacattcgaggccccagaactcccagaagagactctgatggaacgggaacacacagacacattgcgtcacctcaacgttatgctcatgttcactgaatgtgtgttagatctgaccgctatgaggggtggcaacccagagctttgcacaagtgccgtttccctgtatcagattcaggagtccgtggtggtcgatcagatcagccagctgtctaaggactggggacgagtcgagcagctcgtgttgtacatgaaggctgcgcagctccttgccgcatctctgcacctcgccaaagcacagatcaaaagtggtaaacttagccccagtactgctgttaaacaagttgtgaaaaatctgaatgagcgctataaattttgcataaccatgtgcaaaaaacttaccgagaaactgaatcgctttttctccgacaagcagcgatttatcgatgaaattaatagtgtaactgccgaaaagttgatctacaactgcgcagtggaaatggtacaatcagcggcactggatgagatgtttcaacagaccgaagatattgtgtataggtaccataaggctgcactcctgctggagggtctctctagaatcctgcaggatcccgctgatatagagaatgtacataagtacaagtgttctatcgaacggcgtctctctgcactatgtcattcgactgccactgtctag

SEQ ID NO: 54282 - DNA, 3908 bp, Artificial Sequence
  derived and/or modified sequence
agtcgcgcgggagcgggtagcgcgcgcgagggcgttgggcgccgccgcgaggcggggaagcgcggggccgcggcggtgcgggttctagggcggcggccgtcgccgtcgcagcagcgccccgagcggggagggccgaggaggcccgacgagctggggatggagagtaccgggcccctcactgcctcagagcgcgtgtgcggctctgggcgcgcacagtgacggtgacggcacccctggcccggcagcgccgaggccgcttcgccagacagccagcggccggcggcaggccgggccatgagcggcaggggccgggccgggcctcgctgaccctggctccgcgcggcagcttccccagtttccgctccggtctctcggcatgagagtccgcccgggcccggggctgcggctgccccagacccgccgcacgctggcgcgctccgggcccgcggagccgcggtgctgatacctgcgccgcactgcgccgcccgcccgtccgctgtgtgccccgggggcgcggccatggaggtggtgggtgacttcgagtacagcaagagggatctcgtgggacacggggccttcgccgtggtcttccgggggcggcaccgccagaaaactgattgggaggtagctattaaaagtattaataaaaagaacttgtcaaaatcacaaatactgcttggaaaggaaattaaaatcttaaaggaacttcagcatgaaaatattgtagcactctatgatgttcaggaattacccaactctgtctttttggtgatggagtattgcaatggtggagacctcgcagattatttgcaagcgaaagggactctcagtgaagacacgatcagagtgtttctgcatcagattgctgctgccatgcgaatcctgcacagcaaaggaatcatccacagagatctcaaaccacagaacatcttgctgtcctatgccaatcgcagaaaatcaagtgtcagtggtattcgcatcaaaatagcggattttggttttgctcgttacctacatagtaacatgatggctgcaacactgtgtggatccccgatgtacatggctcctgaggttattatgtctcaacattatgatgctaaggctgacttgtggagcataggaacagtgatataccaatgcctagttggaaaaccaccttttcaggccaatagtcctcaagacttaaggatgttttatgaaaaaaacaggagcttaatgcctagtattcccagagaaacatcaccttatttggctaatctccttttgggtttgcttcagagaaaccaaaaagatagaatggactttgaagcattttttagccatccttttcttgagcaaggtccagtaaaaaaatcttgcccagttccagtgcccatgtattctggttctgtctctggaagctcctgtggcagctctccatcttgtcgttttgcttctccaccatcccttccagatatgcagcatattcaggaagaaaacttatcttccccaccattgggtcctcccaactatctacaagtttccaaagattctgccagtactagtagcaagaactcttcttgtgacacggatgactttgttttggtgccacacaacatctcgtcagaccactcatgtgatatgccagtggggactgctggcagacgtgcttcaaatgaattcttggtgtgtggagggcagtgtcagcctactgtgtcacctcacagcgaaacagcaccaattccagttcctactcaaataaggaattatcagcgcatagagcagaatcttacatctactgccagctcaggcacaaatgtacatggttctccaagatctgcagtggtacgaaggtccaacaccagccccatgggcttcctccggccgggatcatgctccccagtaccagcagacacagcacagacagttggacgaaggctctccactgggtcttctaggccttactcaccttcccctttggttggtaccattcctgagcaattcagtcagtgctgctgtgggcatcctcagggccatgactccaggagtagaaactcctcaggttctccagtgccacaagctcagtccccacagtctctcttatcgggtgctagactgcagagcgcccccaccctcactgacatctatcagaacaagcagaagctcagaaaacagcactctgaccccgtgtgcccatcccatactggggctgggtacagctactcgcctcagcccagtcggcctggcagccttggaacttctcccaccaagcacttggggtcctctccacggagttctgactggttctttaaaactcctttgccaacaatcattggctctcctactaagaccacagctcctttcaaaatccctaaaactcaagcatcttccaacctgttagccttggttactcgtcatgggcctgctgaagaacagtcgaaagatgggaatgagccacgggaatgtgcccattgcctcttagtgcaaggaagtgagaggcagcgggccgagcagcagagcaaggcagtgtttggcagatctgtcagtaccgggaagttatcagatcaacaaggaaagactcctatatgtcgacatcagggcagcacagacagtttaaatacagaacgaccaatggatatagctccggcaggagcctgtggtggtgttctggcacctcctgcaggtacagcagcaagttccaaggctgtcctcttcactgtagggtctcctccacacagtgcggcagcccccacttgtacccacatgttccttcgaacaagaacaacctcagtggggcccagcaactccgggggctctctttgtgccatgagtggccgcgtgtgcgtggggtccccgcctggcccaggcttcggctcttcccctccaggagcagaggcagctcccagcctgagatacgtgccttacggtgcttcaccccccagcctagaggggctcatcacctttgaagcccctgaactgccggaggagacgctgatggagcgggaacacacagacaccttacgccatctgaatgtgatgctgatgttcactgagtgtgtgctggacctgacagccatgaggggaggaaaccctgagctgtgcacatctgctgtgtccttgtaccagatccaggagagtgtggtggtggaccagatcagtcagctgagcaaagactgggggcgggtggagcagctggtgttgtacatgaaagcagcacagctgcttgcggcttctctgcatcttgccaaagcccagatcaagtccgggaaactgagcccatccacagctgtgaaacaagttgtcaagaatctgaacgaacgatataaattctgcatcaccatgtgcaagaaacttacagaaaagctgaatcgattcttctctgacaaacagaggtttattgatgaaatcaacagtgtgactgcagagaaactcatctataattgtgctgtagaaatggttcagtctgcagccctggatgagatgtttcagcagaccgaagatattgtttatcgctatcataaggcagcccttcttttggaaggcctaagtaggattctacaggaccctgcagatattgaaaatgtgcataaatataaatgtagtattgagagaagactgtcggcgctctgccatagcaccgcaaccgtgtgagcagcaggctcatcccgtggaccggtggtgggaacgtgaggaagaggggaaggaaggaagagcttttccatttggtgctccaatgtctcctgctggacccatctgcctagtggaaggcagcaaaatttcaagaaacaggtgaggttgagcagcttggtgcaaccccatggggcctggagttggagctcaacagcaatggatttcagagaccaccctgaaactcccagtaaaaaagacttgggagacatgttaataaactcaagcatttgatcgaccca

SEQ ID NO: 54283 - DNA, 5809 bp, Artificial Sequence
  derived and/or modified sequence
gcgcgcgcgagggcgttgggcgccgccgcgaggcggggaagcgcggggccgcggcggtgcgggttctagggcggcggccgtcgccgtcgcagcagcgccccgagcggggagggccgaggaggcccgacgagctggggatggagagtaccgggcccctcactgcctcagagcgcgtgtgcggctctgggcgcgcacagtgacggtgacggcacccctggcccggcagcgccgaggccgcttcgccagacagccagcggccggcggcaggccgggccatgagcggcaggggccgggccgggcctcgctgaccctggctccgcgcggcagcttccccagtttccgctccggtctctcggcatgagagtccgcccgggcccggggctgcggctgccccagacccgccgcacgctggcgcgctccgggcccgcggagccgcggtgctgatacctgcgccgcactgcgccgcccgcccgtccgctgtgtgccccgggggcgcggccatggaggtggtgggtgacttcgagtacagcaagagggatctcgtgggacacggggccttcgccgtggtcttccgggggcggcaccgccagaaaactgattgggaggtagctattaaaagtattaataaaaagaacttgtcaaaatcacaaatactgcttggaaaggaaattaaaatcttaaaggaacttcagcatgaaaatattgtagcactctatgatgttcaggaattacccaactctgtctttttggtgatggagtattgcaatggtggagacctcgcagattatttgcaagcgaaagggactctcagtgaagacacgatcagagtgtttctgcatcagattgctgctgccatgcgaatcctgcacagcaaaggaatcatccacagagatctcaaaccacagaacatcttgctgtcctatgccaatcgcagaaaatcaagtgtcagtggtattcgcatcaaaatagcggattttggttttgctcgttacctacatagtaacatgatggctgcaacactgtgtggatccccgatgtacatggctcctgaggttattatgtctcaacattatgatgctaaggctgacttgtggagcataggaacagtgatataccaatgcctagttggaaaaccaccttttcaggccaatagtcctcaagacttaaggatgttttatgaaaaaaacaggagcttaatgcctagtattcccagagaaacatcaccttatttggctaatctccttttgggtttgcttcagagaaaccaaaaagatagaatggactttgaagcattttttagccatccttttcttgagcaaggtccagtaaaaaaatcttgcccagttccagtgcccatgtattctggttctgtctctggaagctcctgtggcagctctccatcttgtcgttttgcttctccaccatcccttccagatatgcagcatattcaggaagaaaacttatcttccccaccattgggtcctcccaactatctacaagtttccaaagattctgccagtactagtagcaagaactcttcttgtgacacggatgactttgttttggtgccacacaacatctcgtcagaccactcatgtgatatgccagtggggactgctggcagacgtgcttcaaatgaattcttggtgtgtggagggcagtgtcagcctactgtgtcacctcacagcgaaacagcaccaattccagttcctactcaaataaggaattatcagcgcatagagcagaatcttacatctactgccagctcaggcacaaatgtacatggttctccaagatctgcagtggtacgaaggtccaacaccagccccatgggcttcctccggccgggatcatgctccccagtaccagcagacacagcacagacagttggacgaaggctctccactgggtcttctaggccttactcaccttcccctttggttggtaccattcctgagcaattcagtcagtgctgctgtgggcatcctcagggccatgactccaggagtagaaactcctcaggttctccagtgccacaagctcagtccccacagtctctcttatcgggtgctagactgcagagcgcccccaccctcactgacatctatcagaacaagcagaagctcagaaaacagcactctgaccccgtgtgcccatcccatactggggctgggtacagctactcgcctcagcccagtcggcctggcagccttggaacttctcccaccaagcacttggggtcctctccacggagttctgactggttctttaaaactcctttgccaacaatcattggctctcctactaagaccacagctcctttcaaaatccctaaaactcaagcatcttccaacctgttagccttggttactcgtcatgggcctgctgaagaacagtcgaaagatgggaatgagccacgggaatgtgcccattgcctcttagtgcaaggaagtgagaggcagcgggccgagcagcagagcaaggcagtgtttggcagatctgtcagtaccgggaagttatcagatcaacaaggaaagactcctatatgtcgacatcagggcagcacagacagtttaaatacagaacgaccaatggatatagctccggcaggagcctgtggtggtgttctggcacctcctgcaggtacagcagcaagttccaaggctgtcctcttcactgtagggtctcctccacacagtgcggcagcccccacttgtacccacatgttccttcgaacaagaacaacctcagtggggcccagcaactccgggggctctctttgtgccatgagtggccgcgtgtgcgtggggtccccgcctggcccaggcttcggctcttcccctccaggagcagaggcagctcccagcctgagatacgtgccttacggtgcttcaccccccagcctagaggggctcatcacctttgaagcccctgaactgccggaggagacgctgatggagcgggaacacacagacaccttacgccatctgaatgtgatgctgatgttcactgagtgtgtgctggacctgacagccatgaggggaggaaaccctgagctgtgcacatctgctgtgtccttgtaccagatccaggagagtgtggtggtggaccagatcagtcagctgagcaaagactgggggcgggtggagcagctggtgttgtacatgaaagcagcacagctgcttgcggcttctctgcatcttgccaaagcccagatcaagtccgggaaactgagcccatccacagctgtgaaacaagttgtcaagaatctgaacgaacgatataaattctgcatcaccatgtgcaagaaacttacagaaaagctgaatcgattcttctctgacaaacagaggtttattgatgaaatcaacagtgtgactgcagagaaactcatctataattgtgctgtagaaatggttcagtctgcagccctggatgagatgtttcagcagaccgaagatattgtttatcgctatcataaggcagcccttcttttggaaggcctaagtaggattctacaggaccctgcagatattgaaaatgtgcataaatataaatgtagtattgagagaagactgtcggcgctctgccatagcaccgcaaccgtgtgagcagcaggctcatcccgtggaccggtggtgggaacgtgaggtgatgcctttgggattacagcttgagttctgtcaccccatccccaggaaactgtagcttcttaactggtgactaccaaagaacaagcagtgatttgaaaaaggaaaaacaatccaaaaactacatatttgtaggaaatctgccttattggagaaaatcaccctttccctttttctttgtagaagcaggagcaagagtgtttggctcccagtttggacttggtgaataaatgtaccttagaactaggataatcggtacagttattcttaaagataattaaaaatgaaacaaagtgagtgctcgtcactgggttcatcagagcagtgtgtgaaattccatgtgtttgctgaggtgtaaaggtaaatgtattcacccctcatccaggcagtttgatatttggagtaagtttgtttaaatctgagcatgcatctttaaacagctcaggaagaaatagcttaagaagaagtgaaacatggatcttggaagaaattttgaaatcttcaatttgatcctaatatggatacatgttaatcttccaaaatctttcatattgcactaatttattaaaacaactgtgtattggattttgtaatttaactaaggcacaatggacttgtttaaaatattttacttgattgtatacatagaccctttccagaattcacatgtaatctccagtgaacttttaagtggttaaaacttgtattcatgtgaacctttgcacattttttttttttacttctttatctacacctacagattttctcagtaatgtttttgttagcttttggttccattttttattgtgcatgcagaatgtacattgatgcctgtgaccttaggtttattaaaggctaggtttatttgggcagtattagaaacaaaatcatggatcaagagatactcttgataatttgaatagggccaaaacaaagttggtgacctaaaggcttgttagtgatgtggagttcctacatgcagtgagtggaaaatgaagttcgttttctcttaggaaaatgggcagctgtcttctgcctaatgtgtatttttcatgttaattctgacagttcaccaaatagctagtcatggagaatgcaggcagttaacttaatatccctccaggaatggttcctacgttgtgtattacttggtttcttttacttacctgcttgaatacttgaataaaccattcaccaattttaatccttttattttaatccttttacataaaataatctgaactctttgacaaattgcacagagctctttggcattaatctaattttaatgtactgataaaaacaaacatggttttcctttactttgacaaagtaatgtaatttttaccttatttatctgtatgaaattccagtagttaatttgaacatttatttatatgacgtttgtatttttaggtctttaatacagtgtttctacctctcatttgtaactgcatgcattattcttgaaactaggtaaaactcactgaattgttgtgtaatagcctttttattattgcctgtacaaatgtatattaaggtaaaataaaactgacaaagtgtttctagggtgtagctgggtacatattaagtggcttgttgagccaggtacttccttagtgagtttagagacttggccatgaatatcctttgtcctgccccaggatttagatcttggctactgtcatgcaggcttccaggaacatagactgttttacctccacaaccctatttgttattagtgatactttattttatataatattttttattcacagtgaaatttcattcatgttctttcagttatcacctgtgttatctcagttgtaggtttattctatcctctcctcttcctctcccatttcttttttaagacaggatgaaacaggttcagagaggggaagtgattggcctaaagtcaggaactaggcaagtggtcaagccatgctttgtgactttcaagttaattcttcttgttcttgtatattaaaggtcttggggtagatggtgtgtgtgaaacagtgaagtctcaacagcagaaaagaacaaaatgtaaattcatgaataatggttctggttatacttccattatcaaggctaattaagagattttgccttgagtatagcaataataaacaaatgctttatgtttccctgag

SEQ ID NO: 54284 - protein, 1160 aa, Artificial Sequence
  derived and/or modified sequence
MASVWKRLQRVGKHASKFQFVASYQELMVECTKKWQPDKLVVVWTRRSRRKSSKAHSWQPGIKNPYRGVVVWPVPENIEITVTLFKDPHAEEFEDKEWTFVIENESPSGRRKALATSSINMKQYASPMPTQTDVKLKFKPLSKKVVSAALQFSLSCIFLREGKATDEDMQSLASLMSMKQADIGNLDDFEEDNEDDDENRVNQEEKAAKITELINKLNFLDEAEKDLATVNSNPFDDPDAAELNPFGDPDSEEPITETASPRKTEDSFYNNSYNPFKEVQTPQYLNPFDEPEAFVTIKDSPPQSTKRKNIRPVDMSKYLYADSSKTEEEELDESNPFYEPKSTPPPNNLVNPVQELETERRVKRKAPAPPVLSPKTGVLNENTVSAGKDLSTSPKPSPIPSPVLGRKPNASQSLLVWCKEVTKNYRGVKITNFTTSWRNGLSFCAILHHFRPDLIDYKSLNPQDIKENNKKAYDGFASIGISRLLEPSDMVLLAIPDKLTVMTYLYQIRAHFSGQELNVVQIEENSSKSTYKVGNYETDTNSSVDQEKFYAELSDLKREPELQQPISGAVDFLSQDDSVFVNDSGVGESESEHQTPDDHLSPSTASPYCRRTKSDTEPQKSQQSSGRTSGSDDPGICSNTDSTQAQVLLGKKRLLKAETLELSDLYVSDKKKDMSPPFICEETDEQKLQTLDIGSNLEKEKLENSRSLECRSDPESPIKKTSLSPTSKLGYSYSRDLDLAKKKHASLRQTESDPDADRTTLNHADHSSKIVQHRLLSRQEELKERARVLLEQARRDAALKAGNKHNTNTATPFCNRQLSDQQDEERRRQLRERARQLIAEARSGVKMSELPSYGEMAAEKLKERSKASGEQNSKLVDLKLKKLLEVQPQVANSPSSAAQKAVTESSEQDMKSGTEDLRTERLQKTTERFRNPVVFSKDSTVRKTQLQSFSQYIENRPEMKRQRSIQEDTKKGNEEKAAITETQRKPSEDEVLNKGFKDTSQYVVGELAALENEQKQIDTRAALVEKRLRYLMDTGRNTEEEEAMMQEWFMLVNKKNALIRRMNQLSLLEKEHDLERRYELLNRELRAMLAIEDWQKTEAQKRREQLLLDELVALVNKRDALVRDLDAQEKQAEEEDEHLERTLEQNKGKMAKKEEKCVLQ

SEQ ID NO: 54285 - protein, 310 aa, Artificial Sequence
  derived and/or modified sequence
MASVWKRLQRVGKHASKFQFVASYQELMVECTKKWQPDKLVVVWTRRSRRKSSKAHSWQPGIKNPYRGVVVWPVPENIEITVTLFKDPHAEEFEDKEWTFVIENESPSGRRKALATSSINMKQYASPMPTQTDVKLKFKPLSKKVVSAALQFSLSCIFLREGKATDEDMQSLASLMSMKQADIGNLDDFEEDNEDDDENRVNQEEKAAKITELINKLNFLDEAEKDLATVNSNPFDDPDAAELNPFGDPDSEEPITETASPRKTEDSFYNNSYNPFKEVQTPQYLNPFDEPEAFVTIKDSPPQSTKRKNI

SEQ ID NO: 54286 - DNA, 3483 bp, Artificial Sequence
  derived and/or modified sequence
atggccagcgtgtggaagagactgcagagagtgggcaagcacgccagcaagttccagttcgtggccagctaccaggagctgatggtggagtgcaccaagaagtggcagcccgacaagctggtggtggtgtggaccagaagaagcagaagaaagagcagcaaggcccacagctggcagcccggcatcaagaacccctacagaggcgtggtggtgtggcccgtgcccgagaacatcgagatcaccgtgaccctgttcaaggacccccacgccgaggagttcgaggacaaggagtggaccttcgtgatcgagaacgagagccccagcggcagaagaaaggccctggccaccagcagcatcaacatgaagcagtacgccagccccatgcccacccagaccgacgtgaagctgaagttcaagcccctgagcaagaaggtggtgagcgccgccctgcagttcagcctgagctgcatcttcctgagagagggcaaggccaccgacgaggacatgcagagcctggccagcctgatgagcatgaagcaggccgacatcggcaacctggacgacttcgaggaggacaacgaggacgacgacgagaacagagtgaaccaggaggagaaggccgccaagatcaccgagctgatcaacaagctgaacttcctggacgaggccgagaaggacctggccaccgtgaacagcaaccccttcgacgaccccgacgccgccgagctgaaccccttcggcgaccccgacagcgaggagcccatcaccgagaccgccagccccagaaagaccgaggacagcttctacaacaacagctacaaccccttcaaggaggtgcagaccccccagtacctgaaccccttcgacgagcccgaggccttcgtgaccatcaaggacagccccccccagagcaccaagagaaagaacatcagacccgtggacatgagcaagtacctgtacgccgacagcagcaagaccgaggaggaggagctggacgagagcaaccccttctacgagcccaagagcacccccccccccaacaacctggtgaaccccgtgcaggagctggagaccgagagaagagtgaagagaaaggcccccgccccccccgtgctgagccccaagaccggcgtgctgaacgagaacaccgtgagcgccggcaaggacctgagcaccagccccaagcccagccccatccccagccccgtgctgggcagaaagcccaacgccagccagagcctgctggtgtggtgcaaggaggtgaccaagaactacagaggcgtgaagatcaccaacttcaccaccagctggagaaacggcctgagcttctgcgccatcctgcaccacttcagacccgacctgatcgactacaagagcctgaacccccaggacatcaaggagaacaacaagaaggcctacgacggcttcgccagcatcggcatcagcagactgctggagcccagcgacatggtgctgctggccatccccgacaagctgaccgtgatgacctacctgtaccagatcagagcccacttcagcggccaggagctgaacgtggtgcagatcgaggagaacagcagcaagagcacctacaaggtgggcaactacgagaccgacaccaacagcagcgtggaccaggagaagttctacgccgagctgagcgacctgaagagagagcccgagctgcagcagcccatcagcggcgccgtggacttcctgagccaggacgacagcgtgttcgtgaacgacagcggcgtgggcgagagcgagagcgagcaccagacccccgacgaccacctgagccccagcaccgccagcccctactgcagaagaaccaagagcgacaccgagccccagaagagccagcagagcagcggcagaaccagcggcagcgacgaccccggcatctgcagcaacaccgacagcacccaggcccaggtgctgctgggcaagaagagactgctgaaggccgagaccctggagctgagcgacctgtacgtgagcgacaagaagaaggacatgagcccccccttcatctgcgaggagaccgacgagcagaagctgcagaccctggacatcggcagcaacctggagaaggagaagctggagaacagcagaagcctggagtgcagaagcgaccccgagagccccatcaagaagaccagcctgagccccaccagcaagctgggctacagctacagcagagacctggacctggccaagaagaagcacgccagcctgagacagaccgagagcgaccccgacgccgacagaaccaccctgaaccacgccgaccacagcagcaagatcgtgcagcacagactgctgagcagacaggaggagctgaaggagagagccagagtgctgctggagcaggccagaagagacgccgccctgaaggccggcaacaagcacaacaccaacaccgccacccccttctgcaacagacagctgagcgaccagcaggacgaggagagaagaagacagctgagagagagagccagacagctgatcgccgaggccagaagcggcgtgaagatgagcgagctgcccagctacggcgagatggccgccgagaagctgaaggagagaagcaaggccagcggcgagcagaacagcaagctggtggacctgaagctgaagaagctgctggaggtgcagccccaggtggccaacagccccagcagcgccgcccagaaggccgtgaccgagagcagcgagcaggacatgaagagcggcaccgaggacctgagaaccgagagactgcagaagaccaccgagagattcagaaaccccgtggtgttcagcaaggacagcaccgtgagaaagacccagctgcagagcttcagccagtacatcgagaacagacccgagatgaagagacagagaagcatccaggaggacaccaagaagggcaacgaggagaaggccgccatcaccgagacccagagaaagcccagcgaggacgaggtgctgaacaagggcttcaaggacaccagccagtacgtggtgggcgagctggccgccctggagaacgagcagaagcagatcgacaccagagccgccctggtggagaagagactgagatacctgatggacaccggcagaaacaccgaggaggaggaggccatgatgcaggagtggttcatgctggtgaacaagaagaacgccctgatcagaagaatgaaccagctgagcctgctggagaaggagcacgacctggagagaagatacgagctgctgaacagagagctgagagccatgctggccatcgaggactggcagaagaccgaggcccagaagagaagagagcagctgctgctggacgagctggtggccctggtgaacaagagagacgccctggtgagagacctggacgcccaggagaagcaggccgaggaggaggacgagcacctggagagaaccctggagcagaacaagggcaagatggccaagaaggaggagaagtgcgtgctgcagtag

SEQ ID NO: 54287 - DNA, 933 bp, Artificial Sequence
  derived and/or modified sequence
atggccagcgtgtggaagagactgcagagagtgggcaagcacgccagcaagttccagttcgtggccagctaccaggagctgatggtggagtgcaccaagaagtggcagcccgacaagctggtggtggtgtggaccagaagaagcagaagaaagagcagcaaggcccacagctggcagcccggcatcaagaacccctacagaggcgtggtggtgtggcccgtgcccgagaacatcgagatcaccgtgaccctgttcaaggacccccacgccgaggagttcgaggacaaggagtggaccttcgtgatcgagaacgagagccccagcggcagaagaaaggccctggccaccagcagcatcaacatgaagcagtacgccagccccatgcccacccagaccgacgtgaagctgaagttcaagcccctgagcaagaaggtggtgagcgccgccctgcagttcagcctgagctgcatcttcctgagagagggcaaggccaccgacgaggacatgcagagcctggccagcctgatgagcatgaagcaggccgacatcggcaacctggacgacttcgaggaggacaacgaggacgacgacgagaacagagtgaaccaggaggagaaggccgccaagatcaccgagctgatcaacaagctgaacttcctggacgaggccgagaaggacctggccaccgtgaacagcaaccccttcgacgaccccgacgccgccgagctgaaccccttcggcgaccccgacagcgaggagcccatcaccgagaccgccagccccagaaagaccgaggacagcttctacaacaacagctacaaccccttcaaggaggtgcagaccccccagtacctgaaccccttcgacgagcccgaggccttcgtgaccatcaaggacagccccccccagagcaccaagagaaagaacatctag

SEQ ID NO: 54288 - DNA, 4108 bp, Artificial Sequence
  derived and/or modified sequence
aactgggaggctccccagtttgtgggtaacatctgactctccctccccaaagagagactccagcgagagactggggatttggaggtccaagtcatggcagaactgggttgcttgctaggacacaaggttagcatgcccctgtagcagcaatgtgagaatcagaaaaggtgactgtgcatctcaagaagccgaatcaaaaagccaagccaaccacctaaccagtgattttcaagccctccagaatacccatcatatagcccctgaggtggcatggtgatgtctccatgagggaaccccttcccactcatcctgtcacgtatatcatagtgttcttgactgggccattcatctaagatgggatttaccctgtgaaacagggagaagacttatggaccccaagcatcatttcgagttgtagttgagtttttaaaagacatacatgcaaagttcctttgctttggaccctctgcattattaaagctgctgtattgctaacccagaactgctccagtgtcttgactgatcatcatggcttcagtttggaagagactgcagcgtgtgggaaaacatgcatccaagttccagtttgtggcctcctaccaggagctcatggttgagtgtacgaagaaatggcaaccagataaactggtggtagtttggaccagaagaagccgaaggaagtcttctaaggcacatagctggcaacctggaataaaaaatccctatcgtggtgttgttgtgtggcctgttcctgaaaacattgaaatcactgtaacactttttaaggatcctcatgcggaagaatttgaagacaaagagtggacatttgtcatagaaaatgaatccccttctggtcgaaggaaagctcttgctactagcagcatcaatatgaaacagtatgcaagccctatgccaactcagactgatgtcaagttaaaattcaagccattatctaaaaaagttgtatctgccgctcttcagttttcattatcttgcatttttctgagggaaggaaaagccacagatgaagacatgcaaagtttggctagtttgatgagtatgaagcaggctgacattggcaatttagatgacttcgaagaagataatgaagatgatgatgagaacagagtgaaccaagaagaaaaggcagctaaaattacagagcttatcaacaaacttaactttttggatgaagcagaaaaggacttggccaccgtgaattcaaatccatttgatgatcctgatgctgcagaattaaatccatttggagatcctgactcagaagaacctatcactgaaacagcttcacctagaaaaacagaagactctttttataataacagctataatccctttaaagaggtgcagactccacagtatttgaacccattcgatgagccagaagcatttgtgaccataaaggattctcctccccagtctacaaaaagaaaaaatataagacctgtggatatgagcaagtacctctatgctgatagttctaaaactgaagaagaagaattggatgaatcaaatcctttttatgaacctaaatcaactcctcctccaaataatttggtaaatcctgttcaagaactagaaactgaaaggcgagtgaaaagaaaggccccggctccaccagtcctctcaccaaaaacaggagtattaaatgaaaacacagtttctgcaggaaaagatctctctacttctcctaagccaagccctataccaagtcctgttttggggcgaaagccaaatgctagtcagtctttgcttgtatggtgtaaagaagttacaaagaactaccgaggagtaaaaatcaccaattttactacatcgtggagaaatggtttatctttttgtgcaatattacaccactttagaccagatttaattgactacaagtctctgaatcctcaagatattaaagagaacaacaaaaaggcatacgatggatttgccagcataggaatttcccgattattggaaccttctgatatggtattattagcaattcctgataaactgactgttatgacttatctctatcaaataagggcacatttcagtggccaagaactaaatgtcgttcagatagaggaaaacagcagtaaaagcacatataaagttggaaactatgaaacagatacaaacagttctgttgatcaagaaaaattctatgcagagcttagtgatctgaagcgggagcctgaactacaacagcctatcagcggagcagtagacttcttatcacaggatgactctgtatttgtaaatgatagcggggttggagagtcagaaagtgagcatcaaactcctgatgatcaccttagtccaagcacagcctccccttactgtcgcaggactaaaagtgacacagaaccccagaagtctcagcagagctctggaaggacttcaggatctgatgaccctggaatatgttccaatacagattcaacccaagcacaggttttgttaggcaaaaagagactattgaaagctgagactttagaattgagtgacttatatgttagtgataagaagaaggatatgtctccaccctttatttgtgaggagacagatgaacaaaagcttcaaactctagacatcggtagtaacttggagaaagaaaaattagagaattccagatccttagaatgcagatcagatccagaatctcctatcaaaaaaacaagtttatctcctacttctaaacttggatactcatatagtagagatctagaccttgctaagaaaaaacatgcttccctgaggcagacggagtctgatccagatgctgatagaaccactttaaatcatgcagatcattcatcaaaaatagtccagcatcgattgttatctagacaagaagaacttaaggaaagagcaagagttctgcttgagcaagcaagaagagatgcagccttaaaggcggggaataagcacaataccaacacagccaccccattctgcaacaggcagctaagtgatcagcaagatgaagagcgacgtcggcagctgagagagagagctcgtcagctaatagcagaagctcgatctggagtgaagatgtcagaacttcccagctatggtgaaatggctgcagaaaagttgaaagaaaggtcaaaggcatctggagaacaaaacagtaagttggtggacttgaagctgaagaagctcctagaagttcagccacaggtggcaaattcaccctccagtgctgcccagaaagctgtaactgagagctcagagcaggacatgaaaagtggcacagaagatctccggactgaacgattacaaaaaacaacagaacgttttagaaatcctgttgtgttcagcaaagattctacagtcagaaaaactcaacttcagtctttcagccaatatattgagaatagaccagagatgaaaaggcagagatcaatacaggaagatacaaagaaaggaaatgaggagaaggcagcgataactgaaactcagaggaagccatcagaagatgaagtgcttaataaagggttcaaagacaccagtcagtatgtagtaggagaattggcagcactagagaatgagcaaaagcaaattgacacccgtgccgcgctggtggagaagcgccttcgctatctcatggacacaggaaggaacacagaagaagaagaagctatgatgcaggaatggtttatgttagttaataagaaaaatgccttaataaggagaatgaatcagctctctcttctggaaaaagaacatgatttagaacgacggtatgagctgctgaaccgggaattgagggcaatgctagccattgaagactggcagaagaccgaggcccagaagcgacgcgaacagcttctgctagatgagctggtggccctggtgaacaagcgcgatgcgctcgtcagggacctggacgcgcaggagaagcaggccgaagaagaagatgagcatttggagcgaactctggagcaaaacaaaggcaagatggccaagaaagaggagaaatgtgttcttcagtagccatcagatcagaaagaatctctcccaacattttagagtcttgcttcccaaaccagaaaaagtcagactcattgttgatttaaaacttttaacattt

SEQ ID NO: 54289 - DNA, 1311 bp, Artificial Sequence
  derived and/or modified sequence
acgcgcggggcctggccaatggcggcggggcggtggaggttgagctgccgtgggtagggttagtgtgagaggtgcggcgggggagccctccagaatacccatcatatagcccctgaggtggcatggtgatgtctccatgagggaaccccttcccactcatcctgtcacgtatatcatagtgttcttgactgggccattcatctaagatgggatttaccctgtgaaacagggagaagacttatggaccccaagcatcatttcgagttgtagttgagtttttaaaagacatacatgcaaagttcctttgctttggaccctctgcattattaaagctgctgtattgctaacccagaactgctccagtgtcttgactgatcatcatggcttcagtttggaagagactgcagcgtgtgggaaaacatgcatccaagttccagtttgtggcctcctaccaggagctcatggttgagtgtacgaagaaatggcaaccagataaactggtggtagtttggaccagaagaagccgaaggaagtcttctaaggcacatagctggcaacctggaataaaaaatccctatcgtggtgttgttgtgtggcctgttcctgaaaacattgaaatcactgtaacactttttaaggatcctcatgcggaagaatttgaagacaaagagtggacatttgtcatagaaaatgaatccccttctggtcgaaggaaagctcttgctactagcagcatcaatatgaaacagtatgcaagccctatgccaactcagactgatgtcaagttaaaattcaagccattatctaaaaaagttgtatctgccgctcttcagttttcattatcttgcatttttctgagggaaggaaaagccacagatgaagacatgcaaagtttggctagtttgatgagtatgaagcaggctgacattggcaatttagatgacttcgaagaagataatgaagatgatgatgagaacagagtgaaccaagaagaaaaggcagctaaaattacagagcttatcaacaaacttaactttttggatgaagcagaaaaggacttggccaccgtgaattcaaatccatttgatgatcctgatgctgcagaattaaatccatttggagatcctgactcagaagaacctatcactgaaacagcttcacctagaaaaacagaagactctttttataataacagctataatccctttaaagaggtgcagactccacagtatttgaacccattcgatgagccagaagcatttgtgaccataaaggattctcctccccagtctacaaaaagaaaaaatataa

SEQ ID NO: 54290 - DNA, 5076 bp, Artificial Sequence
  derived and/or modified sequence
gatgatggtggcggaggagaaaggcgggggagggggtgctgggcgctgagcggtggctctggcagggcttggtagggtgggggacggtcgcggggcgatctgtcagggagggggtgggcgtgaggggcgccgtccgcctgaggggctgcagatcccggctaccgcgagcgccgtggctggcttggctgttccatgtggctccggcggggatggaggactcggtggcggcggcggctgctgctgcggcggcgacggaggagcggctatgagaagggaacggggccagactcagcccgacagcgggattagagccctccagaatacccatcatatagcccctgaggtggcatggtgatgtctccatgagggaaccccttcccactcatcctgtcacgtatatcatagtgttcttgactgggccattcatctaagatgggatttaccctgtgaaacagggagaagacttatggaccccaagcatcatttcgagttgtagttgagtttttaaaagacatacatgcaaagttcctttgctttggaccctctgcattattaaagctgctgtattgctaacccagaactgctccagtgtcttgactgatcatcatggcttcagtttggaagagactgcagcgtgtgggaaaacatgcatccaagttccagtttgtggcctcctaccaggagctcatggttgagtgtacgaagaaatggcaaccagataaactggtggtagtttggaccagaagaagccgaaggaagtcttctaaggcacatagctggcaacctggaataaaaaatccctatcgtggtgttgttgtgtggcctgttcctgaaaacattgaaatcactgtaacactttttaaggatcctcatgcggaagaatttgaagacaaagagtggacatttgtcatagaaaatgaatccccttctggtcgaaggaaagctcttgctactagcagcatcaatatgaaacagtatgcaagccctatgccaactcagactgatgtcaagttaaaattcaagccattatctaaaaaagttgtatctgccgctcttcagttttcattatcttgcatttttctgagggaaggaaaagccacagatgaagacatgcaaagtttggctagtttgatgagtatgaagcaggctgacattggcaatttagatgacttcgaagaagataatgaagatgatgatgagaacagagtgaaccaagaagaaaaggcagctaaaattacagagcttatcaacaaacttaactttttggatgaagcagaaaaggacttggccaccgtgaattcaaatccatttgatgatcctgatgctgcagaattaaatccatttggagatcctgactcagaagaacctatcactgaaacagcttcacctagaaaaacagaagactctttttataataacagctataatccctttaaagaggtgcagactccacagtatttgaacccattcgatgagccagaagcatttgtgaccataaaggattctcctccccagtctacaaaaagaaaaaatataagacctgtggatatgagcaagtacctctatgctgatagttctaaaactgaagaagaagaattggatgaatcaaatcctttttatgaacctaaatcaactcctcctccaaataatttggtaaatcctgttcaagaactagaaactgaaaggcgagtgaaaagaaaggccccggctccaccagtcctctcaccaaaaacaggagtattaaatgaaaacacagtttctgcaggaaaagatctctctacttctcctaagccaagccctataccaagtcctgttttggggcgaaagccaaatgctagtcagtctttgcttgtatggtgtaaagaagttacaaagaactaccgaggagtaaaaatcaccaattttactacatcgtggagaaatggtttatctttttgtgcaatattacaccactttagaccagatttaattgactacaagtctctgaatcctcaagatattaaagagaacaacaaaaaggcatacgatggatttgccagcataggaatttcccgattattggaaccttctgatatggtattattagcaattcctgataaactgactgttatgacttatctctatcaaataagggcacatttcagtggccaagaactaaatgtcgttcagatagaggaaaacagcagtaaaagcacatataaagttggaaactatgaaacagatacaaacagttctgttgatcaagaaaaattctatgcagagcttagtgatctgaagcgggagcctgaactacaacagcctatcagcggagcagtagacttcttatcacaggatgactctgtatttgtaaatgatagcggggttggagagtcagaaagtgagcatcaaactcctgatgatcaccttagtccaagcacagcctccccttactgtcgcaggactaaaagtgacacagaaccccagaagtctcagcagagctctggaaggacttcaggatctgatgaccctggaatatgttccaatacagattcaacccaagcacaggttttgttaggcaaaaagagactattgaaagctgagactttagaattgagtgacttatatgttagtgataagaagaaggatatgtctccaccctttatttgtgaggagacagatgaacaaaagcttcaaactctagacatcggtagtaacttggagaaagaaaaattagagaattccagatccttagaatgcagatcagatccagaatctcctatcaaaaaaacaagtttatctcctacttctaaacttggatactcatatagtagagatctagaccttgctaagaaaaaacatgcttccctgaggcagacggagtctgatccagatgctgatagaaccactttaaatcatgcagatcattcatcaaaaatagtccagcatcgattgttatctagacaagaagaacttaaggaaagagcaagagttctgcttgagcaagcaagaagagatgcagccttaaaggcggggaataagcacaataccaacacagccaccccattctgcaacaggcagctaagtgatcagcaagatgaagagcgacgtcggcagctgagagagagagctcgtcagctaatagcagaagctcgatctggagtgaagatgtcagaacttcccagctatggtgaaatggctgcagaaaagttgaaagaaaggtcaaaggcatctggagaacaaaacagtaagttggtggacttgaagctgaagaagctcctagaagttcagccacaggtggcaaattcaccctccagtgctgcccagaaagctgtaactgagagctcagagcaggacatgaaaagtggcacagaagatctccggactgaacgattacaaaaaacaacagaacgttttagaaatcctgttgtgttcagcaaagattctacagtcagaaaaactcaacttcagtctttcagccaatatattgagaatagaccagagatgaaaaggcagagatcaatacaggaagatacaaagaaaggaaatgaggagaaggcagcgataactgaaactcagaggaagccatcagaagatgaagtgcttaataaagggttcaaagacaccagtcagtatgtagtaggagaattggcagcactagagaatgagcaaaagcaaattgacacccgtgccgcgctggtggagaagcgccttcgctatctcatggacacaggaaggaacacagaagaagaagaagctatgatgcaggaatggtttatgttagttaataagaaaaatgccttaataaggagaatgaatcagctctctcttctggaaaaagaacatgatttagaacgacggtatgagctgctgaaccgggaattgagggcaatgctagccattgaagactggcagaagaccgaggcccagaagcgacgcgaacagcttctgctagatgagctggtggccctggtgaacaagcgcgatgcgctcgtcagggacctggacgcgcaggagaagcaggccgaagaagaagatgagcatttggagcgaactctggagcaaaacaaaggcaagatggccaagaaagaggagaaatgtgttcttcagtagccatcagatcagaaagaatctctcccaacattttagagtcttgcttcccaaaccagaaaaagtcagactcattgttgatttaaaacttttaacattttgtttggctggattgtactactttacctctactttaccaccaccacccttttcctccctcctttccaaataatatacagaactccaaaatagcttcatttaaggatttttttgtgagttaacaatttccttgaaatcctgtgaaatagatttgcacagacaccttgtgagtgattggtattggaggtgttcaagaaactgttcgaaaaagaacaaaaacacttccctcgttattttctctcattttttgatgagaggaaaatttgaaacattattcttgttgttgttggtaatagcataatgacagtgggaggggtacaaggggataagaaaaatgtcatgatttttttccggtcctgccacatgtaacacttactctgttacctaaattttatagttagatcatatccaatctacttattaaactgtgttctatttaccagtggagtttttctgcagtggttgcgtttcactgtaaggataatggagttcctctcctctgctttcctcagaggatggtcctttaacatagccagaaacaagccctgtggtttgaaggtgagctgtgaggatgggactaattgatatgcaccagtttacaaagacagtcttatcatccgagaatacaccatctttttctctggataattatttcttacatcatgcttgattcctacattttgttgggtctcaacattggctcacgaatgctgttaatatttattctgtattgataaaaagtctgtcttgccactacaagtaaatcccccatttaatattttcttctttagcatagcactgtcattttttgtgaaaatggttatgtttatttattacaatactgagtcatatataaattttcaataaaagcagaaactttcttaccttaaa

SEQ ID NO: 54291 - DNA, 3483 bp, Artificial Sequence
  derived and/or modified sequence
atggcgagcgtgtggaaaaggctgcagagagtggggaaacatgccagcaaattccagttcgttgcctcgtaccaagaactgatggtggaatgcactaagaaatggcagccagacaagcttgtagtggtgtggactcgcaggagcagacggaagtcgtcaaaggctcattcttggcagcccggcatcaaaaatccgtatcgaggcgtcgttgtgtggccagttccagagaatatcgaaattacagtaactctgttcaaggatccccacgctgaagaatttgaggacaaggaatggaccttcgtcattgagaatgagtcgccatcgggcaggaggaaggcactcgccacgagctccattaacatgaaacaatatgcctcaccaatgccgacccagaccgacgtgaagctcaagttcaaaccgctgagcaagaaagtcgtgtccgcggcactccagttctctctctcatgcatcttcttgcgggagggtaaagccacagacgaggacatgcagtccctggcaagcctgatgagtatgaaacaggccgatatcggtaatctagatgattttgaggaagataatgaggatgatgatgagaacagagtgaatcaggaggagaaggccgctaaaatcaccgaattaataaacaaactcaatttcctagatgaggcggaaaaagatctggcaactgttaattcgaaccctttcgatgatcctgacgcagcagaactcaacccctttggcgaccctgactccgaggaaccgatcactgagaccgcgtcccccagaaaaacagaagatagcttctataataactcctataacccatttaaagaagtacaaacgcctcagtatcttaacccttttgatgagcccgaggcctttgtgaccattaaagacagtcccccacaaagtaccaagaggaaaaacattaggcctgtcgacatgagcaagtatctgtatgcagacagctccaagacggaggaggaggaactggatgaatccaatcccttctatgagcctaagtccacccccccccctaataatctggtcaaccctgtccaagagctggagaccgaacggagagtgaagcgaaaagcccccgcacccccggttctgagtcccaagacgggcgtcctcaatgaaaacactgtaagcgccggaaaggatctgtcgacaagtccgaagcccagtcccattccatctccggtcctggggcgtaagcccaacgctagccaatccctgttggtgtggtgtaaagaagttacgaaaaactacagaggagtaaaaattaccaatttcacaacctcatggagaaacggcttgtctttctgtgcgattctgcatcattttagaccagatctcatcgattataaatctcttaatccacaggacatcaaggaaaacaacaagaaagcctacgacgggttcgcgtctataggcataagtcgactgctggagccctccgacatggtacttctggccattcctgacaagttgacagtaatgacatacctgtaccagatccgggcccacttctccggccaggaattgaacgttgtgcagattgaggagaatagctccaaatcaacctataaggtagggaattatgagacagataccaacagctccgttgatcaggagaaattttacgctgagctcagcgacctcaagagggaaccagagctgcagcagccaattagtggggccgtcgattttctctctcaggacgactcagtgttcgtcaatgatagtggggtcggtgaaagcgagtcggaacaccagacccctgacgaccacctgagcccatcaacagcctctccatattgccgacgcactaaatctgacacagaaccgcaaaaatcgcaacagtcaagtgggcgcactagcggctcagatgatcctggtatctgttccaatacagactcaacgcaggctcaggtcctgctgggaaaaaagaggttgcttaaagcagagacgttagagctgagcgacctgtacgtatccgataagaaaaaagatatgtcccctccttttatatgtgaggaaactgatgaacaaaaattgcagacattggacatcggctctaacctcgagaaagaaaaactcgagaactctcggtccttggaatgccgctccgacccggagtcacctatcaagaagacatctctttcccctaccagcaaattggggtactcatactcaagggatctggatctggcaaaaaagaaacatgcttccctacggcagactgaaagcgatccggatgccgaccgtactaccctaaaccacgcggatcattcctcaaagatcgttcagcaccggctcctaagtaggcaggaagagctgaaggagcgggctcgcgtgttactggaacaagcccggcgggacgctgcccttaaagcaggcaataaacataacacaaacacagcaacacccttctgtaatcggcaactgagcgatcagcaagatgaggagaggagacggcagctgcgagagagggctagacagctcatcgcagaggcgcgctctggcgtgaagatgagtgaactgcctagctatggggaaatggccgccgaaaagcttaaggagagatctaaagcatctggcgagcaaaacagcaagctcgtggatctcaaactcaagaaattgttagaggtccagccccaagttgctaacagtcctagcagcgccgcccagaaggccgtcaccgaatctagcgagcaggatatgaagagtggcaccgaggatttgaggacagaacgcttgcaaaaaacaacagaaagatttcgaaatcccgtggtgttctcaaaggactctaccgttcgaaagacccagctgcaaagtttcagtcagtacattgaaaatagacccgaaatgaagcgtcagcggtctatccaggaggatacgaagaagggaaacgaggaaaaagccgctattacagaaacacagcgcaagcccagtgaagacgaagtcctcaataaaggattcaaggacacgagtcagtacgtggtcggagaactcgccgcactggaaaacgaacagaagcaaattgacaccagagccgcccttgtggagaaaaggcttaggtatcttatggacaccggaagaaacactgaagaggaggaggccatgatgcaggaatggtttatgctcgtgaacaagaagaacgcgctcataaggcggatgaaccagctcagcttactggagaaagagcacgacctcgaacgccgatatgagctcctgaatcgcgaactcagagcgatgctggcgattgaagattggcaaaagaccgaggcgcaaaaacggcgagagcagctattactagatgaattggtcgctctggtgaataaacgggatgctctggtgcgggatctggacgcccaggagaaacaggctgaggaggaggatgaacatctcgagcggaccctggagcagaataaaggtaagatggccaagaaggaagagaaatgtgttctacagtag

SEQ ID NO: 54292 - DNA, 933 bp, Artificial Sequence
  derived and/or modified sequence
atggctagtgtctggaagaggttgcagcgagttggcaaacatgcctctaagtttcagtttgtcgcctcttaccaggagctcatggtggaatgcacaaaaaagtggcagcccgataaactggtggttgtctggacacgcaggagcagacggaagtcatcaaaggcgcacagttggcaaccgggtataaagaacccttacagaggagttgtagtgtggcctgtgccagaaaatattgagattactgtgaccttatttaaagacccccatgctgaagaattcgaagacaaggaatggacatttgtgatcgagaacgagtccccttccgggaggcgcaaagccctcgcgacctcctctatcaacatgaagcagtatgcatctcccatgcctacacaaactgacgttaaattgaaattcaaaccattgtccaagaaggtagttagtgcagctctgcagttttctctgagttgtatcttcctccgcgagggaaaggccacagacgaagacatgcagagtctagcatcactgatgagcatgaaacaggccgacatcggcaacctggatgacttcgaagaggacaacgaggacgatgacgagaaccgggttaaccaggaggaaaaggcagccaaaattaccgagctgattaataaactcaactttctggatgaagccgaaaaggatttggccacggtgaattcgaacccctttgacgaccccgacgctgcagaactgaacccattcggggaccctgattctgaggaaccaattacagagacagcaagcccacgcaaaacagaagactccttctacaacaatagctacaacccatttaaagaagtgcagaccccacagtacctaaaccctttcgacgagcccgaggccttcgtcactattaaggattcccccccgcagagcacaaagcggaagaacatttag

SEQ ID NO: 54293 - DNA, 3483 bp, Artificial Sequence
  derived and/or modified sequence
atggcatccgtttggaaacgactccaaagagttggaaagcacgcctcaaagttccaatttgtagcgtcgtatcaagagctgatggtggagtgcactaaaaagtggcagccggacaaactggtggttgtctggactcgccgttcccgtcggaaatcatcaaaggcgcacagttggcagcctggaatcaagaatccttaccgaggggtggttgtgtggcctgttccagaaaatattgagatcacagttacactctttaaggacccccatgctgaagaatttgaggataaagaatggacgttcgtaatcgaaaatgagtccccgagcggcaggagaaaggcactggcgacttcatcaatcaacatgaagcaatatgcctcgcccatgccgacccagacagatgtgaaattgaagttcaaacctctgagcaagaaggtcgtaagtgctgccttacagttctccttgtcgtgtatttttctgcgggagggtaaggcaactgatgaagacatgcagtctcttgcatcactgatgagcatgaaacaggcggacatcggaaatctggacgacttcgaggaggataacgaagacgacgacgaaaaccgcgtcaaccaagaagaaaaggctgctaaaatcaccgaacttattaacaagcttaattttctagatgaggctgagaaggacctggccacagtgaacagcaatccatttgacgaccccgatgcagccgagttgaaccccttcggagaccctgacagcgaagaaccgatcacagaaaccgcgtccccaagaaaaacagaggacagcttttacaataatagctataatcccttcaaggaggtccagaccccccagtatctcaatccattcgacgagcccgaagctttcgttactatcaaagactcccccccacagtctactaagcgcaagaacattagacctgttgacatgagtaagtacctgtatgccgattcctctaaaactgaagaagaggagttagacgaatctaatcctttttacgagccgaaatcgaccccacctccaaacaatctcgttaatcctgtgcaggaactggaaaccgaacgacgggtaaagcgtaaggcaccagcaccacccgtactctcgccaaagacaggggtgctcaacgaaaacaccgtctcagctggaaaagatctgagtacctcaccaaagccttcacccattcccagtccggttctgggtagaaagccaaacgcatcacaatctctgctagtgtggtgtaaggaagttacaaaaaactatcgcggagtcaagataacaaatttcactacgagctggcgcaatggcctttctttttgtgctattttgcatcactttaggcctgatttgattgattacaaaagtctgaatccccaggacatcaaagagaacaataagaaggcctacgatggattcgcatctatcggaatctctcggctgctagagccgtctgacatggtgctgttggcgatccctgataaacttaccgttatgacctatttgtaccagatcagggcacattttagtggccaggaacttaacgttgttcagatcgaggagaatagctcaaagtccacctataaagtgggcaactatgaaacagatacaaactcaagcgtagaccaggagaaattttacgcagaactgtccgaccttaagcgcgaacctgagctgcaacagcctatcagcggggcagtggactttctgtctcaagatgactctgtgtttgtaaacgattccggcgtcggcgaaagcgagtcagagcatcagacgcccgacgaccacctgtccccaagtaccgcgtctccttactgccgtagaacaaagagcgacaccgagcctcagaaatctcaacaaagttccggcagaacatctggctccgatgaccccggaatttgctctaataccgactcaactcaagcacaagttttgctgggcaaaaagagactgctgaaggccgagaccctggaactgtcagacctgtacgtgagcgataaaaagaaagatatgtctccccccttcatctgcgaagagacggacgagcaaaaactccagaccctggacatcggctctaatctcgagaaggagaagctggagaactcaaggagcctggagtgccgttcagaccctgagtccccgataaagaagactagcctttcgccaacttccaagctggggtatagctacagccgcgatctggatcttgcaaaaaagaagcacgccagtctgcgccagaccgagtctgatcccgatgccgacaggacgactctcaaccacgccgaccatagtagcaagattgtccaacaccggttgctgagccgccaagaagagctcaaagagcgcgcacgcgtgctgctggagcaggcccgcagagacgccgctttgaaagccggaaataaacataatacgaacacagccactccattctgcaaccgccaactttccgaccaacaggatgaggagcgaagacggcaactgagagagagagcacgccagctcattgccgaggccagatcaggggtgaaaatgtcggagttacctagctatggcgagatggctgccgaaaagctgaaagagcggtctaaggcttcaggagaacagaattccaagcttgttgacctgaagctcaaaaaactcctcgaggtccagccccaggtagcaaattccccatcctctgcagcccagaaggcggtaacagagagctccgagcaagacatgaagagcggtacggaggacttacggacggagaggctgcagaagacaaccgaaaggtttagaaaccccgtggttttctctaaagatagcaccgttaggaaaacccaattacagagcttctcccagtatattgaaaacagaccagaaatgaagcgccaaagaagcatacaagaggacactaaaaaggggaatgaggaaaaagccgcaattaccgaaacccagcgaaaaccttcagaggacgaggtcctgaacaaagggttcaaggacacctcccagtacgtggtcggcgagctggctgccctagagaatgagcagaagcagatagatacacgtgctgccctggttgaaaaacggttgcggtacctcatggacactggaagaaacacagaggaggaggaagcgatgatgcaggaatggttcatgttggtgaataagaaaaacgccttgatcagaaggatgaaccagctcagtcttctggagaaggaacatgaccttgaacggaggtacgagctgctcaatcgggaactgagagctatgctggccattgaagattggcagaagacagaagcacagaagaggagggagcaactcctgctcgacgagctcgtggctctcgtgaacaagcgggacgcacttgtgcgggacctcgacgcccaggagaaacaagctgaagaagaagacgagcatcttgagcggacactcgagcagaataaaggaaaaatggctaaaaaggaagagaaatgcgttctacagtag

SEQ ID NO: 54294 - DNA, 3483 bp, Artificial Sequence
  derived and/or modified sequence
atggcctctgtgtggaagaggctgcagagggtgggcaagcacgccagcaagttccagtttgtggccagctaccaggagctgatggtggagtgcaccaagaagtggcagcctgacaagctggtggtggtgtggacccggcgcagcaggaggaagagcagcaaggcccacagctggcagcccggcatcaagaacccctaccggggcgtggtggtgtggcctgtgcctgagaacatcgagatcaccgtgaccctcttcaaggacccccacgccgaggagtttgaggacaaggagtggacctttgtgattgaaaatgaaagccccagcggccgcaggaaggccctggccaccagcagcatcaacatgaagcagtatgccagccccatgcccacccagacagatgtgaagctgaagttcaagcccctgagcaagaaggtggtgtctgctgccctgcagttcagcctgagctgcatcttcctgcgggagggcaaggccacagatgaggacatgcagagcctggccagcctgatgtccatgaagcaggccgacatcggcaacctggatgactttgaagaagataatgaagatgatgatgagaacagagtgaaccaggaggagaaggccgccaagatcacagagctgatcaacaagctgaacttcctggatgaagctgagaaggacctggccaccgtgaacagcaacccctttgatgatcctgatgctgctgagctgaacccctttggagaccctgattctgaggagcccatcacagaaacagccagccccaggaagacagaagattccttctacaacaacagctacaaccccttcaaggaggtgcagaccccccagtacctgaacccctttgatgagcctgaggcctttgtgaccatcaaggacagccccccccagagcaccaagaggaagaacatccggcctgtggacatgagcaagtacctgtatgctgacagcagcaagacagaggaggaggagctggatgagagcaaccccttctatgagcccaagagcaccccaccacccaacaacctggtgaaccctgtgcaggagctggagacagagcggcgggtgaagaggaaggccccagcccctcctgtgctgagccccaagacaggagtgctgaatgaaaatacagtgtctgctgggaaggacctgagcaccagccccaagcccagccccatccccagccctgtgctgggcaggaagcccaatgccagccagagcctgctggtgtggtgcaaggaggtgaccaagaactacagaggagtgaagatcaccaacttcaccacctcctggagaaatggcctgtccttctgtgccatcctgcaccacttccggccagacctgattgactacaagagcctgaacccccaggacatcaaggagaacaacaagaaggcctatgatggctttgccagcatcggcatcagccggctgctggagcccagcgacatggtgctgctggccatcccagacaagctgactgtgatgacctacctgtaccagatccgggcccacttcagcggccaggagctgaatgtggtgcagatcgaggagaacagcagcaagagcacctacaaggtgggcaactatgaaacagacaccaacagctctgtggaccaggagaagttctatgcagagctgagtgacctgaagcgggagcctgagctgcagcagcccatctctggagctgtggacttcctgagccaggatgacagcgtgtttgtgaatgacagcggcgtgggggagagcgagagcgagcaccagaccccagatgaccacctgagccccagcacagccagcccctactgcaggaggaccaagagtgacacagagccccagaagagccagcagagcagcggccgcaccagcggcagtgatgaccccggcatctgcagcaacacagacagcacccaggcccaggtgctgctgggcaagaagaggctgctgaaggccgagaccctggagctgagtgacctgtatgtgtctgacaagaagaaggacatgagcccccccttcatctgtgaggagacagatgagcagaagctgcagaccctggacatcggcagcaacctggagaaggagaagctggagaacagccgcagcctggagtgccgcagtgaccctgagagccccatcaagaagaccagcctgagccccaccagcaagctgggctacagctacagccgggacctggacctggccaagaagaagcacgccagcctgcggcagacagaaagtgaccctgatgctgacaggaccaccctgaaccacgccgaccacagcagcaagatcgtgcagcaccggctgctgagccggcaggaggagctgaaggagcgggcccgggtgctgctggagcaggccaggagagatgctgccctgaaggccggcaacaagcacaacaccaacacagccacccccttctgcaaccggcagctgagtgaccagcaggatgaggagcggcggcggcagctgcgggagcgggcccggcagctgattgctgaggcccggtctggagtgaagatgtctgagctgcccagctatggagagatggctgctgagaagctgaaggagaggagcaaggccagcggggagcagaacagcaagctggtggacctgaagctgaagaagctgctggaggtgcagccccaggtggccaacagccccagcagcgctgcccagaaggctgtgacagagagcagcgagcaggacatgaagagcggcacagaggacctgaggacagagcggctgcagaagaccacagagcgcttcaggaaccctgtggtgttcagcaaggacagcacagtgaggaagacccagctgcagagcttcagccagtacatcgagaacagacctgagatgaagaggcagaggagcatccaggaggacaccaagaagggaaatgaggagaaggccgccatcacagagacccagaggaagcccagtgaagatgaggtgctgaacaagggcttcaaggacaccagccagtatgtggtgggggagctggccgccctggagaatgagcagaagcagattgacaccagggctgccctggtggagaagaggctgcgctacctgatggacaccggcaggaacacagaggaggaggaggccatgatgcaggagtggttcatgctggtgaacaagaagaatgccctgatccggaggatgaaccagctgagcctgctggagaaggagcatgacctggagcggcgctatgagctgctgaaccgggagctgcgggccatgctggccatcgaggactggcagaagacagaggcccagaagaggcgggagcagctgctgctggatgagctggtggccctggtgaacaagagagatgccctggtgcgggacctggatgcccaggagaagcaggccgaggaggaggatgagcacctggagaggaccctggagcagaacaagggcaagatggccaagaaggaggagaagtgtgtgctgcagtag

SEQ ID NO: 54295 - DNA, 933 bp, Artificial Sequence
  derived and/or modified sequence
atggcctctgtgtggaagaggctgcagagggtgggcaagcacgccagcaagttccagtttgtggccagctaccaggagctgatggtggagtgcaccaagaagtggcagcctgacaagctggtggtggtgtggacccggcgcagcaggaggaagagcagcaaggcccacagctggcagcccggcatcaagaacccctaccggggcgtggtggtgtggcctgtgcctgagaacatcgagatcaccgtgaccctcttcaaggacccccacgccgaggagtttgaggacaaggagtggacctttgtgattgaaaatgaaagccccagcggccgcaggaaggccctggccaccagcagcatcaacatgaagcagtatgccagccccatgcccacccagacagatgtgaagctgaagttcaagcccctgagcaagaaggtggtgtctgctgccctgcagttcagcctgagctgcatcttcctgcgggagggcaaggccacagatgaggacatgcagagcctggccagcctgatgtccatgaagcaggccgacatcggcaacctggatgactttgaagaagataatgaagatgatgatgagaacagagtgaaccaggaggagaaggccgccaagatcacagagctgatcaacaagctgaacttcctggatgaagctgagaaggacctggccaccgtgaacagcaacccctttgatgatcctgatgctgctgagctgaacccctttggagaccctgattctgaggagcccatcacagaaacagccagccccaggaagacagaagattccttctacaacaacagctacaaccccttcaaggaggtgcagaccccccagtacctgaacccctttgatgagcctgaggcctttgtgaccatcaaggacagccccccccagagcaccaagaggaagaacatctag

SEQ ID NO: 54296 - DNA, 3483 bp, Artificial Sequence
  derived and/or modified sequence
atggccagcgtgtggaagcggctgcagcgggtgggcaagcacgcctctaagtttcagtttgtcgcctcctaccaagaactgatggtggagtgtacaaaaaagtggcagccggataagttggtggtcgtctggacaaggaggtcccgccgcaagagtagcaaagcccactcttggcaacccggcatcaaaaatccctaccgaggggtggtggtgtggccagtgccagaaaatattgaaatcacagttaccttgtttaaagatccacacgccgaggagtttgaagacaaggaatggacttttgtgatcgagaacgagtcgccatccggacgaagaaaggccctggccacctccagcattaacatgaaacagtacgctagtccgatgcccacccagaccgatgtaaagctgaaatttaagccactgtctaagaaggttgtcagcgcagccctccagttttcactatcctgcatcttcctgcgggagggaaaagcgaccgatgaggatatgcaaagtcttgccagcctgatgtcaatgaagcaggcagacatcggcaatctcgatgactttgaggaggataacgaagacgacgatgagaatagggttaatcaggaggagaaggcggctaagatcaccgagctcatcaacaaactcaatttcctggatgaggctgaaaaagacttggccactgtgaattccaaccctttcgacgaccctgacgccgcagaattgaatccattcggcgaccccgacagtgaggaaccaattaccgagacggcctccccccgcaaaaccgaggattcattctataataattcctataacccatttaaagaagtccagactcctcagtatctaaatccctttgacgagccagaggcatttgtgacgatcaaggactccccaccgcagagcactaaacgaaaaaacattagacccgtggatatgagcaaatacctttatgccgattcatctaagacagaggaggaggagctggacgaatcaaatcccttctatgagcctaaatccactccacctcctaacaacctggttaaccctgtccaagagctggagaccgagcgtcgggttaaaaggaaggcacctgcaccacccgtgcttagccctaaaacaggggtcctaaacgagaacactgtttccgctggaaaggatttatcgaccagcccgaaaccaagtccgatcccttcgcctgtgctaggaagaaaacccaacgccagccagagcttattagtttggtgcaaggaagtaaccaagaattacagaggcgtgaagatcactaatttcaccaccagttggcggaacggtctgagcttctgcgccatattgcaccatttccggccagatcttatagactataagagcctgaaccctcaggacattaaagaaaacaataagaaggcctatgatggcttcgcatcgataggtattagccggcttctggagcctagcgatatggtactgctggcaattcctgataagctcactgtgatgacgtacttatatcagattagggcccacttctccggccaggaactgaatgtcgtgcagatcgaggagaactccagcaagtctacgtacaaagtgggaaactatgagactgataccaactcatcagtggaccaagagaaattctatgcggaactttctgacctaaagcgcgagccagagctgcagcagcccatctccggtgctgtggattttttaagccaggatgacagtgtgttcgtgaacgactctggagttggagaaagcgagtctgaacatcagacccccgatgatcacctgagcccgtccacagctagtccctactgcagacgaactaagtccgacacagaacctcagaagagccagcagtcatctggccgcacctctggaagtgacgaccccgggatctgttccaacacagatagcacccaggcacaagtgctgctcggcaaaaagcgacttctgaaggcagagaccctcgaactgtctgacctgtatgtgtcagacaagaagaaggatatgtctccaccttttatttgtgaagaaaccgacgagcagaagttgcagactttagacattggttctaatttggagaaagagaaactggaaaactcacgcagcttagaatgccgcagtgatccagaaagccctatcaagaaaacttccctatccccaaccagtaaactggggtacagctattctagggacctggatctggcaaagaaaaaacatgctagcctacgacagacagagtctgacccagacgcagacaggactacgctcaaccatgcagaccactcctctaagatcgtgcagcatcgactgctttcccgccaggaggaattgaaggaaagggccagagtcttgctcgaacaggcaaggagggacgccgctctgaaggccggcaataagcacaacaccaacaccgccactccattttgtaatagacagttatctgatcagcaggatgaggaacgccgtcggcagctgcgggaacgtgcacggcagctgattgccgaggcccgctctggcgttaagatgtcagagctgccgtcctacggggaaatggcggcagaaaaattaaaagaaaggtcgaaagcatccggggaacagaattctaagctggtcgacctcaagttgaagaagctactggaggtccaaccacaggttgccaatagcccatccagtgccgcccagaaagccgtgacagagtcatccgagcaggacatgaagtctgggaccgaagacctgcgaactgagcggctgcagaaaactacagagagatttcgcaatccagtggtcttcagcaaggatagcactgtgagaaaaacacagctccagtctttctcacagtacattgaaaatcggccagaaatgaagaggcagcgctcaattcaggaagacacaaagaagggaaacgaggagaaagcagcaattacagaaactcagaggaaaccctccgaggacgaagtgctgaacaagggttttaaggacacaagtcagtacgttgttggagagttggcagctctggaaaatgagcagaagcagatcgataccagagccgctttggtggagaagaggctgaggtacctgatggacaccggccgtaacactgaagaggaagaagccatgatgcaggaatggttcatgttggttaataaaaaaaatgctctgataaggcgaatgaaccagctttcccttctggaaaaggagcacgacttggagagacgctacgagcttctgaatcgcgaattaagagccatgctagcaatcgaagactggcagaaaacagaggcccagaaaaggagggaacagctattgcttgacgaactcgttgcgctagtgaataagcgagacgcccttgtgagggaccttgacgcgcaagaaaaacaagccgaagaggaggacgagcacttagagcgaaccctcgaacagaataaggggaaaatggccaaaaaagaggaaaaatgcgtgctgcagtag

SEQ ID NO: 54297 - DNA, 933 bp, Artificial Sequence
  derived and/or modified sequence
atggccagcgtgtggaagcggctgcagcgggtgggcaagcacgccagcaagtttcagtttgtggcctcataccaagagctgatggtggagtgtactaaaaagtggcagcccgacaaactggttgtcgtttggactcgtcgttcccgacgcaagtcctcgaaggcccattcttggcaaccaggcattaaaaacccgtaccgcggggtggtggtctggccagtgccagaaaacatcgaaatcaccgtgacgctgtttaaagatccgcatgcggaggaattcgaggataaggaatggaccttcgtgatcgagaatgaatccccttcagggcgaagaaaggcactggccacgtccagtatcaacatgaagcaatacgcttcaccgatgccgacccagacagatgtgaagttaaagtttaaaccgctgtccaagaaagtggtctccgcagctctgcagttctccctgtcctgtatcttcctccgagaggggaaggccacagacgaggatatgcaatctcttgccagcctcatgtcgatgaaacaggctgacatcggaaacctggacgattttgaggaggataacgaggatgacgacgaaaatagagtcaaccaggaggaaaaggctgccaagataactgagttgatcaataagctgaactttcttgatgaagccgaaaaagacctggcgacagtcaattctaacccctttgatgaccctgacgctgcagagctgaatccgtttggagatcctgactctgaagaaccgataacggaaacagcctctccaaggaagaccgaagatagcttctacaacaacagttacaatccttttaaggaagtacaaacgccacagtaccttaacccattcgatgaaccagaggccttcgtaactattaaggatagcccaccccagtcaaccaaaagaaagaacatatag

SEQ ID NO: 54298 - DNA, 3483 bp, Artificial Sequence
  derived and/or modified sequence
atggccagcgtgtggaagcggctgcagcgggtgggcaagcacgcctccaagttccaatttgtagcctcgtaccaggagctgatggtggagtgtacaaagaaatggcagcctgacaagctggttgtcgtgtggactcggcgctctcgtcgaaagagtagcaaggcccacagctggcagccggggatcaagaacccctatcggggcgtcgtggtctggcccgtaccagaaaatattgagatcacggttaccctatttaaggatccccacgcagaggagttcgaggataaggagtggacatttgtcatagagaatgagagcccgagcggtcggcgcaaagcgctggctacctcttcaatcaatatgaaacagtatgcttcacctatgcccacacaaactgatgtgaagctgaagtttaagccattatcaaagaaggttgtgagcgccgcattacagttctctcttagctgcatcttcttaagagaggggaaggccacggatgaagatatgcaatctttagcatctctaatgtcaatgaagcaagcagatatcgggaatcttgacgacttcgaagaagataatgaggatgatgatgagaatcgggttaatcaggaggaaaaagcagctaagatcacggagctcatcaataaattgaacttcctcgacgaggcagagaaagatctggccactgtgaacagcaacccttttgacgatccagacgccgcagagctgaacccgtttggggatcctgactctgaggagcccataactgaaacagcttcgcctaggaagacagaggactctttctacaataacagctataaccccttcaaagaggtacagacaccccagtacctaaatcctttcgacgagcctgaggcgttcgtgacgatcaaggattcccccccgcagagcacaaagcgcaagaacatacggcccgtggatatgtcaaagtatctatatgccgacagctccaaaacggaagaagaggagcttgacgagtcaaatcccttttacgaacccaagtccacacccccacccaataacctcgttaacccggttcaggagctagagacggaacgccgtgttaaacgaaaggctcccgctcctcccgtcctttctcccaaaacaggagtcctcaatgagaatactgtaagcgcggggaaggacctgtcaactagcccgaagccttctccaattccttccccggttttgggcagaaaacctaacgcctcccagagcctgcttgtgtggtgtaaggaggttacaaaaaattatcgaggcgtaaaaattactaactttacaactagctggagaaatggcctgtctttttgtgccatccttcaccactttagacctgaccttatcgactataagagcctgaatcctcaggacattaaggagaacaataagaaggcatacgacggcttcgcctctataggcatttcgcgtcttctggagccatcagatatggtgctcctagccataccagacaaactgactgtgatgacctatctctaccagattagggcccattttagcggccaggagttaaacgttgtgcagattgaggagaactcctcaaagtccacctataaagtaggcaactatgagacagacacgaatagctccgttgatcaggagaaattctatgccgaactctctgacctcaaaagagaacctgagctgcagcagccaatcagtggagcggtggactttctttctcaggacgatagcgtattcgtgaatgacagtggcgttggtgaatctgagtccgaacaccagacccccgatgaccacctgtcacctagcaccgccagcccgtactgtcggaggaccaaaagtgatacggaaccacagaagtcccagcaatcctcaggcagaacctcaggctctgacgaccccgggatctgtagcaacacggactccactcaagcacaagtcctattaggaaaaaaaagactgctgaaagcagaaaccctggagctaagtgacctgtacgtttcagacaaaaagaaggatatgtcaccgccatttatctgcgaggagaccgatgaacagaagctgcagaccctggatattggctccaacctggagaaggaaaagcttgaaaactctcgaagcctggagtgccggagcgacccggagtctccaattaagaagacatccttaagtccaacaagcaaattggggtatagttattcccgcgacctggacttagctaagaaaaagcacgcatctctgcggcaaaccgagagtgacccagatgccgaccgcactacactgaatcatgccgaccactcatcgaaaattgtgcagcatcgtttgctgtctagacaagaggagctcaaggagcgtgcacgcgtgctcctagaacaggctcggcgggacgccgcgctaaaggcaggcaataagcacaacacaaacactgctacacccttctgcaacaggcaattgtcagaccagcaggatgaggaaaggcggagacagctgcgggagcgtgccaggcagttaatcgcagaagccagaagcggagtcaagatgtccgagcttccttcttatggagaaatggccgccgaaaagctgaaggagcgttcaaaagcttccggcgagcaaaattcaaagctggtggacctcaaattgaagaagctgttggaagttcagccccaggtggccaatagcccctccagcgcggcgcagaaagccgtcacggaatcctccgaacaggatatgaaaagcggtacagaagatcttagaactgagcgcctgcagaagactaccgagaggttcagaaatcctgtggtcttttcaaaagacagcacagtacggaaaacccaattgcagagcttttctcagtacatcgagaacagaccagagatgaaaaggcagaggagcattcaggaggacacaaagaagggcaacgaggaaaaggccgccattaccgaaacccagaggaaaccttcggaggacgaggtgctcaataaaggcttcaaagatacaagccagtatgtcgtcggcgagcttgctgcgctagagaatgaacaaaagcagatcgatactagggccgccctggtcgaaaagcgcctgagatatttaatggataccggccgcaataccgaggaagaagaagcaatgatgcaggaatggttcatgcttgtgaacaagaaaaacgctcttattcgacggatgaatcagctatcgctactggaaaaggagcacgacttggagcgtagatatgagctgcttaacagagagcttcgggccatgctagccatcgaggattggcaaaaaactgaggcccaaaaaaggcgggaacaactccttctcgatgagttggttgctctggtgaacaagagagatgccctcgttcgggacctcgatgcccaggagaagcaggcagaggaagaggatgagcatctcgaaaggactcttgaacaaaacaagggaaagatggctaagaaggaagagaagtgcgtactgcagtag

SEQ ID NO: 54299 - DNA, 3483 bp, Artificial Sequence
  derived and/or modified sequence
atggcttccgtctggaagaggcttcaacgcgtcgggaaacatgcctccaagtttcagtttgtggcctcctaccaagaattgatggtagaatgtacaaagaaatggcagcccgataaactggtagtggtctggaccaggcgtagtcgcaggaagtcttccaaagcccactcttggcagcccggtatcaaaaacccctacaggggagtagtggtctggcccgtgccggagaacatagagatcactgtgacgctgtttaaggatccccacgctgaagagtttgaggacaaagagtggacgttcgttattgagaatgagagtcctagtggtcgcagaaaggctctggccacctctagcatcaatatgaaacagtatgcgtcacctatgccgacccagaccgatgtcaaactgaaattcaagcccctgtctaagaaggtagtcagcgctgcactccagtttagtctcagttgtatctttctgcgtgaaggaaaagctactgacgaggacatgcaatctctagcctccctaatgagcatgaaacaggccgatattggcaacctggacgatttcgaggaagacaacgaagacgatgacgaaaatcgggtgaaccaagaagaaaaagctgcaaagatcactgagcttataaacaagcttaacttcctcgacgaagctgaaaaagatcttgcaacagtcaactctaatccgttcgatgacccagacgcagctgaactcaacccgttcggggaccccgacagcgaggaaccaattacggagacagcctccccacgaaaaactgaggatagcttctataacaatagttacaatcccttcaaagaggttcagacaccccaatatttgaatcctttcgatgaaccggaagcttttgtgacgattaaagactctcccccacagagtacaaagcgcaaaaatatacggccagtggacatgtccaaatacctgtacgctgatagttcgaaaaccgaggaagaggagttggatgaaagcaaccctttctacgagccaaagagcactccgcctcccaacaacctcgtgaaccctgtgcaggaactcgaaacagaacggagagtgaagagaaaggccccagcaccacctgtcctcagtcctaaaacgggcgtgctgaacgagaacaccgtatctgctgggaaagaccttagcacgagccccaaacccagcccaatcccatcccctgtactcggcagaaagcctaacgccagccagagtctgcttgtctggtgtaaagaggtgaccaagaattataggggtgtgaagatcacaaactttacaacatcctggaggaatggactctccttctgcgccatcctgcaccacttcagacccgacctgatcgactacaagtcccttaacccccaggatataaaagaaaataacaaaaaggcttatgacggatttgcctcaatcggtatatcgagactcttggaaccttcagatatggtcctgctcgccataccagataagctaacagtgatgacatatctgtaccagatccgggcacacttctctggtcaggaactcaacgttgttcagattgaggagaacagctctaagtccacatataaggtcggtaactacgagacagatactaacagcagtgtagatcaggagaagttctatgcggagctgtcagaccttaaaagagagcccgaactgcagcagcctattagtggggctgtagactttctgtcacaagacgattcagtgttcgtaaacgactccggggttggggagagcgagagcgagcaccagacgccagacgaccatctctcgcctagtaccgcgagcccatattgccgaaggaccaaatctgacacagagccccagaagtctcaacagtcgagtggcaggacatctggcagtgacgatccaggcatttgtagcaatacagactcgactcaggcccaggtcctattgggaaaaaaacggttgctaaaagcagaaaccctggagctatctgacttgtacgttagcgataaaaaaaaagatatgagccctcccttcatttgcgaagaaaccgatgaacaaaaacttcaaactttggatataggcagcaacctggaaaaggaaaagctggaaaacagtcgttctctcgagtgcagatctgatcccgaatctccaatcaaaaaaacaagcctgtctcccacctcgaagctcgggtatagctattctagagatctcgatctggcaaaaaagaaacacgcctctttgaggcagaccgagagtgaccccgacgctgatagaacaacgcttaatcacgccgatcactcttccaagattgtgcaacacaggctgctatcaagacaggaagaactgaaggaaagagcacgggtattgctggaacaggcacgacgcgacgcggctctcaaggccggaaacaagcacaacacgaatacggccacccccttctgtaaccgccagttgtcagaccagcaagatgaggagaggcgtcgtcagctgcgcgagcgagccaggcaactgatcgccgaggctcggtccggcgtgaaaatgtccgaacttccaagctacggagaaatggctgcagaaaagctgaaggagcgcagtaaggcctcaggggagcaaaatagcaagctagttgacttaaaactcaagaagctcctagaagtgcaaccacaagtggccaattccccttctagcgccgctcagaaggctgtaacggaatcctccgagcaagacatgaagtctggcactgaagatttgcgcacagagaggcttcaaaaaactaccgagcgtttcagaaatcccgtcgtctttagtaaggattccactgtccgcaagacacagcttcagtccttttctcagtatattgagaaccggccagagatgaagcgtcagagatctatacaggaagacactaaaaaaggaaacgaggagaaggccgcaattacagagactcagagaaagcccagcgaagatgaggtcttaaataagggtttcaaagatacttcccagtacgttgtgggcgagctcgcagcactggagaatgagcagaagcagattgacactcgagccgcacttgtggaaaagcgcctgaggtacctcatggacactggcagaaacaccgaggaagaggaagctatgatgcaggagtggttcatgcttgtgaataagaagaatgctctgatccgcagaatgaaccagctgtccctgctggaaaaagagcatgacttggagcggagatacgagttattgaatcgggagctgcgcgctatgctagccatcgaagactggcagaaaaccgaagcccagaaacgtagagagcagttgttgcttgatgaactggtggcgctagtgaacaagagagatgccctggttcgagatttggacgcccaagagaagcaggctgaggaggaggacgagcatttagagcgcacccttgagcagaataagggtaagatggccaagaaggaggagaagtgcgttctgcagtag

SEQ ID NO: 54300 - DNA, 933 bp, Artificial Sequence
  derived and/or modified sequence
atggccagcgtgtggaagcgtttgcagcgcgtgggcaagcatgccagcaaattccagtttgtggcctcataccaggaattgatggttgagtgcactaaaaagtggcagccggataagctagtggtggtttggacaagacgctcacgacgcaagtcatccaaggcacactcctggcagcctgggattaaaaacccttatcggggagtagttgtctggccagttccggagaatattgagatcactgtgacactgttcaaggatccccatgccgaggaatttgaagataaagaatggacttttgtcatcgaaaacgagagcccctccggaagacggaaagcgctggccacttcgtccattaatatgaagcagtacgctagccccatgccaacccagaccgatgtgaagcttaagttcaaaccattaagcaaaaaagttgtgagcgctgcactccagttttctctcagttgcatcttcctgagggagggcaaagcaaccgacgaggatatgcagtcacttgcaagcttgatgtcaatgaaacaggccgatattggcaacctggacgactttgaggaggataacgaggacgacgatgagaatagagtgaaccaggaagagaaggctgccaagattactgagctcattaacaaacttaattttctagacgaagcggagaaagacctcgccaccgtgaactccaatcccttcgacgatcccgacgccgcagagttgaatccctttggcgatcccgactcagaggagcctatcaccgagaccgcttcgccccgtaagaccgaggatagcttttataacaattcatacaatccttttaaagaagtgcaaactccccagtatctcaatcccttcgacgaaccagaggcatttgttaccatcaaggattcaccacctcagagtacaaaaaggaaaaatatctag

SEQ ID NO: 54301 - DNA, 3483 bp, Artificial Sequence
  derived and/or modified sequence
atggccagtgtctggaagagactgcagcgggtgggcaagcacgcttccaaatttcagtttgtggcttcataccaggaacttatggttgaatgtacaaagaaatggcagcccgataagcttgtggtggtgtggaccaggaggagccggcgtaagtcctctaaagctcattcctggcaaccaggaatcaaaaatccgtacagaggagtcgttgtctggccggttccagaaaatatcgagataactgtgaccctgtttaaggatccccacgcagaggaatttgaggacaaagagtggacattcgtaattgagaatgaatctccatccggcaggcggaaggctctcgctacatccagcattaatatgaagcagtacgccagccccatgcccactcagaccgatgtgaagttaaaatttaaaccgctttccaaaaaggtagtctctgccgctctgcagttcagtctgtcctgcatcttcctgagggaagggaaggccaccgacgaggacatgcagtctcttgcgtccctgatgagcatgaagcaagcagacatagggaacctcgacgatttcgaggaggacaacgaagatgacgacgagaacagagtgaaccaagaggagaaggcagctaagattaccgagctgataaataagcttaactttctggacgaagcagaaaaggatcttgctactgtcaattctaatcccttcgacgatccagatgcggcagagctcaatccattcggcgatcccgattccgaggagcccattactgaaacagcgtctccgaggaagactgaggacagcttctataacaacagctacaacccttttaaagaggtccagacgccacagtacctgaatcccttcgacgagccagaggctttcgtgaccattaaagacagccctccccagtcgaccaagagaaaaaacattaggcccgtcgatatgtcaaagtacttgtacgctgactctagcaaaaccgaagaggaggaactggatgaatccaatcctttttacgagcccaagtccacacccccaccaaataatcttgttaatcccgtgcaagagctggaaacagaacggagggtgaagcgcaaagctcctgcgcctcccgtgctgtctcctaagaccggtgtgctcaacgagaatacagtgtccgccggaaaagatctaagcacatccccaaagccatcacccatcccatccccagtcctgggcagaaagcctaatgccagtcagtctctcctcgtgtggtgcaaggaggtcaccaagaattaccgaggagttaaaattaccaatttcactaccagctggcgaaacgggttaagcttttgcgcaatcctccaccacttccggccagatctcatcgattacaaatccttgaatcctcaggacatcaaggagaataacaagaaagcctacgacggattcgcaagtataggcatttccagactgttggaaccttcagacatggttcttctggcaatcccagacaaacttaccgtgatgacttacctgtaccagattagggcgcacttctctggccaggaactaaacgttgtgcagatcgaggaaaattcctcaaaatctacatacaaggtgggcaactatgagactgatacaaatagttcagttgaccaagaaaagttttatgctgaattaagtgaccttaagagagagcccgagctccaacagcctattagcggggctgtggacttcttgtcccaggatgattctgtctttgtgaacgattcgggagtaggcgagagcgaaagtgagcatcagacacccgatgaccacctcagtccctcgacagccagcccttactgccgccgaacaaaatctgataccgaaccacaaaaatcgcagcagagtagcggcaggacttccggtagcgatgatcccggaatctgtagcaacaccgacagtacccaggcccaggtactgttgggtaagaaacgtctattaaaggcagaaacactggaactctcagatctgtacgtgagcgacaaaaagaaagatatgagccccccttttatctgcgaagagaccgatgagcagaaacttcagacactggatatcggcagtaacctcgagaaagagaaactggaaaattcgcgttctctggagtgccggagtgaccctgagagccctattaaaaagacctcccttagcccaacctctaagctgggttatagttattcaagagacctggatcttgctaagaaaaaacatgctagcctcagacagacggaatccgatcccgacgccgatcgaacaaccttaaaccatgccgatcacagcagcaagattgtgcagcatcgcctcctgtcccgccaggaggagcttaaagagcgcgctcgcgtgctgttagagcaggcacggcgagatgccgctctgaaagctggcaataagcataatacaaatactgcaaccccattctgcaatagacagctgtcagaccaacaggacgaagagagaaggcgtcagctcagggaacgagcacgtcagctcatcgctgaagcacgctctggcgtcaagatgtctgagctcccgtcttatggagagatggccgcagagaaacttaaagagagatctaaggcttctggggaacagaactccaaacttgttgatcttaaactcaagaaactgctcgaagtgcaacctcaggtggccaacagcccatcttcggccgcacagaaggctgtgacagaatcttcagaacaagacatgaagtctggaacagaagacctgcggaccgagcggttgcaaaagaccaccgaacggtttagaaatcctgttgtattctccaaggacagtacagtcaggaagactcagctgcaaagtttcagccagtacattgagaaccgaccagagatgaaacgtcaacggagcattcaggaagacactaaaaaaggaaatgaggagaaggctgcaattactgaaacacagaggaagccaagtgaagacgaagtgctgaataaaggttttaaagatacctcccagtatgttgtcggggagctagcagccctcgaaaatgaacaaaaacaaatagatactcgcgcagctcttgtggagaagcggctaagatacttgatggatacaggcaggaacacagaagaggaggaagccatgatgcaggaatggttcatgctcgtgaataagaaaaacgccctgatacggaggatgaaccagctgtccctgctggagaaagagcatgatctagagcggagatacgagctgttgaaccgcgagctgagagccatgctcgctatcgaagattggcagaaaactgaggcacagaagaggagggaacagctcttgttggacgaactggtggctctcgtgaacaaaagagatgcactggtcagagatcttgacgcacaggaaaagcaggccgaggaggaggatgagcacctggagcgcacattggagcagaataaagggaagatggctaaaaaggaagaaaagtgcgttcttcagtag

SEQ ID NO: 54302 - protein, 658 aa, Artificial Sequence
  derived and/or modified sequence
MSSQPAGNQTSPGATEDYSYGSWYIDEPQGGEELQPEGEVPSCHTSIPPGLYHACLASLSILVLLLLAMLVRRRQLWPDCVRGRPGLPRPRAVPAAVFMVLLSSLCLLLPDEDALPFLTLASAPSQDGKTEAPRGAWKILGLFYYAALYYPLAACATAGHTAAHLLGSTLSWAHLGVQVWQRAECPQVPKIYKYYSLLASLPLLLGLGFLSLWYPVQLVRSFSRRTGAGSKGLQSSYSEEYLRNLLCRKKLGSSYHTSKHGFLSWARVCLRHCIYTPQPGFHLPLKLVLSATLTGTAIYQVALLLLVGVVPTIQKVRAGVTTDVSYLLAGFGIVLSEDKQEVVELVKHHLWALEVCYISALVLSCLLTFLVLMRSLVTHRTNLRALHRGAALDLSPLHRSPHPSRQAIFCWMSFSAYQTAFICLGLLVQQIIFFLGTTALAFLVLMPVLHGRNLLLFRSLESSWPFWLTLALAVILQNMAAHWVFLETHDGHPQLTNRRVLYAATFLLFPLNVLVGAMVATWRVLLSALYNAIHLGQMDLSLLPPRAATLDPGYYTYRNFLKIEVSQSHPAMTAFCSLLLQAQSLLPRTMAAPQDSLRPGEEDEGMQLLQTKDSMAKGARPGASRGRARWGLAYTLLHNPTLQVFRKTALLGANGAQP

SEQ ID NO: 54303 - DNA, 1977 bp, Artificial Sequence
  derived and/or modified sequence
atgagcagccagcccgccggcaaccagaccagccccggcgccaccgaggactacagctacggcagctggtacatcgacgagccccagggcggcgaggagctgcagcccgagggcgaggtgcccagctgccacaccagcatcccccccggcctgtaccacgcctgcctggccagcctgagcatcctggtgctgctgctgctggccatgctggtgagaagaagacagctgtggcccgactgcgtgagaggcagacccggcctgcccagacccagagccgtgcccgccgccgtgttcatggtgctgctgagcagcctgtgcctgctgctgcccgacgaggacgccctgcccttcctgaccctggccagcgcccccagccaggacggcaagaccgaggcccccagaggcgcctggaagatcctgggcctgttctactacgccgccctgtactaccccctggccgcctgcgccaccgccggccacaccgccgcccacctgctgggcagcaccctgagctgggcccacctgggcgtgcaggtgtggcagagagccgagtgcccccaggtgcccaagatctacaagtactacagcctgctggccagcctgcccctgctgctgggcctgggcttcctgagcctgtggtaccccgtgcagctggtgagaagcttcagcagaagaaccggcgccggcagcaagggcctgcagagcagctacagcgaggagtacctgagaaacctgctgtgcagaaagaagctgggcagcagctaccacaccagcaagcacggcttcctgagctgggccagagtgtgcctgagacactgcatctacaccccccagcccggcttccacctgcccctgaagctggtgctgagcgccaccctgaccggcaccgccatctaccaggtggccctgctgctgctggtgggcgtggtgcccaccatccagaaggtgagagccggcgtgaccaccgacgtgagctacctgctggccggcttcggcatcgtgctgagcgaggacaagcaggaggtggtggagctggtgaagcaccacctgtgggccctggaggtgtgctacatcagcgccctggtgctgagctgcctgctgaccttcctggtgctgatgagaagcctggtgacccacagaaccaacctgagagccctgcacagaggcgccgccctggacctgagccccctgcacagaagcccccaccccagcagacaggccatcttctgctggatgagcttcagcgcctaccagaccgccttcatctgcctgggcctgctggtgcagcagatcatcttcttcctgggcaccaccgccctggccttcctggtgctgatgcccgtgctgcacggcagaaacctgctgctgttcagaagcctggagagcagctggcccttctggctgaccctggccctggccgtgatcctgcagaacatggccgcccactgggtgttcctggagacccacgacggccacccccagctgaccaacagaagagtgctgtacgccgccaccttcctgctgttccccctgaacgtgctggtgggcgccatggtggccacctggagagtgctgctgagcgccctgtacaacgccatccacctgggccagatggacctgagcctgctgccccccagagccgccaccctggaccccggctactacacctacagaaacttcctgaagatcgaggtgagccagagccaccccgccatgaccgccttctgcagcctgctgctgcaggcccagagcctgctgcccagaaccatggccgccccccaggacagcctgagacccggcgaggaggacgagggcatgcagctgctgcagaccaaggacagcatggccaagggcgccagacccggcgccagcagaggcagagccagatggggcctggcctacaccctgctgcacaaccccaccctgcaggtgttcagaaagaccgccctgctgggcgccaacggcgcccagccctag

SEQ ID NO: 54304 - DNA, 1977 bp, Artificial Sequence
  derived and/or modified sequence
atgtcgtctcagcctgccggaaatcagacaagtcctggcgctacagaggattatagctatgggtcatggtatattgatgagccccagggcggtgaggagctgcagccagagggggaggtaccgtcttgccacacatccatcccccccggcctgtaccacgcctgtctggcaagcctctctatcctggtcctgctgcttttggcgatgctggtccgacgcaggcagttgtggcctgactgtgtgagaggccggcccgggctgccccggcctcgagccgtacctgccgctgtgtttatggtactcttaagctccctgtgcctgcttctcccagacgaggatgcccttccttttctgactcttgcttccgcgccgagccaggacggaaagaccgaggcccccaggggcgcctggaagatcctgggcctcttctattacgccgctttgtactaccccttggccgcttgtgctaccgctggccatactgccgcccatctgcttggctcaaccctgagttgggcgcatctgggggtccaggtctggcaacgggccgagtgcccccaagtacccaagatttacaagtattattccctgctggcgtctttgcctctgctcctgggacttgggtttctgtctctgtggtaccccgtccagctcgtgcgttcattctctcgcagaactggtgcgggttctaaaggactccagagctcttattcagaggagtacctaaggaatctgttatgccggaaaaagctgggcagctcctaccatacctctaagcacgggttcctcagttgggcgcgggtatgcttaagacactgcatctatactccgcagccaggatttcatttaccattgaaactggtgttatcagctacactcaccggtacggcaatctaccaggtcgccctccttcttttggtcggtgtggtgcccacaatccaaaaggtccgcgcgggagtgacaactgacgttagctacctcctggcaggctttggaatagttctgagcgaggacaagcaggaagtcgtcgagctggtgaaacaccacctctgggctttagaagtttgctatatttctgctctggtgctctcttgtctcctgacttttttggttcttatgcggagcctcgtgactcaccgaactaatttgcgtgctttgcatcgcggagccgcgctcgatctgtccccactacatcgatcccctcatccatccagacaggcgatcttttgctggatgtctttctctgcttatcagaccgcttttatctgcctgggactgctggtgcagcagattattttctttctgggaacaactgcactcgcatttctcgtgctaatgcccgttctccatgggagaaatctgcttttgttcagaagtctggaaagctcttggccattctggctgaccttagcactcgccgttatactgcagaacatggcagcacattgggttttccttgagacccacgacggacacccccagctgacaaaccggagagtcttgtacgcagctacattccttctgttcccattaaatgtgttggtcggcgcgatggtcgccacctggcgcgtgttactgtcagctttgtacaacgcaattcacttaggacagatggatttgtccctcctgccccctcgcgccgccactcttgacccaggatattacacttaccgcaacttcctgaaaattgaggtgtcacagtctcatcccgctatgaccgctttctgttccctgcttctgcaggcccaatctctgctgcctaggacaatggctgctccccaggactccctaagacccggagaagaggatgaaggaatgcaactgctgcagacaaaagattccatggcaaagggcgcgaggccaggtgcgagccgtgggcgcgctcgttggggcctggcatacacattattgcataatcctacattacaggttttccgaaagacggccctgctgggggccaatggcgctcagccctag

SEQ ID NO: 54305 - DNA, 1977 bp, Artificial Sequence
  derived and/or modified sequence
atgagcagccagcctgctggcaaccagaccagccctggggccacagaggactacagctatggctcctggtacattgatgagccccagggcggggaggagctgcagcctgagggggaggtgcccagctgccacaccagcatccccccaggcctgtaccacgcctgcctggccagcctgagcatcctggtgctgctgctgctggccatgctggtgagaagacggcagctgtggccagactgtgtgcggggccggcccggcctgccccggcccagggctgtgcctgctgctgtgttcatggtgctgctgagcagcctgtgcctgctgctgcctgatgaagatgccctgcccttcctgaccctggccagcgcccccagccaggacggcaagacagaggcccccaggggggcctggaagatcctgggcctcttctactatgctgccctgtactaccccctggccgcctgtgccacagctggccacacagctgcccacctgctgggcagcaccctgtcctgggcccacctgggcgtgcaggtgtggcagagagctgagtgcccccaggtgcccaagatctacaagtactacagcctgctggccagcctgcccctgctgctgggcctgggcttcctgagcctgtggtaccctgtgcagctggtgcgctccttcagcagaagaactggagctggcagcaagggcctgcagagcagctacagcgaggagtacctgaggaacctgctgtgcaggaagaagctgggcagcagctaccacaccagcaagcacggcttcctgtcctgggcccgggtgtgcctgcggcactgcatctacaccccccagcccggcttccacctgcccctgaagctggtgctgagcgccaccctgaccggcacagccatctaccaggtggccctgctgctgctggtgggcgtggtgcccaccatccagaaggtgcgggccggcgtgaccacagatgtgtcctacctgctggccggctttggaattgtgctgtctgaggacaagcaggaggtggtggagctggtgaagcaccacctgtgggccctggaggtgtgctacatcagcgccctggtgctgagctgcctgctgaccttcctggtgctgatgaggagcctggtgacccacaggaccaacctgcgggccctgcacagaggagctgccctggacctgagccccctgcacaggagcccccaccccagccggcaggccatcttctgctggatgtccttcagcgcctaccagacagccttcatctgcctgggcctgctggtgcagcagatcatcttcttcctgggcaccacagccctggccttcctggtgctgatgcctgtgctgcacggcaggaacctgctgctcttccgcagcctggagagctcctggcccttctggctgaccctggccctggccgtcatcctgcagaacatggccgcccactgggtgttcctggagacccatgatggccacccccagctgaccaacagaagagtgctgtatgctgccaccttcctgctcttccccctgaatgtgctggtgggcgccatggtggccacctggagggtgctgctgagcgccctgtacaatgccatccacctgggccagatggacctgagcctgctgccccccagggctgccaccctggaccccggctactacacctacagaaacttcctgaagattgaggtgtcccagagccacccagccatgacagccttctgcagcctgctgctgcaggcccagagcctgctgcccaggaccatggccgccccccaggacagcctgcggcctggagaggaggatgagggcatgcagctgctgcagaccaaggacagcatggccaagggggcccggcctggggccagccggggccgggcccgctggggcctggcctacaccctgctgcacaaccccaccctgcaggtgttcaggaagacagccctgctgggcgccaacggggcccagccctag

SEQ ID NO: 54306 - DNA, 1977 bp, Artificial Sequence
  derived and/or modified sequence
atgagcagccagcccgccggcaaccagaccagccccggcgccaccgaagattattcctatggctcatggtacatagatgagccccaggggggcgaagagctgcagcctgaaggggaggtgccttcttgtcatacaagcatcccccccggcctgtaccacgcctgtctagcaagtctcagcatactcgtattgttactgcttgcaatgctggtgcgcaggagacagctctggccagactgcgtgagaggaagaccaggactaccccgccccagagccgtgcctgctgcggtgtttatggttctactctcttctctatgtctcctattacccgatgaggatgccctcccattcctgacgcttgcttctgcaccgtcacaggacggaaagacagaggcacccagaggcgcctggaagatcctcggcctattctactacgcagccctgtattaccccctcgctgcctgcgctactgctggtcatactgccgctcacttgctcggcagcacactgtcgtgggcccatctaggcgttcaggtctggcagcgcgcagagtgtcctcaggtgccaaagatttataaatactattccctgctggcttccctgccactcctgctgggattagggttcctgagcctatggtaccccgtacaattagtccgatcctttagtcgccgtaccggtgccggtagtaagggcctgcaatcttcttattcagaggagtacctgcggaacctcctttgcagaaaaaaactgggaagcagctaccacaccagtaagcacggatttctgagctgggctcgagtgtgcctgagacactgtatctacactccgcagccaggctttcaccttccacttaagttggtgttgagtgccactcttacagggactgcaatataccaagtagccctattgcttctcgtcggcgtggtgccaacaatccagaaggtgcgcgccggcgtgacaacagacgtctcctaccttctggccggttttggtatcgtcttgagcgaggacaagcaggaggtggtcgagctggttaaacaccacctgtgggccttggaagtgtgctacatttctgcccttgtcctgtcatgtctcctcacatttctcgtcctgatgcggtcccttgttacacaccgtaccaacctgagggcgctgcacaggggagccgctctagatctgtccccactgcaccgaagtccacatccaagccggcaggctattttttgttggatgtcattttctgcctatcaaacagccttcatttgtttgggactgcttgtgcaacagattatattttttttggggaccaccgcgctggccttcctagtcctcatgccagtgctacatgggcgtaacctgctgctcttcagaagtctcgagagctcttggccattctggttgacactggccttggccgttatcttgcagaatatggcagcccattgggtgtttctggagacccacgatggacatccacagctgacgaatagaagagtgctctacgcagcgaccttcctgctgttccctctgaacgtactcgtgggggctatggtcgctacatggcgagtactactgagtgctttatataacgccatccatttaggtcaaatggatctgagcctgctcccccctagggcagccaccctggacccagggtactatacgtatcgaaatttcctgaaaatcgaagtgagtcagtcccaccctgcgatgactgctttctgctctttactccttcaggcgcaatctttgttgcctagaacaatggctgccccacaggactccctgagaccaggcgaagaagacgaaggtatgcaactgctgcagactaaagacagtatggcaaaaggtgcacgccctggggcatctcgcgggcgggcaagatggggtttggcgtatacactattgcacaaccctactctgcaagtctttagaaaaactgcactgctaggggccaacggggcccagccttag

SEQ ID NO: 54307 - DNA, 1977 bp, Artificial Sequence
  derived and/or modified sequence
atgtctagccaacccgctggcaaccagacaagtcctggcgcaacggaggactattcatatggatcatggtacatcgatgagccacagggcggtgaagaattgcagccggaaggcgaggtgccgtcatgccatacctccatcccccctggcctttaccatgcctgtttggcttccctttctatcctggtattgcttctgcttgcgatgttggtccggaggcgccagctttggcccgactgcgttaggggcagacccggactgccccgtccacgagctgttcctgccgcagtgttcatggtcctcctcagtagtctatgcttgcttctcccagacgaagacgccctgcctttcttgacacttgctagtgccccatctcaagatggcaagacagaggctccaaggggagcttggaaaattctgggactattctattacgccgctctctactacccactggcagcttgcgcaactgcgggtcacacagccgcacatctcctgggctctaccctctcttgggcacacctgggtgttcaggtctggcaaagggcagaatgtcctcaggtccccaagatatataagtactacagtctgttggcttcactgccactgctcctggggttagggtttctttcattatggtacccagtgcagctggtccgtagtttttcccgcaggactggagcagggagcaaaggacttcagtccagctacagcgaggagtatttgagaaatctgctctgtcgcaagaagctgggctcttcctatcacacctcaaagcacggctttctgtcttgggcaagggtctgtttgaggcactgcatctatacaccccagccgggattccacctcccgctgaaactcgtgctttccgcgacactgactggaactgcaatctaccaagtggccctactcctgcttgtgggcgtggtgccaacaattcagaaagtgagggcaggagtcaccacagacgtcagctatctgctcgctggtttcggcattgtgctttccgaggataaacaagaggttgtagaactcgtgaagcatcacctgtgggctctggaggtgtgttatatttcagcactggttttgtcatgtctgttaacattccttgtcctgatgcgcagcttggtcactcacagaactaacttgcgcgctcttcatcgcggagctgctttggacctttcccctctccataggtcaccgcatccatctcggcaggctatcttctgttggatgagctttagcgcttatcagaccgcgttcatctgtttgggattactcgtgcaacagatcatcttctttctgggaactacagctctagccttcctggtgctgatgccagtcttgcacggaagaaacctgctgttatttcgtagtctggagagcagctggcccttctggctgactttggcattggctgtcatcctccagaatatggccgcacattgggtttttctcgaaactcatgacggccacccccagctgacaaacaggcgggtgttgtacgctgcaaccttcctgttgtttccgctgaacgttctggtgggggcaatggtggctacctggagagtgctgttgtcggccctgtacaacgccattcacttgggccaaatggacctatccctcctccccccaagggcagcgaccttagatcctggatactatacctatcggaattttctcaagatagaggtttctcagagtcatccagcgatgacagcgttttgctctctattactgcaggcccagagtcttctgccaaggacgatggctgcacctcaggactctctgcggccaggagaggaggatgagggcatgcagctgctgcaaactaaagattccatggcaaagggagctaggcccggtgcatcccgcggacgggcacgctggggcctggcttacactctgttgcacaatcctacccttcaggtctttcgaaagaccgcactcctgggggctaatggtgcgcagccttag

SEQ ID NO: 54308 - protein, 159 aa, Artificial Sequence
  derived and/or modified sequence
MSSQPAGNQTSPGATEDYSYGSWYIDEPQGGEELQPEGEVPSCHTSIPPGLYHACLASLSILVLLLLAMLVRRRQLWPDCVRGRPGLPSPVDFLAGDRPRAVPAAVFMVLLSSLCLLLPDEDALPFLTLASAPSQDGKTEAPRGNLPKITELRLVRAWI

SEQ ID NO: 54309 - DNA, 480 bp, Artificial Sequence
  derived and/or modified sequence
atgagcagccagcccgccggcaaccagaccagccccggcgccaccgaggactacagctacggcagctggtacatcgacgagccccagggcggcgaggagctgcagcccgagggcgaggtgcccagctgccacaccagcatcccccccggcctgtaccacgcctgcctggccagcctgagcatcctggtgctgctgctgctggccatgctggtgagaagaagacagctgtggcccgactgcgtgagaggcagacccggcctgcccagccccgtggacttcctggccggcgacagacccagagccgtgcccgccgccgtgttcatggtgctgctgagcagcctgtgcctgctgctgcccgacgaggacgccctgcccttcctgaccctggccagcgcccccagccaggacggcaagaccgaggcccccagaggcaacctgcccaagatcaccgagctgagactggtgagagcctggatctag

SEQ ID NO: 54310 - DNA, 480 bp, Artificial Sequence
  derived and/or modified sequence
atgtcctcacagcctgccggtaatcaaacctctccaggagctaccgaagactattcctatggaagctggtacatcgatgaaccccagggaggggaggaactgcagccggagggggaggtgccctcatgccacacatcaattcctcctggtctctatcatgcctgcttggcatccttaagtatcttggttctgctgcttctcgcaatgctggtaaggcgcaggcaactatggcccgactgcgtcaggggtagacctggcctgccatctcctgtagatttcctcgcaggagatcggccccgggctgttcctgccgccgtgttcatggtgcttctctcttctctctgtctgctacttccagacgaggatgcgctgccattccttacgcttgcttccgcacctagccaggatggaaagactgaggccccccgagggaacctgcccaagataaccgagttgcggctggttagagcctggatctag

SEQ ID NO: 54311 - DNA, 480 bp, Artificial Sequence
  derived and/or modified sequence
atgagcagccagcctgctggcaaccagaccagccctggggccacagaggactacagctatggctcctggtacattgatgagccccagggcggggaggagctgcagcctgagggggaggtgcccagctgccacaccagcatccccccaggcctgtaccacgcctgcctggccagcctgagcatcctggtgctgctgctgctggccatgctggtgagaagacggcagctgtggccagactgtgtgcggggccggcccggcctgcccagccctgtggacttcctggccggggaccggcccagggctgtgcctgctgctgtgttcatggtgctgctgagcagcctgtgcctgctgctgcctgatgaagatgccctgcccttcctgaccctggccagcgcccccagccaggacggcaagacagaggccccccggggcaacctgcccaagatcacagagctgcggctggtgcgggcctggatctag

SEQ ID NO: 54312 - DNA, 480 bp, Artificial Sequence
  derived and/or modified sequence
atgagcagccagcccgccggcaaccagaccagccccggcgccaccgaagattattcatatggaagttggtacattgacgagcctcagggcggcgaagagctgcaacccgagggcgaggtgccatcatgccatacgtctatccctccaggcctgtatcatgcgtgcctggcgtcgttatcaattttagtactgctgcttcttgccatgcttgtacgaagacggcagctttggcccgattgtgtgcgaggccgacccggccttccaagtcctgtcgattttcttgctggcgatcgcccaagggctgtgcccgcagccgtctttatggtgctgcttagttcactctgtctgctgctgcccgacgaagatgccctgccatttctaaccctggccagtgcgcctagccaagacgggaagaccgaggccccaagagggaacttgcctaagatcacagagcttcgcctggtccgcgcctggatctag

SEQ ID NO: 54313 - DNA, 480 bp, Artificial Sequence
  derived and/or modified sequence
atgtcaagccagccagcgggaaatcagacctctccgggtgccacagaagactattcttatggaagctggtatatcgacgaaccacaggggggtgaggagctccagcccgaaggcgaagtgccttcctgtcacacaagtattccacccggtctataccacgcctgcctcgccagcctctcaattctggtcctgctcctgcttgccatgttagttcgtcggcgacagctctggcccgactgcgtaagagggaggcccggtctgccatccccagtggactttctggccggagaccgtcccagagccgttcccgcagccgtattcatggtccttctgtcttcactgtgcctgttacttcctgatgaagatgcactgcctttcctaaccctcgcgagcgcaccgtcccaggacgggaaaacggaggcaccacgcggtaacctcccaaaaataacagaactgcggcttgtgcgggcatggatatag

SEQ ID NO: 54314 - DNA, 1935 bp, Artificial Sequence
  derived and/or modified sequence
agatcaaacaccttttaaagcaggtgctggggacacttctcagggccaactgccgagaccacacaaccagccacccctctaggatcccagcccagctggtgctgggctcagaggagaaggccccgtgttgggagcaccctgcttgcctggagggacaagtttccgggagagatcaataaaggaaaggaaagagacaaggaagggagaggtcaggagagcgcttgattggaggagaagggccagagaatgtcgtcccagccagcagggaaccagacctcccccggggccacagaggactactcctatggcagctggtacatcgatgagccccaggggggcgaggagctccagccagagggggaagtgccctcctgccacaccagcataccacccggcctgtaccacgcctgcctggcctcgctgtcaatccttgtgctgctgctcctggccatgctggtgaggcgccgccagctctggcctgactgtgtgcgtggcaggcccggcctgcccagccctgtggatttcttggctggggacaggccccgggcagtgcctgctgctgttttcatggtcctcctgagctccctgtgtttgctgctccccgacgaggacgcattgcccttcctgactctcgcctcagcacccagccaagatgggaaaactgaggctccaagaggtaacttgcccaagatcacagagttgagactagtcagagcctggatttgaacctagtgttcttgcccactgaacgtgctgaagggcttggaagctggagaccgaagagaggcctgggtgggctcactgcaggccccatgtctgcccctccagcatgggtctctctgcttgtttcaccttccaggggcctggaagatactgggactgttctattatgctgccctctactaccctctggctgcctgtgccacggctggccacacagctgcacacctgctcggcagcacgctgtcctgggcccaccttggggtccaggtctggcagagggcagagtgtccccaggtgcccaaggtaaccgctgatcacaatggcctagggcagaggggcgcacagagcaacctactcaaaccacagtgcctcctttgagctctgattctatgatgggccgccctgcagccttccattgtgcatgggattccatgccttcaaacatgtgccccttccaagcttggctgctctgcaggagaggcagggaacaaggtggctgggcccagccctcaggaactttaagtctaggaggtggcggagaaggggaagtgggcagagtagggggaagagaaagcctgaaatggcccccacccccaatgcctgtgttagtgatcccccagcttccctttggtcaggctggagagggaatgggagtgaagcttgatggaggccggcaagtgcgaagtcagggatggtctaagagggctgagaggagaattccggaacctcaggaccttgctcactggctgctggctggggctgtgaagctgtccagtctagaactcaaagagtgatggtacaggctttagagccagacaacctgagtgtgaatccagcttcaccacttcattcattcactcacccattcattcaacaacatatttgaagcacatactttgtaccagggacatttccaggcactggactacagctatgaacaagacaaacagtccctagcctcccaagagccgtcacttcagaagggcagacatgacacgcaaacaaaatgatgccaggtggtaccaagtgccttggggaaacagtgccacctttctgagaccgtttctccatccgtccatggagctgataacaccagtccctcagggtggaggtgaagactaagaggttgctttgagagggggaacttggtggctttttttcaccacctagaacctggcacatactaagctctcaataaaagtatattgaacc

SEQ ID NO: 54315 - protein, 860 aa, Artificial Sequence
  derived and/or modified sequence
MMSIKAFTLVSAVERELLMGDKERVNIECVECCGRDLYVGTNDCFVYHFLLEERPVPAGPATFTATKQLQRHLGFKKPVNELRAASALNRLLVLCDNSISLVNMLNLEPVPSGARIKGAATFALNENPVSGDPFCVEVCIISVKRRTIQMFLVYEDRVQIVKEVSTAEQPLAVAVDGHFLCLALTTQYIIHNYSTGVSQDLFPYCSEERPPIVKRIGRQEFLLAGPGGLGMFATVAGISQRAPVHWSENVIGAAVSFPYVIALDDEFITVHSMLDQQQKQTLPFKEGHILQDFEGRVIVATSKGVYILVPLPLEKQIQDLLASRRVEEALVLAKGARRNIPKEKFQVMYRRILQQAGFIQFAQLQFLEAKELFRSGQLDVRELISLYPFLLPTSSSFTRSHPPLHEYADLNQLTQGDQEKMAKCKRFLMSYLNEVRSTEVANGYKEDIDTALLKLYAEADHDSLLDLLVTENFCLLTDSAAWLEKHKKYFALGLLYHYNNQDAAAVQLWVNIVNGDVQDSTRSDLYEYIVDFLTYCLDEELVWAYADWVLQKSEEVGVQVFTKRPLDEQQKNSFNPDDIINCLKKYPKALVKYLEHLVIDKRLQKEEYHTHLAVLYLEEVLLQRASASGKGAEATETQAKLRRLLQKSDLYRVHFLLERLQGAGLPMESAILHGKLGEHEKALHILVHELQDFAAAEDYCLWCSEGRDPPHRQQLFHTLLAIYLHAGPTAHELAVAAVDLLNRHATEFDAAQVLQMLPDTWSVQLLCPFLMGAMRDSIHARRTMQVALGLARSENLIYTYDKMKLKGSSIQLSDKKLCQICQNPFCEPVFVRYPNGGLVHTHCAASRHTNPSSSSPGTRT

SEQ ID NO: 54316 - protein, 315 aa, Artificial Sequence
  derived and/or modified sequence
MLIGSCRKVKRSVQVFTKRPLDEQQKNSFNPDDIINCLKKYPKALVKYLEHLVIDKRLQKEEYHTHLAVLYLEEVLLQRASASGKGAEATETQAKLRRLLQKSDLYRVHFLLERLQGAGLPMESAILHGKLGEHEKALHILVHELQDFAAAEDYCLWCSEGRDPPHRQQLFHTLLAIYLHAGPTAHELAVAAVDLLNRHATEFDAAQVLQMLPDTWSVQLLCPFLMGAMRDSIHARRTMQVALGLARSENLIYTYDKMKLKGSSIQLSDKKLCQICQNPFCEPVFVRYPNGGLVHTHCAASRHTNPSSSSPGTRT

SEQ ID NO: 54317 - DNA, 2583 bp, Artificial Sequence
  derived and/or modified sequence
atgatgagcatcaaggccttcaccctggtgagcgccgtggagagagagctgctgatgggcgacaaggagagagtgaacatcgagtgcgtggagtgctgcggcagagacctgtacgtgggcaccaacgactgcttcgtgtaccacttcctgctggaggagagacccgtgcccgccggccccgccaccttcaccgccaccaagcagctgcagagacacctgggcttcaagaagcccgtgaacgagctgagagccgccagcgccctgaacagactgctggtgctgtgcgacaacagcatcagcctggtgaacatgctgaacctggagcccgtgcccagcggcgccagaatcaagggcgccgccaccttcgccctgaacgagaaccccgtgagcggcgaccccttctgcgtggaggtgtgcatcatcagcgtgaagagaagaaccatccagatgttcctggtgtacgaggacagagtgcagatcgtgaaggaggtgagcaccgccgagcagcccctggccgtggccgtggacggccacttcctgtgcctggccctgaccacccagtacatcatccacaactacagcaccggcgtgagccaggacctgttcccctactgcagcgaggagagaccccccatcgtgaagagaatcggcagacaggagttcctgctggccggccccggcggcctgggcatgttcgccaccgtggccggcatcagccagagagcccccgtgcactggagcgagaacgtgatcggcgccgccgtgagcttcccctacgtgatcgccctggacgacgagttcatcaccgtgcacagcatgctggaccagcagcagaagcagaccctgcccttcaaggagggccacatcctgcaggacttcgagggcagagtgatcgtggccaccagcaagggcgtgtacatcctggtgcccctgcccctggagaagcagatccaggacctgctggccagcagaagagtggaggaggccctggtgctggccaagggcgccagaagaaacatccccaaggagaagttccaggtgatgtacagaagaatcctgcagcaggccggcttcatccagttcgcccagctgcagttcctggaggccaaggagctgttcagaagcggccagctggacgtgagagagctgatcagcctgtaccccttcctgctgcccaccagcagcagcttcaccagaagccacccccccctgcacgagtacgccgacctgaaccagctgacccagggcgaccaggagaagatggccaagtgcaagagattcctgatgagctacctgaacgaggtgagaagcaccgaggtggccaacggctacaaggaggacatcgacaccgccctgctgaagctgtacgccgaggccgaccacgacagcctgctggacctgctggtgaccgagaacttctgcctgctgaccgacagcgccgcctggctggagaagcacaagaagtacttcgccctgggcctgctgtaccactacaacaaccaggacgccgccgccgtgcagctgtgggtgaacatcgtgaacggcgacgtgcaggacagcaccagaagcgacctgtacgagtacatcgtggacttcctgacctactgcctggacgaggagctggtgtgggcctacgccgactgggtgctgcagaagagcgaggaggtgggcgtgcaggtgttcaccaagagacccctggacgagcagcagaagaacagcttcaaccccgacgacatcatcaactgcctgaagaagtaccccaaggccctggtgaagtacctggagcacctggtgatcgacaagagactgcagaaggaggagtaccacacccacctggccgtgctgtacctggaggaggtgctgctgcagagagccagcgccagcggcaagggcgccgaggccaccgagacccaggccaagctgagaagactgctgcagaagagcgacctgtacagagtgcacttcctgctggagagactgcagggcgccggcctgcccatggagagcgccatcctgcacggcaagctgggcgagcacgagaaggccctgcacatcctggtgcacgagctgcaggacttcgccgccgccgaggactactgcctgtggtgcagcgagggcagagaccccccccacagacagcagctgttccacaccctgctggccatctacctgcacgccggccccaccgcccacgagctggccgtggccgccgtggacctgctgaacagacacgccaccgagttcgacgccgcccaggtgctgcagatgctgcccgacacctggagcgtgcagctgctgtgccccttcctgatgggcgccatgagagacagcatccacgccagaagaaccatgcaggtggccctgggcctggccagaagcgagaacctgatctacacctacgacaagatgaagctgaagggcagcagcatccagctgagcgacaagaagctgtgccagatctgccagaaccccttctgcgagcccgtgttcgtgagataccccaacggcggcctggtgcacacccactgcgccgccagcagacacaccaaccccagcagcagcagccccggcaccagaacctag

SEQ ID NO: 54318 - DNA, 948 bp, Artificial Sequence
  derived and/or modified sequence
atgctgatcggcagctgcagaaaggtgaagagaagcgtgcaggtgttcaccaagagacccctggacgagcagcagaagaacagcttcaaccccgacgacatcatcaactgcctgaagaagtaccccaaggccctggtgaagtacctggagcacctggtgatcgacaagagactgcagaaggaggagtaccacacccacctggccgtgctgtacctggaggaggtgctgctgcagagagccagcgccagcggcaagggcgccgaggccaccgagacccaggccaagctgagaagactgctgcagaagagcgacctgtacagagtgcacttcctgctggagagactgcagggcgccggcctgcccatggagagcgccatcctgcacggcaagctgggcgagcacgagaaggccctgcacatcctggtgcacgagctgcaggacttcgccgccgccgaggactactgcctgtggtgcagcgagggcagagaccccccccacagacagcagctgttccacaccctgctggccatctacctgcacgccggccccaccgcccacgagctggccgtggccgccgtggacctgctgaacagacacgccaccgagttcgacgccgcccaggtgctgcagatgctgcccgacacctggagcgtgcagctgctgtgccccttcctgatgggcgccatgagagacagcatccacgccagaagaaccatgcaggtggccctgggcctggccagaagcgagaacctgatctacacctacgacaagatgaagctgaagggcagcagcatccagctgagcgacaagaagctgtgccagatctgccagaaccccttctgcgagcccgtgttcgtgagataccccaacggcggcctggtgcacacccactgcgccgccagcagacacaccaaccccagcagcagcagccccggcaccagaacctag

SEQ ID NO: 54319 - DNA, 2583 bp, Artificial Sequence
  derived and/or modified sequence
atgatgtcaattaaagcctttacactggtcagcgcagtggagagggaactgcttatgggggataaagaacgcgtcaatatcgaatgcgtagagtgctgcggacgcgacctctatgtggggaccaacgattgtttcgtctaccactttctgttggaagagcggccagtgcccgccggacctgctacctttactgcgacaaagcagttgcaacggcacctgggatttaagaagccagttaacgaactccgggcagcctcagctctgaacaggctactggtactgtgtgacaactccattagccttgtcaatatgctgaatctggagcccgttccatccggcgctagaatcaaaggcgcagccacgttcgctctcaacgaaaatccagtttccggcgaccctttctgcgtcgaagtttgcatcattagcgtgaaacgcagaactatacagatgttcctggtgtacgaggaccgggtgcaaatcgtaaaggaagtgagtactgccgagcagcctctggctgtagccgtagacggccactttctctgtctggcactaacaacacagtatattatacacaactacagtaccggcgtctcccaggacctgtttccatattgtagtgaggagagaccccctattgtgaaacgtatcggacggcaggaattcctgctggcggggcccggaggcttagggatgttcgctactgtcgctgggatttctcaaagagccccagtgcactggagcgagaacgtaatcggtgctgctgtttctttcccctacgtgatcgccctggatgatgaatttattacagttcactccatgttggatcaacagcagaagcagaccctgccttttaaggaggggcatattctgcaggatttcgagggccgtgtaattgtcgccacctctaaaggcgtgtatatactggtgcccttgccactggagaaacagatccaggaccttctcgccagccgcagggtggaggaggcactggtgttggccaagggggcccgaagaaacatcccaaaggagaagttccaagtcatgtatcgtagaatcctccagcaggcaggcttcatccagtttgcccagctgcagttcttggaggccaaggaactgtttcggagcggccagctagacgtcagagaactcatatctctctacccatttctgctgcctacttccagctccttcaccaggtcgcacccccccctgcatgagtacgccgaccttaatcagctgacacagggggatcaggaaaagatggccaagtgcaagcgctttttaatgtcatatctgaacgaagtccggtcaacggaggtcgccaacggctataaggaggacattgatacagccctccttaagttatatgcggaggctgatcacgacagcttattggacctcctggtgacggaaaatttttgtctcctaaccgattccgcagcatggctggaaaaacataagaaatacttcgcattgggtctactttaccattataataaccaggatgccgcagcagtgcagctctgggtgaatatcgttaacggggacgtgcaggacagtacaaggtccgatctttacgagtatatcgttgactttctgacgtattgtcttgacgaggagcttgtctgggcctacgcagactgggtcttacagaagtccgaggaggtgggcgtccaggtgttcactaagcgaccgcttgacgagcagcaaaagaactctttcaatccagatgacatcatcaactgcctgaaaaagtaccctaaagctctcgtaaagtaccttgaacacctggtgattgataaacgacttcagaaggaagaatatcacactcatctggctgtgctatatctggaggaggtcctgttgcagcgagccagcgccagtggcaaaggcgcggaggccactgagactcaggccaagctcagacggcttcttcaaaaaagcgacttgtatcgtgtgcattttctcctggagaggctacagggtgcaggtctccccatggaatctgctatattgcatgggaagttgggcgagcatgagaaggccctgcatatactggtccatgagctgcaggattttgcggccgccgaagactactgcctttggtgcagtgaaggtcgggacccccctcatcgccagcagcttttccacacgctcctcgctatttacctgcacgccggacctactgctcacgagctcgctgttgccgccgtggacttgctgaacagacacgctactgagttcgacgccgcacaggtcctgcagatgctccctgacacatggagtgttcaactgctctgcccctttctcatgggggcaatgcgtgactccatccacgccaggcgcacaatgcaagtggcattgggactggccaggtctgagaacctcatttatacctatgataaaatgaagctcaaggggagctccattcagctgtcggataagaagctgtgccaaatctgccagaaccccttctgtgagccagtgttcgtgcgatatcctaacggaggtttagtgcacacccactgtgctgcctctagacacacaaatcccagttcatcctcccctggtacccgaacatag

SEQ ID NO: 54320 - DNA, 2583 bp, Artificial Sequence
  derived and/or modified sequence
atgatgtctattaaggccttcactttagtgtccgccgtagaacgagaactgctaatgggcgataaggagcgggtgaacattgagtgtgttgagtgttgtgggcgagacctgtacgtaggcactaacgactgctttgtgtatcactttctgctcgaggagcgaccagtccccgctggtcctgccaccttcaccgcgactaagcagctgcagagacacctgggattcaaaaaacctgtgaacgagctgagagccgcaagcgcattgaacagactgctggtgttgtgcgataatagtatttccctagttaatatgctgaatctggagcctgtacccagtggagcacgcatcaaaggggctgcaacttttgctttaaacgaaaatccagtaagcggagatcccttctgtgttgaagtgtgcatcatcagtgtcaaaagaaggactatccagatgtttctcgtgtacgaggaccgggtacagatagtgaaagaagtcagcaccgccgaacagcctctggcagttgcggtcgatgggcacttcctttgtctggctttgaccacccagtacatcatccacaactactccaccggtgtatctcaagatctgttcccttactgctccgaggagcgccctcccatcgtgaagaggatcggtagacaggaattcctcctggccggcccaggaggactggggatgttcgccaccgttgccggcatcagccagcgtgcccctgtacattggagcgagaacgtgattggggctgccgttagttttccatacgtgatagcactggacgatgagttcatcacagtccactcaatgctggaccaacaacaaaaacagactcttccttttaaggaggggcatattctacaagacttcgaggggagagtaatagtggctacctcaaagggggtctatatcctcgtaccgttgcccttggagaagcaaattcaggatcttttggcaagtagaagagtggaagaggcactggtcctggctaagggcgcccgtaggaatattcccaaggaaaaatttcaagtgatgtatcgaagaatcttgcaacaggcaggcttcatacagttcgctcagcttcagttcctcgaggctaaagaactgtttcgaagcggacagttggatgtgagagaactcatttcgctgtatccatttctattaccaacatccagttctttcactcggagccatccccccctgcatgagtacgctgatttgaaccagcttacacagggcgaccaggaaaagatggcgaagtgcaagcgatttcttatgtcttacctaaacgaagtgcgtagcacggaagtcgctaatggttacaaagaagacatcgacactgccctgctaaaactctacgcggaggcagaccatgactccctcctggacctcttagtgaccgaaaatttctgtttgctaacggactctgccgcatggctcgagaaacataagaagtatttcgcactcggactgctctatcattataacaaccaagatgctgctgctgtccaattgtgggtgaatatcgtgaacggagacgtgcaagattctacacgctccgacctgtatgagtacatcgtcgattttctcacttattgtttagatgaggaactcgtctgggcctatgctgactgggtgttacaaaaaagcgaagaggtgggggtgcaggtctttaccaagcgcccgttagatgaacagcagaagaactcctttaacccagacgatatcattaattgcttaaaaaaatatcccaaagctctggtcaagtatctcgaacacttagttatcgataagcggttgcagaaggaggaataccacacacatctcgccgtgctttaccttgaggaggtacttctacagagggccagcgccagcggcaaaggtgctgaggctaccgaaactcaagccaagctgaggcgcctcttacaaaagagcgacctttacagggtgcactttctgctcgagcggctgcagggcgccggacttcccatggagagtgcaatcctacacggcaagctgggagaacacgagaaggccctacacatcctggtccacgagcttcaggactttgccgcagcagaggactattgcctgtggtgctctgaaggtcgggacccaccccatcgccaacagttgtttcacactctgctggctatttacctgcacgcaggacctacagcccatgagctggccgtggcagcggtcgaccttttgaacaggcatgctactgagtttgacgctgctcaggtgcttcaaatgttgcctgacacttggagcgtgcagctgctgtgcccattccttatgggtgccatgagagatagcattcacgcacgtcgcaccatgcaggttgctctcggtttggcccgttccgaaaatctgatttacacatatgataaaatgaaactgaagggcagttcaatacagctctcagataaaaagctgtgtcagatttgtcagaatcctttttgtgagcccgtctttgtcagataccctaacggcggcttggtgcatacgcattgcgccgcttcccgacatacaaatccgagtagctccagcccagggacaagaacatag

SEQ ID NO: 54321 - DNA, 948 bp, Artificial Sequence
  derived and/or modified sequence
atgttgattggctcctgcaggaaggtaaaaagaagcgtgcaagtgtttaccaagaggcccctcgacgaacagcagaaaaatagttttaacccagatgacatcatcaactgcctgaaaaaatatcctaaggccctggtgaagtacttagagcacctagtgatcgacaaacggttacagaaagaggagtaccatactcacctggccgtgctgtacctcgaggaggttctcctccagagagctagcgcttccgggaagggcgccgaggcaacggagactcaggccaaactgcggagacttctgcaaaagagcgatctgtacagagtgcacttcctcttggagcgcttacagggagcgggattaccgatggaatccgccattctgcacgggaagttaggcgaacacgagaaggccctgcacattttggtgcacgagctgcaagatttcgccgctgcagaagattactgcctgtggtgtagcgaggggcgggatccgcctcaccgacaacagctcttccacacgctgctcgctatttacctacatgccgggccaactgcccacgagctagctgttgcagcagtggatctgttgaatagacacgctactgaattcgacgcggcccaagttctgcagatgttaccggatacttggagtgtacaattattatgcccctttctgatgggggccatgcgcgacagtatccacgcccgtagaacgatgcaggtcgctctgggtctggccaggtctgagaatcttatctacacatatgataaaatgaaattaaaagggtcatcaatccagctaagcgacaaaaaactgtgccagatatgccagaatcccttttgtgaacccgtattcgtgaggtaccctaatggcggtctggttcacacacactgtgcagcctcaagacatacaaacccaagcagtagttcccccggtacgagaacctag

SEQ ID NO: 54322 - DNA, 2583 bp, Artificial Sequence
  derived and/or modified sequence
atgatgagcatcaaggccttcaccctggtgtctgctgtggagcgggagctgctgatgggagacaaggagcgggtgaacattgaatgtgtggagtgctgcggccgggacctgtatgtgggcaccaatgactgctttgtgtaccacttcctgctggaggagaggcctgtgcctgctggccctgccaccttcaccgccaccaagcagctgcagaggcacctgggcttcaagaagcctgtgaatgagctgcgggccgccagcgccctgaaccggctgctggtgctgtgtgacaacagcatcagcctggtgaacatgctgaacctggagcctgtgcccagcggggcccgcatcaagggagctgccacctttgccctgaatgaaaatcctgtgtctggggaccccttctgtgtggaggtgtgcatcatctctgtgaagaggaggaccatccagatgttcctggtgtatgaagatagagtgcagatcgtgaaggaggtgtccacagctgagcagcccctggccgtggccgtggatggccacttcctgtgcctggccctgaccacccagtacatcatccacaactacagcactggagtgtcccaggacctcttcccctactgcagcgaggagcggccccccatcgtgaagagaattggccggcaggagttcctgctggccggccctgggggcctgggcatgtttgccaccgtggccggcatcagccagagggcccctgtgcactggagcgaaaatgtgattggagctgctgtgtccttcccctacgtgattgccctggatgatgagttcatcaccgtgcacagcatgctggaccagcagcagaagcagaccctgcccttcaaggagggccacatcctgcaggactttgagggccgggtcatcgtggccaccagcaaaggagtgtacatcctggtgcccctgcccctggagaagcagatccaggacctgctggccagccggcgggtggaggaggccctggtgctggccaagggggcccggaggaacatccccaaggagaagttccaggtgatgtaccgccgcatcctgcagcaggccggcttcatccagtttgcccagctgcagttcctggaggccaaggagctgttccgcagcggccagctggatgtgcgggagctgatcagcctgtaccccttcctgctgcccaccagcagcagcttcaccaggagccacccccccctgcatgaatatgctgacctgaaccagctgacccagggcgaccaggagaagatggccaagtgcaagcgcttcctgatgagctacctgaatgaggtgcgcagcacagaggtggccaacggctacaaggaggacatcgacacagccctgctgaagctgtatgcagaggccgaccatgacagcctgctggacctgctggtgacagagaacttctgcctgctgacagattctgctgcctggctggagaagcacaagaagtactttgccctgggcctgctgtaccactacaacaaccaggatgctgctgctgtgcagctgtgggtgaacatcgtgaatggagatgtgcaggacagcaccaggagtgacctgtatgagtacatcgtggacttcctgacctactgcctggatgaggagctggtgtgggcctatgctgactgggtgctgcagaagtctgaggaggtgggcgtgcaggtgttcaccaagaggcccctggatgagcagcagaagaacagcttcaacccagatgacatcatcaactgcctgaagaagtaccccaaggccctggtgaagtacctggagcacctggtgattgacaagaggctgcagaaggaggagtaccacacccacctggccgtgctgtacctggaggaggtgctgctgcagagggccagcgccagcgggaaaggagctgaggccacagagacccaggccaagctgcggcggctgctgcagaagagtgacctgtacagagtgcacttcctgctggagcggctgcagggcgccggcctgcccatggagagcgccatcctgcacggcaagctgggggagcacgagaaggccctgcacatcctggtgcatgagctgcaggactttgctgctgctgaggactactgcctgtggtgcagcgagggccgggaccccccccaccggcagcagctgttccacaccctgctggccatctacctgcacgccggccccacagcccacgagctggccgtggccgctgtggacctgctgaacagacatgccacagaatttgatgctgcccaggtgctgcagatgctgcctgacacctggagcgtgcagctgctgtgccccttcctgatgggcgccatgagggacagcatccacgcccggaggaccatgcaggtggccctgggcctggcccggtctgagaacctgatctacacctatgacaagatgaagctgaagggcagcagcatccagctgagtgacaagaagctgtgccagatctgccagaaccccttctgtgagcctgtgtttgtgcgctacccaaatggaggcctggtgcacacccactgtgccgccagccgccacaccaaccccagcagcagcagccctggcaccaggacatag

SEQ ID NO: 54323 - DNA, 948 bp, Artificial Sequence
  derived and/or modified sequence
atgctgattggcagctgcaggaaggtgaagaggtctgtgcaggtgttcaccaagaggcccctggatgagcagcagaagaacagcttcaacccagatgacatcatcaactgcctgaagaagtaccccaaggccctggtgaagtacctggagcacctggtgattgacaagaggctgcagaaggaggagtaccacacccacctggccgtgctgtacctggaggaggtgctgctgcagagggccagcgccagcgggaaaggagctgaggccacagagacccaggccaagctgcggcggctgctgcagaagagtgacctgtacagagtgcacttcctgctggagcggctgcagggcgccggcctgcccatggagagcgccatcctgcacggcaagctgggggagcacgagaaggccctgcacatcctggtgcatgagctgcaggactttgctgctgctgaggactactgcctgtggtgcagcgagggccgggaccccccccaccggcagcagctgttccacaccctgctggccatctacctgcatgctggccccacagcccacgagctggccgtggccgctgtggacctgctgaacagacatgccacagaatttgatgctgcccaggtgctgcagatgctgcctgacacctggagcgtgcagctgctgtgccccttcctgatgggcgccatgagggacagcatccacgcccggaggaccatgcaggtggccctgggcctggcccggagtgaaaatctcatctacacctatgacaagatgaagctgaagggcagcagcatccagctgagtgacaagaagctgtgccagatctgccagaaccccttctgtgagcctgtgtttgtgcgctaccccaacggcggcctggtgcacacccactgtgccgccagccgccacaccaaccccagcagcagcagccctggcaccaggacatag

SEQ ID NO: 54324 - DNA, 2583 bp, Artificial Sequence
  derived and/or modified sequence
atgatgagcatcaaggccttcaccctggtgagcgccgtggagcgggagcttttgatgggagataaagagcgggtgaatatcgaatgtgtagaatgctgcggcagggacctgtacgtgggtaccaatgactgctttgtataccacttcttgctggaagaaagacccgtgcctgccggcccggctactttcactgccaccaagcagctgcagagacacctgggcttcaaaaagcccgtaaacgaactgcgcgccgcaagcgcactgaatagactcctggtcctgtgtgacaattctattagtcttgttaatatgctgaaccttgaaccagtgcccagcggagcgcggatcaagggagcggcaacattcgctcttaacgaaaatcctgtgtcaggggatcccttctgcgtagaagtctgtattatcagcgtgaagcggcgtaccatccagatgttcctggtgtatgaggatagggtacagattgttaaggaagtgtccacagccgagcagccactggccgttgctgtggatggccacttcctctgtctcgctctgacgacccagtatattatccacaattactctacaggcgtcagccaggatctgttcccctactgctcagaggaacggccccctatcgttaagcggatcgggagacaggagtttctactcgccgggcccggtggtctaggaatgttcgctacagtggccggtatcagccaacgagcccctgttcattggagtgaaaacgtcattggcgctgcagtctcttttccgtacgtgatcgccctggacgatgaattcatcaccgtgcactccatgctcgaccagcagcagaagcagaccctgccatttaaggagggccatatcctccaagatttcgaagggcgcgtcatcgttgcgacttccaaaggggtgtacatcctggtccccctgcccttagagaagcagattcaggacctcctggcatctagaagggtagaggaagcactggtattagccaaaggcgccagaaggaacataccaaaggaaaagttccaggtgatgtaccgcagaattcttcagcaggccggtttcatccagttcgcccagctgcaatttttggaagctaaggagctgtttcgctctgggcagcttgacgtgagagaattgatttccctgtatcccttcctccttcccacatcctcaagcttcaccagatcccaccccccactccacgagtacgccgaccttaaccagctcactcagggtgatcaggagaaaatggcaaagtgtaaacgtttcctgatgtcttatctcaacgaagtgaggagcacagaagtcgccaacgggtacaaagaggatattgatacagccctgctgaaattatacgcagaagctgaccacgactcacttctggatctgttggttaccgaaaacttctgcctcctgactgactctgcagcatggttggaaaaacataaaaagtattttgccctgggactgttgtatcactataacaaccaggatgcagccgcagtgcagttatgggtcaatatcgtaaatggagatgttcaggatagcacccgttctgatctttacgagtatatcgtggacttcctcacgtactgcctggatgaagaactagtttgggcatacgctgattgggtgcttcagaaatcggaggaggttggcgtgcaggtcttcacaaaacgtccactggacgaacagcagaaaaatagttttaacccagatgatatcatcaattgtctgaagaagtatccaaaggcacttgtcaaatacctggagcacctggtcatcgataagcggctgcagaaagaggagtaccacacccacttagcggtactgtatctggaagaagtactcctacaacgggccagcgcctccggcaagggggcagaagcaacggagacccaggccaagctgcgaaggctcctccagaagagcgatctctaccgagttcattttctcctggagcgcctgcaaggagcagggctcccaatggaaagcgccattctccatgggaagctcggggaacatgagaaggccctgcacatccttgtgcatgagttacaggatttcgctgccgcggaggattattgcctgtggtgttcagaggggagagaccccccgcatcgccagcagctgttccataccctcctggcaatttatctgcacgcagggcccaccgcgcatgaattggctgtcgccgccgtggatttgcttaaccggcacgcaaccgagttcgacgctgcgcaggtgttgcagatgcttcccgatacgtggagcgtgcagctcttgtgcccctttctgatgggagccatgcgcgattccattcatgctcgcaggacaatgcaggtggctttgggcctggcacgctcggaaaacctgatatacacatatgacaaaatgaagctgaagggctcctctatccaactgagcgacaagaagttatgtcagatctgtcagaatcccttctgtgagccagtattcgttcgctaccccaatggcgggttagtacacacgcactgtgctgcttcgagacacaccaaccctagtagctcctctcctggaacacgcacatag

SEQ ID NO: 54325 - DNA, 2583 bp, Artificial Sequence
  derived and/or modified sequence
atgatgagcatcaaggccttcaccctggtgagcgccgtggagcgggagcttctgatgggcgacaaggagagagtcaatatagaatgcgtggaatgctgtggacgggatctctacgtggggactaacgactgcttcgtgtaccattttttgctcgaggaacgtcccgtgcccgctggcccagctacattcaccgcgacgaagcagctccaacgacaccttggatttaagaaacctgtgaacgagcttagggcagcgtctgccctaaatcgactcctcgtcctctgcgataattccatttcgttggtgaatatgcttaatttagagcccgtcccatccggcgcccgtattaaaggggccgccacattcgccctcaacgagaatcctgtctccggagatcccttctgcgtggaggtatgtataatctctgtgaagcgaaggacaatccaaatgtttctcgtgtatgaggatcgagtgcaaatcgtgaaggaggtttctactgccgagcaacctctggctgtcgccgtcgatggacactttctgtgtcttgcactcacaactcagtatattatccataactactcaaccggtgtcagtcaagacttgttcccgtactgctctgaggagcggcccccaatagtgaaaagaattggccgacaggagttcttactcgctggtcccgggggattaggcatgttcgctaccgtggccggaataagccagagggcgcccgtgcactggagtgagaacgtaattggcgctgcggtgtcctttccctacgtcattgcacttgacgatgaattcatcaccgtgcactccatgctggatcaacagcagaaacagaccttgccctttaaggagggacacatcctgcaggatttcgagggcagagtaatagtggccaccagcaagggggtctatattctcgtgcctctgccgctggagaagcagatccaggatctactggcatcccgcagggtggaggaggctctggtgttggctaagggggcaaggagaaacattcccaaagagaagtttcaagttatgtacaggagaatcctgcagcaggcaggattcatacagttcgcgcaactgcagtttctggaggccaaggaactgttcagatcaggacagctggacgtgcgggagctcatcagtctgtatccgtttctgttaccaaccagttcctccttcacccgctcccaccctccattgcacgagtacgctgacctgaatcaactgacgcagggagaccaggagaaaatggcgaagtgtaaaaggtttctgatgtcctacctcaatgaggtgaggtccacggaggttgcgaatggctataaggaagacattgacaccgccctgctcaaactgtatgcggaggccgaccacgattcactgttggacctcctggtgacggagaacttctgcctcctaacagactcagcagcttggctggagaagcacaagaaatattttgcccttgggctcctctatcactacaataaccaggatgctgcagccgttcagctctgggtgaacatcgtgaatggagacgtgcaggattctacacggagcgatctgtacgaatatatagttgacttcttgacctactgtcttgacgaggaactggtgtgggcatatgcggattgggtccttcagaaaagcgaggaggtaggtgtgcaggtgttcaccaagagaccactcgacgagcaacaaaagaactcttttaatccagacgacattatcaattgtttgaaaaaatatcctaaagcactcgtgaaatatctggagcatctagtgatcgacaaaagattgcagaaagaggagtaccatactcatctcgccgtgttatatctggaagaagtgctgctgcaacgtgcctccgctagtggaaagggggccgaggccacggagacacaggccaaactgaggcggctgctccagaaatccgacctataccgggtccacttccttttggaaaggttacagggggctggcctgccaatggagtccgcaatcttgcacggaaagcttggcgaacacgaaaaggccttacacatattggttcacgaactccaggacttcgcagccgctgaggactattgcttatggtgtagtgaggggcgtgatccaccccaccggcagcaattgttccacaccctactcgccatctacctgcatgcaggacctacggcccacgagttagcagtggccgctgtggatctcttgaacagacacgctacagagttcgatgcagctcaggtcctacagatgctgcctgacacatggtccgtccaactcctgtgccccttcctgatgggtgcgatgcgggattccattcatgccaggcgtactatgcaagtggcattgggcctggcacggtccgagaatctgatctacacttatgataaaatgaagctcaaaggatcatccatacagctgtccgacaaaaaattgtgtcaaatctgccagaaccctttttgcgaaccggtcttcgtaaggtaccctaacggcggcctagtgcacacacactgcgccgcgtccagacacacgaacccctcatcttcaagcccaggaacccgaacctag

SEQ ID NO: 54326 - DNA, 948 bp, Artificial Sequence
  derived and/or modified sequence
atgctgatcggcagctgccggaaggtgaagcggagcgtgcaggtgtttactaaaagaccactggatgaacaacagaagaactccttcaatcctgacgacatcatcaattgcctgaaaaagtatcccaaggccctggtgaaatatcttgagcacttggtgattgacaagcgactgcagaaagaagagtaccacactcacctggctgttctgtacttagaagaggtcctgttgcagcgcgcctcagcatccggaaagggggccgaagcaaccgagactcaggcaaagctcagacgcctcctgcagaagtcagatctgtatagggtacacttcctgctggagcgcctgcaaggcgcggggctacctatggagtcggcgattctccacggcaaattgggagagcatgagaaggctttacacatcctggtccacgagctccaggactttgctgccgcggaagactactgtttgtggtgttccgaggggcgcgaccctccacatcgccagcagctgtttcataccctgctcgcgatatacctccacgccggtcctactgctcacgaattggctgtggccgccgtcgatctcttgaatagacacgccacggagtttgatgcggctcaggtgctccagatgcttccagatacttggtcagttcagttgctgtgccccttcttgatgggggccatgagagactcgattcatgctaggagaacaatgcaggttgccttgggtcttgctaggtccgagaatctcatatatacgtatgacaagatgaaactcaaaggatcatctattcagctttctgacaagaaactttgccagatatgtcaaaatccattttgtgagcccgtgtttgtgcgctatcccaacggcggtctagtgcatactcactgcgctgcgtctaggcacaccaacccctctagctcatccccgggaaccagaacatag

SEQ ID NO: 54327 - DNA, 2583 bp, Artificial Sequence
  derived and/or modified sequence
atgatgagcatcaaggcattcactctggtctcagcagtagagagagagctcttgatgggagataaagagcgagtcaatatcgaatgtgtggaatgctgcgggcgtgacttgtacgttggaacgaacgactgctttgtgtaccacttcctgctagaagagaggcctgttcccgcaggtccggctaccttcacagccactaagcagctgcagaggcatctaggctttaagaagcccgttaacgaactgcgcgcagcatcggcactaaatcgcctactggtgctttgcgataacagtattagcctggtgaacatgctgaacttagaaccagtaccctcaggtgctcgaatcaagggcgcagccaccttcgctctgaatgaaaaccccgtgtcaggagacccattctgtgtcgaagtctgcatcataagtgttaagagaagaacaatccagatgttcctggtgtacgaagacagggtccagattgtgaaggaggtatctacagccgagcagcctcttgccgttgctgtcgacggccatttcctttgcctggcactcaccacacagtacattatccacaattactcaacaggcgtgtcgcaggatctctttccatactgttccgaggaaaggccgccaattgtcaagcggatagggagacaggagtttctgctcgcaggtccagggggactgggcatgtttgcgacagtagcgggtatctctcagagggcccctgtgcactggtccgagaatgtgattggtgccgcagtttcattcccctatgtgattgcactcgacgacgagttcattactgttcacagtatgctcgatcaacagcagaagcagactctgcccttcaaggagggacacatcctgcaggacttcgaagggagggtaatcgttgccacttcgaaaggggtctatatcctggtaccactgcctctcgagaagcaaattcaggatctcctggctagcagacgcgtcgaagaggcgttagtgctcgctaaaggcgcaagacgcaacattccgaaagaaaaatttcaagtgatgtataggagaatcttacagcaggcaggctttatccaattcgcccaattacagtttctggaggcaaaagagttattcaggtcaggtcagctggatgtccgggagctcatcagcctttacccttttctgctgcctacaagcagctcattcactcgttcccaccctcccctgcacgagtatgccgatctcaaccagctgacccagggtgatcaggaaaagatggcaaaatgcaagcgattccttatgtcttacctgaatgaggtgagaagcaccgaggtggcgaatggctataaagaggatattgatacagctctgctgaaactgtatgccgaagccgaccatgactccttattagatctcctggtcacggaaaacttttgtctgctgaccgacagtgcagcctggcttgaaaaacataagaaatacttcgctcttggcctgctgtaccactataataatcaagatgcagctgcagtgcagctctgggtgaatatcgtcaacggggatgttcaagactcaactcgatccgacctctacgagtacatcgtggattttctgacatattgtctcgatgaggaactggtgtgggcctatgccgactgggtgctgcaaaaatctgaagaggtcggggttcaggtgtttactaagcgccctctcgacgagcagcagaaaaactcatttaatcccgatgacatcatcaactgcctgaaaaaatacccaaaggctctcgtcaaatacctggagcacctcgtgatcgataaacgcctgcagaaggaggaatatcacacacatcttgctgtgctttacctcgaggaggtgctcttacagagagcctctgcttcagggaagggtgccgaagctacagagacccaagctaagctccgtcgacttctgcagaagagcgatctatacagagtacactttttgctagagcggttgcagggagctggcttgccaatggaaagcgctatactgcacggtaagctgggagagcatgagaaggctctccacatcctggtacacgaactccaagattttgcagccgctgaagattactgcctgtggtgtagcgagggcagggacccacctcacaggcagcaactgtttcacactctcctggcgatctacctgcatgccggacctactgcgcacgagttggccgtagctgctgtggatcttttaaacagacacgccaccgagtttgatgccgcacaggttcttcaaatgttaccagatacctggtccgtgcagttgttgtgcccatttctgatgggcgctatgagggacagtatacacgccaggcgcactatgcaggtggctctcggcttggcgcgaagtgaaaatctgatttatacttatgataaaatgaaactcaagggttcaagtatccagttgagtgacaaaaaattgtgccaaatctgtcagaatccgttctgcgagccagtttttgtgcgctaccctaatggaggtcttgtccacacgcattgtgcagcatcaaggcatacaaatccctcatcttcctcacccggaactcgaacctag

SEQ ID NO: 54328 - DNA, 2583 bp, Artificial Sequence
  derived and/or modified sequence
atgatgtccatcaaagccttcactctggtaagcgccgttgagcgcgaacttctcatgggcgacaaagagagggtgaacatagagtgtgtggagtgctgtggcagagatctgtacgttggcaccaatgactgctttgtgtaccattttctgttagaagagcggcctgtcccggcaggtccagcgactttcactgcgaccaaacagctgcagaggcatttgggcttcaaaaagcccgttaacgagctgagggctgccagcgccctaaacagacttctggtgctgtgtgacaactcaattagtctggttaacatgctgaatctggaacctgtcccctcgggggctcgcattaagggtgctgctacattcgcgctcaatgaaaacccagtgtccggggacccattttgtgttgaggtgtgcatcatttctgttaaacgcagaacaattcagatgttcctggtatacgaagatcgggtgcaaatcgttaaggaggtgtcaaccgctgagcagccactggccgtcgcagttgatgggcactttctgtgcctggctctgaccacgcagtatattattcacaattattctacgggagtaagccaagacctgttcccctactgctctgaagaaagacctcccattgtcaagcgtatcgggagacaagaattcctcctggccggacccggaggtctgggaatgtttgctaccgtcgccggaatcagccagcgtgcaccagtacattggagcgagaatgtgatcggggctgcagttagcttcccctacgttattgccctcgacgatgagtttatcactgtgcacagcatgctggaccagcagcagaaacaaacattgcccttcaaggaaggccatatcctacaggattttgagggcagggtgattgtcgcaacaagtaagggcgtgtacatactggtccctctcccccttgagaagcagatacaggatctgctcgccagcagacgcgtggaagaagctctggtgctggcgaagggggcaaggcgtaatatccctaaagagaaattccaggtgatgtatagacgtattctgcagcaggcaggtttcattcagtttgcccagcttcagttcctggaagctaaagagctcttcagatctggacaactcgacgttcgagagctgatctccttatatccattcttgcttcccaccagtagctcattcaccaggtctcacccccctctgcatgagtacgccgatttaaatcaactaacacaaggggaccaggaaaaaatggctaaatgtaagaggtttctcatgtcatatctgaacgaggtgaggtctacagaggtggcgaacggttacaaagaggatatcgacacagctcttctgaagctgtatgctgaggccgatcacgattccctgctggatctcctggtaactgagaacttttgcctactgacggactccgcagcctggctggaaaagcacaagaaatacttcgcgctgggcctcctgtaccactacaataatcaggatgctgcagctgtgcagttgtgggtcaacattgtcaacggtgacgtgcaggatagcaccaggtccgacttatatgagtacatcgtggatttcctcacctactgcttagatgaagaactggtctgggcctatgcagattgggttctgcagaagagcgaggaggtgggcgtacaggttttcaccaaaagaccactcgatgagcagcagaaaaacagctttaatcccgacgatataatcaattgtctcaaaaagtatccaaaagcactggtaaagtacctggaacatttggtcattgataaacggcttcaaaaggaagaataccacacgcatctggccgtgctttacttggaggaagtgctgctccagcgcgcaagcgcttccggaaagggagccgaggctaccgagacccaagctaaactcagaaggcttttgcagaagtctgatctgtatcgagtgcacttcctgctggagcgtctgcaaggagccggactgcctatggagtctgctatattgcatggcaaactcggagagcacgaaaaagccttgcacatcttggtccatgagcttcaggactttgccgctgcagaggactactgcctgtggtgctccgagggccgtgacccaccccacagacagcagcttttccacacactgctcgcgatctatttgcacgcaggacccactgcacacgagctggcagttgccgcagtggacctgctgaacagacatgctacggagtttgatgcagcgcaggtcctgcagatgcttccagatacctggagtgttcagctcctctgcccattccttatgggagctatgagggactccatccacgcgagacgcacaatgcaggtggctctcgggttagctaggtcagagaatcttatctatacatacgataagatgaaattaaagggatcttccatacagctgagtgataagaagctgtgccagatatgtcaaaaccccttttgcgagcctgtctttgtgcggtacccaaacggaggccttgtgcacacacactgcgcagcatcgcgccataccaacccctcaagtagctctcctggcaccagaacttag

SEQ ID NO: 54329 - DNA, 948 bp, Artificial Sequence
  derived and/or modified sequence
atgctcattgggtcatgccggaaagtgaagagatccgtgcaggtgttcaccaagcgtcccttggatgagcaacaaaagaatagcttcaaccctgacgatattattaattgtcttaagaaataccctaaagcacttgtgaaatatctggagcatttagtaatcgataagcgtctgcagaaagaggagtatcacacacacttggcagtgctgtacttggaagaggtcctgctgcagagggcctccgcgagcgggaagggtgcggaggctacagagacccaagccaagttgagacgacttttgcagaagagcgatttgtatcgcgtgcacttcttgctcgagaggttgcagggagccggtctgcccatggaatctgcaatcctacacggtaaactgggagagcatgaaaaagccctgcacatcttggttcacgaactccaggacttcgccgcagccgaagactattgtctgtggtgttctgaagggagggatccccctcaccgtcagcaactcttccatacccttttggctatttacctgcatgcagggccaacagctcacgaactggccgtggctgcagtggacctactcaaccgacatgcgacagagtttgacgccgctcaagtgcttcaaatgttacccgacacatggtcggtgcagttactttgcccgttcctaatgggagccatgcgagattcaattcatgcaaggcgtacgatgcaggtggccctggggctggccaggtctgagaacctcatttacacatacgacaaaatgaagctgaaaggtagttctatccagctgagcgataaaaagttgtgccaaatatgtcagaacccgttttgtgaacccgtgtttgtgcggtatcccaacggcggtcttgtgcacacacactgcgcagccagcagacatacaaatcccagtagcagttcacccggaacaaggacttag

SEQ ID NO: 54330 - DNA, 2901 bp, Artificial Sequence
  derived and/or modified sequence
cagcagatcagccagtagacatgatgagcatcaaagcctttacgcttgtctctgctgtggagcgggagctgctgatgggcgacaaggagcgcgtcaacatagagtgcgtggagtgctgcggcagggacctctacgtgggcaccaacgactgcttcgtctaccacttcctgttggaggagaggccagtgcctgctgggccagccacgttcactgccaccaaacagctgcagagacacttgggcttcaagaagcccgtgaacgagctgcgtgcggcctcagcactcaacaggctgctggtgctgtgtgacaactccatcagcctggtcaacatgctgaacctcgagccagtgccttcgggggcccgcatcaagggggcagccacgtttgcactgaacgagaaccctgtgagtggggaccccttctgtgtagaagtttgcatcatctctgtcaaacgcagaaccatccagatgtttctggtgtacgaggaccgggtgcagatcgtcaaggaggtgtcgactgccgagcagcccctcgctgtggctgtggacggccacttcctgtgtctggctctgaccactcagtacatcatccacaattacagcacaggcgtctcccaggacctgtttccctactgcagtgaggagaggccgccgatcgtcaagaggatagggagacaggagttcctgctggcgggccccggagggctgggcatgtttgccacagtcgcagggatatcccagcgcgcccccgtgcactggtcggagaatgtgattggggcggctgtgtcctttccatacgtcatagcgctcgatgacgaattcatcacagtccacagcatgttggatcagcaacagaagcagacgctgccctttaaggagggccatatcctacaggactttgaaggaagagtgatcgttgccacaagtaaaggagtttacatcttggttccattacctttggaaaaacaaatacaggatcttctagcaagccgcagagtagaagaggctttggttttagcaaaaggagcccggaggaacattccaaaggaaaaatttcaggtaatgtacagaaggattctgcagcaggcgggatttatacagtttgcacaacttcagttcctggaagctaaagagctcttcagaagcggccagcttgatgtccgggagctgatctctctctaccccttcctgttgcccacctcctcctccttcacccggtcccaccctcctcttcatgagtacgcagacctgaaccagctgacccagggggaccaggagaagatggccaagtgcaaacgcttcctcatgagctacctgaacgaggtccgcagcacagaggtagcaaatggctacaaggaggacatcgacacagccttgctcaaactgtatgcagaggctgaccacgacagcctgctggacctcctggtcactgagaacttctgtcttctgacggacagtgctgcctggctagagaagcacaaaaagtattttgcacttggactgctctatcattataataaccaagatgctgctgcagttcagttgtgggtgaacattgtgaatggcgatgtccaggactccacacgctcagacctgtatgaatacatcgtggattttcttacctactgcttagacgaggaactagtgtgggcctatgctgattgggtcctgcagaaaagtgaagaggtcggagttcaggttttcaccaagagacctttggatgaacagcagaagaacagttttaatccagacgacattatcaattgccttaaaaaataccctaaagcccttgtgaagtatctggaacatcttgtgatagacaagagactgcagaaagaagagtatcacacccacttagctgtgctgtacctggaagaggtgctgctgcagagggcctccgccagtggcaagggtgcagaggccaccgagacgcaggccaagctgcggcggctgctccagaaatctgatttataccgagtccactttcttctcgagaggctgcagggagctggcctgcccatggagagcgccatcctgcacgggaagctgggcgagcatgagaaggcgctgcatatcctggtgcacgagctgcaggactttgcagcggccgaggactactgcctgtggtgctccgagggccgagacccaccccaccgccagcaactctttcacacgctgctggccatctacctgcatgctggccccactgcccacgagctggccgtggctgccgtggacctgctgaaccgccacgccaccgaatttgatgcagcccaggtgctgcagatgctgcctgacacctggtcagtgcagctcctctgcccattcctgatgggggccatgagggacagcatccatgccaggaggaccatgcaggtggctctcggcctggccaggtccgaaaacttaatctacacctacgataagatgaagttgaaaggaagctcaatccaactctcagacaaaaagctttgtcagatatgccaaaatcccttttgtgagcctgtgtttgttagatacccaaatggtggtcttgtgcacacccactgtgccgccagcagacacacaaaccccagctcatccagtcctggcactcggacttgaaaagcttggcccaagggtgcgaggggaactccgagttctttctgagcctgctggacatgaagagcagatgaccaccatgctctgtgtcagccaggacgaagggagacatctgggtgccagggagccttccgtccatacgcaacaaggactcctcgctgctgaccaggctctatgaatgtacatggaatgaccaggctctatgaatgtacatggaaaacccctaaaaatccccaaaacagaaacatacaagagttcacctgtccaggtacatagtaatccaagacagaggtctactttg

SEQ ID NO: 54331 - DNA, 5979 bp, Artificial Sequence
  derived and/or modified sequence
cccgcagcggcgggggcggagaagagacctcagccccgcgggctcgcacagctggcgcggaccacgctctcgcccggggccggcggcctcagcgccccccgaatgaacaccttccgcccgctggccgccccgcgaggcgggccgtgtcgtggccccggtgcacggagggggacgccgaggcccggagcagggcccgtctcggcctgtgctcggagccaggcggcagggcccgcgggccggcgggcggcgcggagacggctgcgctcccgccctccgccagcgcctggcggccgccccacgtgacgggaagcggcggctgcggggtcgggccagcccaggagccgcgggccggagcggggcggcggggccccaggccgcggggcggcgcgggacggcgggcgccggcgccgcagatcagccagtagacatgatgagcatcaaagcctttacgcttgtctctgctgtggagcgggagctgctgatgggcgacaaggagcgcgtcaacatagagtgcgtggagtgctgcggcagggacctctacgtgggcaccaacgactgcttcgtctaccacttcctgttggaggagaggccagtgcctgctgggccagccacgttcactgccaccaaacagctgcagagacacttgggcttcaagaagcccgtgaacgagctgcgtgcggcctcagcactcaacaggctgctggtgctgtgtgacaactccatcagcctggtcaacatgctgaacctcgagccagtgccttcgggggcccgcatcaagggggcagccacgtttgcactgaacgagaaccctgtgagtggggaccccttctgtgtagaagtttgcatcatctctgtcaaacgcagaaccatccagatgtttctggtgtacgaggaccgggtgcagatcgtcaaggaggtgtcgactgccgagcagcccctcgctgtggctgtggacggccacttcctgtgtctggctctgaccactcagtacatcatccacaattacagcacaggcgtctcccaggacctgtttccctactgcagtgaggagaggccgccgatcgtcaagaggatagggagacaggagttcctgctggcgggccccggagggctgggcatgtttgccacagtcgcagggatatcccagcgcgcccccgtgcactggtcggagaatgtgattggggcggctgtgtcctttccatacgtcatagcgctcgatgacgaattcatcacagtccacagcatgttggatcagcaacagaagcagacgctgccctttaaggagggccatatcctacaggactttgaaggaagagtgatcgttgccacaagtaaaggagtttacatcttggttccattacctttggaaaaacaaatacaggatcttctagcaagccgcagagtagaagaggctttggttttagcaaaaggagcccggaggaacattccaaaggaaaaatttcaggtaatgtacagaaggattctgcagcaggcgggatttatacagtttgcacaacttcagttcctggaagctaaagagctcttcagaagcggccagcttgatgtccgggagctgatctctctctaccccttcctgttgcccacctcctcctccttcacccggtcccaccctcctcttcatgagtacgcagacctgaaccagctgacccagggggaccaggagaagatggccaagtgcaaacgcttcctcatgagctacctgaacgaggtccgcagcacagaggtagcaaatggctacaaggaggacatcgacacagccttgctcaaactgtatgcagaggctgaccacgacagcctgctggacctcctggtcactgagaacttctgtcttctgacggacagtgctgcctggctagagaagcacaaaaagtattttgcacttggactgctctatcattataataaccaagatgctgctgcagttcagttgtgggtgaacattgtgaatggcgatgtccaggactccacacgctcagacctgtatgaatacatcgtggattttcttacctactgcttagacgaggaactagtgtgggcctatgctgattgggtcctgcagaaaagtgaagaggtcggagttcaggttttcaccaagagacctttggatgaacagcagaagaacagttttaatccagacgacattatcaattgccttaaaaaataccctaaagcccttgtgaagtatctggaacatcttgtgatagacaagagactgcagaaagaagagtatcacacccacttagctgtgctgtacctggaagaggtgctgctgcagagggcctccgccagtggcaagggtgcagaggccaccgagacgcaggccaagctgcggcggctgctccagaaatctgatttataccgagtccactttcttctcgagaggctgcagggagctggcctgcccatggagagcgccatcctgcacgggaagctgggcgagcatgagaaggcgctgcatatcctggtgcacgagctgcaggactttgcagcggccgaggactactgcctgtggtgctccgagggccgagacccaccccaccgccagcaactctttcacacgctgctggccatctacctgcatgctggccccactgcccacgagctggccgtggctgccgtggacctgctgaaccgccacgccaccgaatttgatgcagcccaggtgctgcagatgctgcctgacacctggtcagtgcagctcctctgcccattcctgatgggggccatgagggacagcatccatgccaggaggaccatgcaggtggctctcggcctggccaggtccgaaaacttaatctacacctacgataagatgaagttgaaaggaagctcaatccaactctcagacaaaaagctttgtcagatatgccaaaatcccttttgtgagcctgtgtttgttagatacccaaatggtggtcttgtgcacacccactgtgccgccagcagacacacaaaccccagctcatccagtcctggcactcggacttgaaaagcttggcccaagggtgcgaggggaactccgagttctttctgagcctgctggacatgaagagcagatgaccaccatgctctgtgtcagccaggacgaagggagacatctgggtgccagggagccttccgtccatacgcaacaaggactcctcgctgctgaccaggctctatgaatgtacatggaatgaccaggctctatgaatgtacatggaaaacccctaaaaatccccaaaacagaaacatacaagagttcacctgtccaggtacatagtaatccaagacagaggtctactttgaaaaaaaaaaaaagggagtcttcctcatgcagtccagacccaggtgggggatcccccaccacccccacactccaacctttagactcatgtttgcactggaaacgtggcttcaccatggctggcgacaaagtcctctcttgcctgggtgagtggcgagggcacagagcctcatgggggtcagccttgccctcctgcagaaacacgttctccatccacgccgctcactcatgggcccatttcccagggttacctcgtgggctctgcctttgccctcagaaacggctgaccctggagaagtacctttgttccttctttcttcctctccggctctcagctcccaaaagattctgccttgtgtacccaagcactcactcttgggtgaactaatgcttctggctgcctagcaagtgaagatctgttgagaaactgagaacgctccaagagagaagctgctctcccctccttgaagaagccgcggacacgggaaacccacggcgggcaagggcccagctgtgtgctcctttcctgtcatggcatctgctgatttgaaactccatgacgaacacgttgaactaaacatttttatttaaatttgtatcatgttcgtagttgctctcttgttgagagagtcatctgtcctgtttgttaggggtattttttcttgttaaaatgtatctcctgttgaatactcgggaaattcaaagggaagtgtggtcagcacacactgagcgttcttttctggagaggccggttttagcctcgtacctttagcaggaccgacagcgggtggaagggcccgtgtgctggatgggggtgtcgcctcctggatggcacaccctcccgaggacatccagacaggctgtgtcaccctccagcactttatgtgcctgctctgaggtgtcctgaacacacagcaacggcctctccttcatcacaggccggggattccttttgtgtttctgtataacatcgatgacgagctgaagctgttgtcacttcactgccctctttggaatttcttcattgtgctgactgattctattaggggctaacaataaaggcagtctacccactactatcatgcttgggaaacaagcgtcagcttgtacatatgacaagagaggaccctgaatacaccctctcttcatcagcccaagccttactgaggtgggatgaagacctcattctctgttctttaaaacatgtttcgtgaactaatattggtccatgtattttttgtccttttgggactctaagtgggtcaagaagcaaaaacatccatgtgttgtttggggggaattggcaccattttttcctgactatgtttcaattaactaaagaataaatgatgaagaaattctccttgtagcacaactgtatgctgtgtaaattggtgtgagctcaaagcccagtcatgtgttttacctgtgggtgactctgttgtagaatggtcatattactgcatatgttatcatgacaacttgtgagtttgagtttatatttctcaaagaacaagttacccgtatatgcaacattgcgccattaaaagcttatttctctgtacacaaaatgggtaaaatcttgaaaaaacttagtaatttctcattcctaacacacagacagagtctcactctgtcacccaggctggagtgcagtggcgcaatctcggctcactgcaacctccacctcctgggttcaagcgattctgctgcctcagcctcccgagtagctgggactacaggtgcatgccaccacgcccagctaatttttgtatttttagtagagacggggtttcaccatgttggccaggatggtctcggtctcctgacctcgtgatctgcctgcctcggcctcccaaagtgctgggattacaggcgtgagccactgcgcccagccaacactagtcatttttattttttcactgaacattgatcaatactctaaaatgtttgtcatcctttagaataatgggaattaaagttgagcagttttccatctctaccaaatccttcaccacaagcagcattctattacagtatgaagaattgtctcatatgttaaaactgtacttttctctaacctttctctcactcctacaaggcccttttctcaaatcatatttctgagagaaatgtatggttctttctcacaggcctgctgatttgtaactgtgccatcgaatagagcaattagatccatcagacctttttcccctcattaggttcagtggaaccattctggttaaaacagcatgaactgaactcagtttacattcatattctatgggcaataccatttggtttttggaactgtttatctgctgttccctatcaagtattaatgtagggatgtcactcaggctgcgttgcactgggctgagttcaactgcgacgctctcactgacgcgtgcttacatgtgcttctcacttccggagcacaggcaggtggctgcggggtcccagctctgaatggatgcccatgatgcaactggggcagcccttgctttttgcttgctctcccacagaaacctttgtccttgcaactttatcctttgtcccgattgggtcccagatacacaaaatgtacaaatgtaaacttgctcattttattaaaattcttttagttctttgttctttctgtaattttttaaaataaaaattgccttgatgga

SEQ ID NO: 54332 - DNA, 2006 bp, Artificial Sequence
  derived and/or modified sequence
agcagacgctgccctttaaggagggccatatcctacaggactttgaaggaagagtgatcgttgccacaagtaaaggagtttacatcttggttccattacctttggaaaaacaaatacaggatcttctagcaagccgcagagtagaagaggctttggttttagcaaaaggagcccggaggaacattccaaaggaaaaatttcaggtaatgtacagaaggattctgcagcaggcgggatttatacagtttgcacaacttcagttcctggaagctaaagagctcttcagaagcggccagcttgatgtccgggagctgatctctctctaccccttcctgttgcccacctcctcctccttcacccggtcccaccctcctcttcatgagtacgcagacctgaaccagctgacccagggggaccaggagaagatggccaagtgcaaacgcttcctcatgagctacctgaacgaggtccgcagcacagaggtagcaaatggctacaaggaggacatcgacacagccttgctcaaactgtatgcagaggctgaccacgacagcctgctggacctcctggtcactgagaacttctgtcttctgacggacagtgctgcctggctagagaagcacaaaaagtattttgcacttggactgctctatcattataataaccaagatgctgctgcagttcagttgtgggtgaacattgtgaatggcgatgtccaggactccacacgctcagacctgtatgaatacatcgtggattttcttacctactgcttagacgaggaactagtgtgggcctatgctgattgggtcctgcagaaaagtgaagaggtcggttcaggttttcaccaagagacctttggatgaacagcagaagaacagttttaatccagacgacattatcaattgccttaaaaaataccctaaagcccttgtgaagtatctggaacatcttgtgatagacaagagactgcagaaagaagagtatcacacccacttagctgtgctgtacctggaagaggtgctgctgcagagggcctccgccagtggcaagggtgcagaggccaccgagacgcaggccaagctgcggcggctgctccagaaatctgatttataccgagtccactttcttctcgagaggctgcagggagctggcctgcccatggagagcgccatcctgcacgggaagctgggcgagcatgagaaggcgctgcatatcctggtgcacgagctgcaggactttgcagcggccgaggactactgcctgtggtgctccgagggccgagacccaccccaccgccagcaactctttcacacgctgctggccatctacctgcatgctggccccactgcccacgagctggccgtggctgccgtggacctgctgaaccgccacgccaccgaatttgatgcagcccaggtgctgcagatgctgcctgacacctggtcagtgcagctcctctgcccattcctgatgggggccatgagggacagcatccatgccaggaggaccatgcaggtggctctcggcctggccaggtccgaaaacttaatctacacctacgataagatgaagttgaaaggaagctcaatccaactctcagacaaaaagctttgtcagatatgccaaaatcccttttgtgagcctgtgtttgttagatacccaaatggtggtcttgtgcacacccactgtgccgccagcagacacacaaaccccagctcatccagtcctggcactcggacttgaaaagcttggcccaagggtgcgaggggaactccgagttctttctgagcctgctggacatgaagagcagatgaccaccatgctctgtgtcagccaggacgaagggagacatctgggtgccagggagccttccgtccatacgcaacaaggactcctcgctgctgaccaggctctatgaatgtacatggaaaatccccaaaacagaaacatacaagagttcacctgtccaggtacatagtaatccaagacagaggtctactttg

SEQ ID NO: 54333 - protein, 274 aa, Artificial Sequence
  derived and/or modified sequence
MLRSSLRFPITNSAGAPCKAAGRMNILAPVRRDRVLAELPQCLRKEAALHGHKDFHPRVTCACQEHRTGTVGFKISKVIVVGDLSVGKTCLINRFCKDTFDKNYKATIGVDFEMERFEVLGIPFSLQLWDTAGQERFKCIASTYYRGAQAIIIVFNLNDVASLEHTKQWLADALKENDPSSVLLFLTPAQYALMEKDALQVAQEMKAEYWAVSSLTGENVREFFFRVAALTFEANVLAELEKSGARRIGDVVRINSDDSNLYLTASKKKPTCCP

SEQ ID NO: 54334 - DNA, 825 bp, Artificial Sequence
  derived and/or modified sequence
atgctcagaagttctttgaggttccccattactaactcggcaggtgccccgtgtaaggcggccgggcgaatgaacatcctcgcaccagttcgccgggatcgcgtgttagccgagctgcctcagtgcctgcgcaaagaggccgcactccatggccacaaagacttccacccgcgggtgacctgcgcatgtcaggaacaccggacaggcactgtggggttcaagatttcgaaggttatagtggtgggagacttaagcgtgggaaaaacctgcctcataaatcgcttttgcaaagacactttcgataagaactacaaggcaaccatcggagtagattttgagatggaacgattcgaggtattgggcattcccttttctctccagctctgggacaccgctggccaagagagatttaagtgtatagcttcgacttattataggggcgctcaggcaatcatcatagtcttcaatttaaacgatgtagcgtctttggagcacacaaagcagtggctggcagatgccttaaaagaaaatgatccttcctctgtgcttctgtttctgacaccagcccagtatgcgctaatggaaaaggacgccctgcaagtggcgcaagaaatgaaagcggagtactgggcggtatcatccctcaccggtgagaacgttcgcgaattcttttttagagtcgcagctcttacctttgaagccaacgtacttgccgaacttgagaagagcggcgcccgacgcatcggagatgtggtacgaatcaactcagatgactcaaatctctatctgacagcatccaagaaaaaacctacgtgctgcccttag

SEQ ID NO: 54335 - DNA, 825 bp, Artificial Sequence
  derived and/or modified sequence
atgctgcggagcagcctgcgcttccccatcaccaacagcgctggggccccctgcaaggctgctggccgcatgaacatcctggcccctgtgagaagagacagagtgctggccgagctgccccagtgcctgaggaaggaggccgccctgcacggccacaaggacttccacccccgggtgacctgtgcctgccaggagcacaggacaggcaccgtgggcttcaagatcagcaaggtgattgtggtgggggacctgtctgtgggcaagacctgcctgatcaaccgcttctgcaaggacacctttgacaagaactacaaggccaccatcggcgtggactttgagatggagagatttgaggtgctgggcatccccttcagcctgcagctgtgggacacagctggccaggagcgcttcaagtgcatcgccagcacctactacagaggagcccaggccatcatcatcgtgttcaacctgaatgatgtggccagcctggagcacaccaagcagtggctggctgatgccctgaaggaaaatgaccccagctctgtgctgctcttcctgaccccagcccagtatgccctgatggagaaggatgccctgcaggtggcccaggagatgaaggccgagtactgggccgtgagcagcctgaccggggagaatgtgcgggagttcttcttccgggtggccgccctgacctttgaggccaacgtgctggccgagctggagaagagcggggccaggagaattggagatgtggtgcgcatcaacagtgatgacagcaacctgtacctgacagccagcaagaagaagcccacctgctgcccctag

SEQ ID NO: 54336 - DNA, 825 bp, Artificial Sequence
  derived and/or modified sequence
atgctgcggagcagcctgcggttccccatcaccaacagcgccggcgcgccatgtaaggccgccggccgtatgaacatactcgcacctgtgcgacgcgatagggtgctggccgaattgccacagtgcctcaggaaggaggccgcccttcatgggcataaggacttccaccccagagttacttgcgcgtgccaggaacatcgtactggcacggtcggatttaagatctccaaagtgatcgtggtgggggatctaagtgttggcaaaacctgcctcatcaacagattctgtaaggatacttttgacaagaattataaggccaccataggggtcgattttgaaatggagcgtttcgaggtcctggggatacccttcagcctccagctgtgggatacggctggccaggagcgctttaaatgtatcgcttctacttattatcgtggcgcccaggccataatcatcgtatttaatctaaacgatgtggcgtcactggaacacaccaaacagtggttggcagacgctttaaaggagaatgaccccagcagtgtgctgctcttcttgacacctgcccaatacgccttgatggaaaaggatgctcttcaagtagctcaggagatgaaggctgaatactgggccgtgtcttcattgaccggtgaaaatgtacgggagtttttcttcagagtagctgccctcacatttgaagccaacgtcctggccgagcttgagaaaagtggagcccggaggatcggcgacgtggttaggatcaattctgacgactccaacctgtacctgacagcaagcaaaaagaaacctacgtgctgtccctag

SEQ ID NO: 54337 - DNA, 825 bp, Artificial Sequence
  derived and/or modified sequence
atgctcaggagttcactgcgatttcccataaccaattcagccggagcaccttgtaaggctgctggcagaatgaatatcctggcgccagtccgtagagatcgcgtcttagctgaactgccccagtgtctccgaaaggaagcagctctgcatggtcataaggatttccatcccagagttacttgtgcttgccaggagcaccgaaccggaaccgtgggttttaaaatttctaaggttattgtggttggcgacctatccgtggggaagacctgtctaatcaaccgcttttgtaaggacacatttgataaaaattataaggccacgatcggagtagacttcgaaatggagcgctttgaagtgctgggcattccattctcgctccaactttgggatacagccggtcaggagcgatttaaatgcattgcctccacctactatcgtggggcacaagccatcatcattgtgttcaacctgaacgatgtcgccagcctcgagcataccaagcagtggttggctgacgcattgaaagagaatgatccttcttccgtgttactgttcttgacaccggctcagtatgccttgatggaaaaagacgctttgcaggttgcccaggaaatgaaggctgaatactgggccgtcagctcccttaccggcgaaaacgtgcgagagtttttctttagggtggctgctctgacctttgaagcaaacgttctggcagagctggagaagtctggcgctcgtaggatcggagatgtcgtccgcatcaactccgatgattccaacctgtaccttaccgcctcgaaaaagaagccaacttgttgcccatag

SEQ ID NO: 54338 - DNA, 1597 bp, Artificial Sequence
  derived and/or modified sequence
cgtgtggcggggccgctccgcgcccccgggccgctctgtaatggtagggcagcctcagccccgagatgacgtcgggtctccgcggccccgggttattgtaggaaccatccggccccgcgtaatcgtaggaactatccggccccgcgtaatcgtagggtctgcgcgggcccggcccccaccagacgggactccccgcccccaattggcggccgaagagtctcctcgccccagagtcatcttcgggacgcccagggcccgggtgattttgggctcgccgcggccccgggtgattgtttcatctccgtggcccgcggtggtcgtagcgtctccgagaccgcggactcccgtagggtccccgtggccccgagttgtagtcgggacaccccggccgcgggtgatcgtcgggtctccacgcgcccgggtcgctgacgcggatccggcctcggcgccttctcagggcgccctgcaaggccgcaggcaggatgaacattctggcacccgtgcggagggatcgcgtcctggcggagctgccccagtgcctgaggaaggaggccgctttgcacgggcacaaagacttccacccccgcgtcacctgcgcctgccaggagcaccggacaggcaccgtgggatttaagatctccaaggtcattgtggtgggggacctgtcggtggggaagacttgcctcattaataggttctgcaaagacacctttgataagaattacaaggccaccattggagtggacttcgagatggaacgatttgaggtgctgggcattcccttcagtttgcagctttgggataccgctgggcaggagaggttcaaatgcattgcatcaacctactatagaggagctcaagccatcatcattgtcttcaacctgaatgatgtggcatctctggaacataccaagcagtggctggccgatgccctgaaggagaatgacccttccagtgtgcttctcttccttacccctgctcagtatgcgctgatggagaaagacgccctccaggtggcccaggagatgaaggctgagtactgggcagtctcatctctcactggtgagaatgtccgagaattcttcttccgtgtggcagcactgacctttgaggccaatgtgctggctgagctggagaaatcgggggctcgacgcattggggatgttgtccgcatcaacagtgatgacagcaacctctacctaactgccagcaagaagaagcccacatgttgcccatgagggctgaggagactgttcagagactgcccagccctagggcactgtgccaccctcattcctccagagcttgacccctggacatttgcactgactttatccagaccaaagagctgcctcttggtggcagtattcccacagaggggtagctgggatcatgctagtcacttcctgcccccaggcaccgtgccaaagactggatgccccctactcctcaggggactgtccagggcgcccagtggtagtgagggagagtgtctctgttcttttgctcagcctgctgggccctttgtgtttgaggatgcttaatgattccagcctctcactgtgccttatgcattaaaatttctttgttacgagca

SEQ ID NO: 54339 - DNA, 1183 bp, Artificial Sequence
  derived and/or modified sequence
atgctgcgcagcagtctccgattccccatcaccaattcggctggggcgccctgcaaggccgcaggcaggatgaacattctggcacccgtgcggagggatcgcgtcctggcggagctgccccagtgcctgaggaaggaggccgctttgcacgggcacaaagacttccacccccgcgtcacctgcgcctgccaggagcaccggacaggcaccgtgggatttaagatctccaaggtcattgtggtgggggacctgtcggtggggaagacttgcctcattaataggttctgcaaagacacctttgataagaattacaaggccaccattggagtggacttcgagatggaacgatttgaggtgctgggcattcccttcagtttgcagctttgggataccgctgggcaggagaggttcaaatgcattgcatcaacctactatagaggagctcaagccatcatcattgtcttcaacctgaatgatgtggcatctctggaacataccaagcagtggctggccgatgccctgaaggagaatgacccttccagtgtgcttctcttccttacccctgctcagtatgcgctgatggagaaagacgccctccaggtggcccaggagatgaaggctgagtactgggcagtctcatctctcactggtgagaatgtccgagaattcttcttccgtgtggcagcactgacctttgaggccaatgtgctggctgagctggagaaatcgggggctcgacgcattggggatgttgtccgcatcaacagtgatgacagcaacctctacctaactgccagcaagaagaagcccacatgttgcccatgagggctgaggagactgttcagagactgcccagccctagggcactgtgccaccctcattcctccagagcttgacccctggacatttgcactgactttatccagaccaaagagctgcctcttggtggcagtattcccacagaggggtagctgggatcatgctagtcacttcctgcccccaggcaccgtgccaaagactggatgccccctactcctcaggggactgtccagggcgcccagtggtagtgagggagagtgtctctgttcttttgctcagcctgctgggccctttgtgtttgaggatgcttaatgattccagcctctcactgtgccttatgcattaaaatttctttgttacgagc

SEQ ID NO: 54340 - DNA, 825 bp, Artificial Sequence
  derived and/or modified sequence
atgctgagaagcagcctgagattccccatcaccaacagcgccggcgccccctgcaaggccgccggcagaatgaacatcctggcccccgtgagaagagacagagtgctggccgagctgccccagtgcctgagaaaggaggccgccctgcacggccacaaggacttccaccccagagtgacctgcgcctgccaggagcacagaaccggcaccgtgggcttcaagatcagcaaggtgatcgtggtgggcgacctgagcgtgggcaagacctgcctgatcaacagattctgcaaggacaccttcgacaagaactacaaggccaccatcggcgtggacttcgagatggagagattcgaggtgctgggcatccccttcagcctgcagctgtgggacaccgccggccaggagagattcaagtgcatcgccagcacctactacagaggcgcccaggccatcatcatcgtgttcaacctgaacgacgtggccagcctggagcacaccaagcagtggctggccgacgccctgaaggagaacgaccccagcagcgtgctgctgttcctgacccccgcccagtacgccctgatggagaaggacgccctgcaggtggcccaggagatgaaggccgagtactgggccgtgagcagcctgaccggcgagaacgtgagagagttcttcttcagagtggccgccctgaccttcgaggccaacgtgctggccgagctggagaagagcggcgccagaagaatcggcgacgtggtgagaatcaacagcgacgacagcaacctgtacctgaccgccagcaagaagaagcccacctgctgcccctag

SEQ ID NO: 54341 - protein, 231 aa, Artificial Sequence
  derived and/or modified sequence
  misc_feature (1)..(1): Xaa can be any naturally occurring amino acid
XSLRFPITNSAGAPCKAAGRMNILAPVRRDRVLAELPQCLRKEAALHGHKDFHPRVTCACQEHRTGTVGRFKISKVIVVGDLSVGKTCLINRFCKDTFDKNYKATIGVDFEMERFEVLGIPFSLQLWDTAGQERFKCIASTYYRGAQAIIIVFNLNDVASLEHTKQWLADALKENDPSSVLLFLVGSKKDLSTPAQYALMEKDALQVAQEMKTVQRLPSPRALCHPHSSRA

SEQ ID NO: 54342 - protein, 268 aa, Artificial Sequence
  derived and/or modified sequence
MSHLPGLELRREAPPLLGPLLSPFPLPAGSWHRQMLRSSLRFPITNSAGAPCKAAGRMNILAPVRRDRVLAELPQCLRKEAALHGHKDFHPRVTCACQEHRTGTVGRFKISKVIVVGDLSVGKTCLINRFCKDTFDKNYKATIGVDFEMERFEVLGIPFSLQLWDTAGQERFKCIASTYYRGAQAIIIVFNLNDVASLEHTKQWLADALKENDPSSVLLFLVGSKKDLSTPAQYALMEKDALQVAQEMKTVQRLPSPRALCHPHSSRA

SEQ ID NO: 54343 - DNA, 696 bp, Artificial Sequence
  derived and/or modified sequence
tgatcccttagatttcccatcaccaatagtgcaggcgcaccttgcaaggccgccggtcgcatgaatatcctggcccccgttcgaagagaccgagtcttggccgagctgccacagtgcctgcgcaaggaggccgcattacatggacataaggatttccacccaagggtaacctgtgcatgccaggagcatcgcactggcaccgtgggccgattcaaaatctcgaaagtgatcgtggtgggggacctgtccgtagggaaaacatgtctaatcaaccggttctgtaaggatacttttgataagaattacaaggccactattggagtcgatttcgagatggagcggttcgaggtgcttggaatccccttctcactgcagctgtgggacaccgctggacaggaacgttttaaatgtattgcatccacctattacagaggagcccaggcaattatcatcgtctttaatctgaacgatgttgcctcgttggaacacaccaaacagtggttggctgatgctctcaaagagaatgaccccagcagcgtcctactatttctagttggatccaaaaaagacttaagtactccagcccagtacgctctgatggagaaggacgctttgcaagtcgctcaagaaatgaaaacagtccagcggctgccatccccccgcgcactgtgccacccacatagttcacgcgcatag

SEQ ID NO: 54344 - DNA, 807 bp, Artificial Sequence
  derived and/or modified sequence
atgagccacttgccaggtctcgagctgcggcgagaagccccgcctctgctcgggccattactctccccttttcccttgccagcaggcagttggcataggcagatgcttcgaagttccttgcgctttcctattaccaattcagccggagctccgtgcaaagctgctgggaggatgaacatcctcgcccctgtgcgtcgtgacagggtcctcgccgaactgccgcagtgtctcagaaaagaggccgcgttgcacggtcacaaggattttcacccccgcgttacatgtgcttgtcaggagcacagaaccggcaccgttggtcgattcaagatttctaaggtgatcgttgttggtgacctgagcgtagggaaaacctgtctgatcaatagattctgtaaggatacttttgataagaactacaaggctactataggtgttgacttcgaaatggaacggttcgaggttctcggaataccttttagccttcagctgtgggacacagccgggcaagagagatttaagtgtattgcttctacttattaccgcggagcccaagccatcatcatcgtgttcaacctgaacgacgttgcttctttggagcacaccaagcagtggcttgctgatgcactcaaggaaaacgacccctctagcgtgctgctcttcctcgtaggctcgaagaaggacctcagtacacccgcacagtatgccctcatggaaaaggacgcacttcaagtagcgcaagagatgaaaactgtccagaggttgccgtccccacgcgccctttgccaccctcacagtagcagggcctag

SEQ ID NO: 54345 - DNA, 696 bp, Artificial Sequence
  derived and/or modified sequence
tgaagcctgcgcttccccatcaccaacagcgctggggccccctgcaaggccgccggccgcatgaacatcctggcccctgtgcggcgggacagagtgctggccgagctgccccagtgcctgaggaaggaggccgccctgcacggccacaaggacttccacccccgggtgacctgtgcctgccaggagcacaggactggaacagtgggccgcttcaagatcagcaaggtgattgtggtgggggacctgtctgtgggcaagacctgcctgatcaaccgcttctgcaaggacacctttgacaagaactacaaggccaccatcggcgtggactttgagatggagagatttgaggtgctgggcatccccttcagcctgcagctgtgggacacagctggccaggagcgcttcaagtgcatcgccagcacctactacagaggagcccaggccatcatcatcgtgttcaacctgaatgatgtggccagcctggagcacaccaagcagtggctggctgatgccctgaaggaaaatgaccccagctctgtgctgctcttcctggtgggcagcaagaaggacctgagcaccccagcccagtatgccctgatggagaaggatgccctgcaggtggcccaggagatgaagacagtgcagaggctgcccagcccccgggccctgtgccacccccacagcagccgggcctag

SEQ ID NO: 54346 - DNA, 807 bp, Artificial Sequence
  derived and/or modified sequence
atgagccacctgcccggcctggagctgcggcgggaggccccacccctgctgggccccctgctgagccccttccccctgcctgctggctcctggcaccggcagatgctgcggagcagcctgcgcttccccatcaccaacagcgctggggccccctgcaaggctgctggccgcatgaacatcctggcccctgtgagaagagacagagtgctggccgagctgccccagtgcctgaggaaggaggccgccctgcacggccacaaggacttccacccccgggtgacctgtgcctgccaggagcacaggacaggcaccgtgggccgcttcaagatcagcaaggtgattgtggtgggggacctgtctgtgggcaagacctgcctgatcaaccgcttctgcaaggacacctttgacaagaactacaaggccaccatcggcgtggactttgagatggagagatttgaggtgctgggcatccccttcagcctgcagctgtgggacacagctggccaggagcgcttcaagtgcatcgccagcacctactacagaggagcccaggccatcatcatcgtgttcaacctgaatgatgtggccagcctggagcacaccaagcagtggctggctgatgccctgaaggaaaatgaccccagctctgtgctgctcttcctggtgggcagcaagaaggacctgagcaccccagcccagtatgccctgatggagaaggatgccctgcaggtggcccaggagatgaagacagtgcagaggctgcccagcccccgggccctgtgccacccccacagcagccgggcctag

SEQ ID NO: 54347 - DNA, 696 bp, Artificial Sequence
  derived and/or modified sequence
tgaagcctgcggttccccatcaccaacagcgccggcgccccctgcaaagcagcaggaagaatgaacattttggcacctgtgcgcagggatcgcgtgctcgcagagttaccccaatgcctgcgaaaggaagccgccctgcacgggcacaaagacttccatccacgcgtgacttgcgcatgccaggaacacaggacagggacggtggggcgtttcaaaatcagcaaggttatcgtggttggagacctgagcgtggggaaaacttgtcttatcaacaggttctgcaaagacaccttcgacaaaaactacaaagcaactattggtgtggacttcgaaatggaaagattcgaagtgctgggtataccatttagtcttcagttgtgggatactgcagggcaggaacgttttaagtgtatcgcttctacttactacaggggcgcccaagctattatcatcgtgtttaacctgaacgacgtggcctcactggaacatacgaagcagtggctagccgacgcactgaaggaaaacgacccatcatccgttcttctgttcttggtcgggtctaagaaagatctgtcaacaccagctcagtatgcgctcatggagaaggacgctctccaagtcgctcaagaaatgaagaccgtccagcgtctgccctcaccaagagccctgtgtcatccacattcgtctcgcgcctag

SEQ ID NO: 54348 - DNA, 807 bp, Artificial Sequence
  derived and/or modified sequence
atgagccacctgcccggcctggagctgcggcgggaggccccccccctcctgggtcccctcctgagtcccttccccctgccagccggctcttggcaccggcaaatgctgagatccagtctgcgattcccgattacaaattcagccggtgctccctgcaaggcggccggccgcatgaatatcctggcacccgtgcgccgggaccgcgtacttgccgagctaccccagtgtctgcggaaggaagcagcactccacggccacaaggactttcatccccgcgtgacatgcgcctgccaagaacatcgaacaggaactgtggggcgctttaaaatcagtaaagttatcgtagtgggcgatctgagtgtcggaaagacatgtctaatcaatcgcttctgcaaagacaccttcgacaagaattataaggcaactataggggtcgattttgaaatggaaagatttgaagttctcgggattccatttagcctgcagctttgggatactgctggacaggagaggttcaagtgtatcgcctctacgtactacagaggtgcccaggccattattatagtgtttaaccttaacgatgtggccagtctcgagcacacaaagcagtggttggcagatgccctaaaagaaaacgacccctccagcgtcctgctgtttttggtggggtccaaaaaagatttgtccacgcccgcacagtacgctttgatggaaaaggatgcattacaggtcgcccaggagatgaaaaccgtccagaggttaccctctcccagggccctctgtcatccccacagctcccgcgcctag

SEQ ID NO: 54349 - DNA, 696 bp, Artificial Sequence
  derived and/or modified sequence
taatcattacggttcccgatcacaaacagcgcgggagcaccatgcaaggccgctggacgcatgaacatcctggcaccagtacggagggatcgggttctcgccgaactgccacaatgcttgcgcaaggaagcagctttacatggccacaaggatttccaccccagagtcacatgtgcatgtcaggagcatcgcactggcacagtcgggagattcaagatcagcaaagttatagtggtcggagacctgtctgtaggaaaaacctgcctgatcaatagattttgcaaagatacctttgacaagaactataaggcgacaatcggcgttgactttgaaatggaaaggttcgaggtgttgggtattcccttctcactgcagttgtgggatactgccggacaggaacggttcaagtgtatcgccagtacctactacagaggtgcacaggcaataatcattgtttttaatttgaatgacgtagccagcttggagcataccaaacagtggctagcggacgccctgaaagagaatgaccccagttccgttctgctctttttagtgggttccaagaaagacctgagcaccccggctcagtatgccctcatggagaaggacgcactacaggtggcacaggagatgaagactgtccagcgactgccctctcccagagccctctgtcacccacactcatccagagcctag

SEQ ID NO: 54350 - DNA, 807 bp, Artificial Sequence
  derived and/or modified sequence
atgagtcatcttcctggcctggaacttcgaagagaggcgccaccattgctggggcctctactgtcgccctttccactccctgcagggtcatggcaccgacagatgcttcgatcgtctttgcgctttccaatcaccaactccgctggggctccttgtaaggcagctgggagaatgaatatccttgcaccagttaggcgcgacagggtgctggccgagctgccccagtgcctacggaaggaggccgctctgcacggtcataaggatttccatcccagagtcacatgcgcatgccaggaacatagaaccggcaccgtcgggagatttaaaatttcaaaagtcatcgtggtgggggacctgagtgtcggcaaaacatgccttattaacagattctgtaaggacacctttgataagaactacaaagccaccattggcgtcgactttgagatggaacggttcgaggtactcggtatacctttttcattgcaactgtgggacaccgctggccaggaacggttcaagtgcatagcttctacatattatcgcggagcccaggccatcattattgtgttcaacctgaacgatgttgcttccctggagcacacaaagcaatggctggccgatgctcttaaggagaatgacccatccagcgtgctgctgttcctcgttggctcaaagaaggacttgagtacccccgcacagtatgcactcatggagaaagacgctctgcaggtggcacaggaaatgaaaactgtccagcggctgccatcaccacgtgccctctgccaccctcactcatcacgcgcatag

SEQ ID NO: 54351 - DNA, 983 bp, Artificial Sequence
  derived and/or modified sequence
gcagtctccgattccccatcaccaattcggctggggcgccctgcaaggccgcaggcaggatgaacattctggcacccgtgcggagggatcgcgtcctggcggagctgccccagtgcctgaggaaggaggccgctttgcacgggcacaaagacttccacccccgcgtcacctgcgcctgccaggagcaccggacaggcaccgtgggcagatttaagatctccaaggtcattgtggtgggggacctgtcggtggggaagacttgcctcattaataggttctgcaaagacacctttgataagaattacaaggccaccattggagtggacttcgagatggaacgatttgaggtgctgggcattcccttcagtttgcagctttgggataccgctgggcaggagaggttcaaatgcattgcatcaacctactatagaggagctcaagccatcatcattgtcttcaacctgaatgatgtggcatctctggaacataccaagcagtggctggccgatgccctgaaggagaatgacccttccagtgtgcttctcttccttgtaggttccaagaaggatctgagtacccctgctcagtatgcgctgatggagaaagacgccctccaggtggcccaggagatgaagactgttcagagactgcccagccctagggcactgtgccaccctcattcctccagagcttgacccctggacatttgcactgactttatccagaccaaagagctgcctcttggtggcagtattcccacagaggggtagctgggatcatgctagtcacttcctgcccccaggcaccgtgccaaagactggatgccccctactcctcaggggactgtccagggcgcccagtggtagtgagggagagtgtctctgttcttttgctcagcctgctgggccctttgtgtttgaggatgcttaatgattccagcctctcactgtgccttatgcattaaaatttctttgttacgagca

SEQ ID NO: 54352 - DNA, 1099 bp, Artificial Sequence
  derived and/or modified sequence
tatgagtcacctcccaggcctggagttgaggagggaagcgccgcctctccttgggccccttctctccccctttcccctccctgctggttcctggcatcgccagatgctgcgcagcagtctccgattccccatcaccaattcggctggggcgccctgcaaggccgcaggcaggatgaacattctggcacccgtgcggagggatcgcgtcctggcggagctgccccagtgcctgaggaaggaggccgctttgcacgggcacaaagacttccacccccgcgtcacctgcgcctgccaggagcaccggacaggcaccgtgggcagatttaagatctccaaggtcattgtggtgggggacctgtcggtggggaagacttgcctcattaataggttctgcaaagacacctttgataagaattacaaggccaccattggagtggacttcgagatggaacgatttgaggtgctgggcattcccttcagtttgcagctttgggataccgctgggcaggagaggttcaaatgcattgcatcaacctactatagaggagctcaagccatcatcattgtcttcaacctgaatgatgtggcatctctggaacataccaagcagtggctggccgatgccctgaaggagaatgacccttccagtgtgcttctcttccttgtaggttccaagaaggatctgagtacccctgctcagtatgcgctgatggagaaagacgccctccaggtggcccaggagatgaagactgttcagagactgcccagccctagggcactgtgccaccctcattcctccagagcttgacccctggacatttgcactgactttatccagaccaaagagctgcctcttggtggcagtattcccacagaggggtagctgggatcatgctagtcacttcctgcccccaggcaccgtgccaaagactggatgccccctactcctcaggggactgtccagggcgcccagtggtagtgagggagagtgtctctgttcttttgctcagcctgctgggccctttgtgtttgaggatgcttaatgattccagcctctcactgtgccttatgcattaaaatttctttgttacgagcactt

SEQ ID NO: 54353 - DNA, 696 bp, Artificial Sequence
  derived and/or modified sequence
tgaagcctgagattccccatcaccaacagcgccggcgccccctgcaaggccgccggcagaatgaacatcctggcccccgtgagaagagacagagtgctggccgagctgccccagtgcctgagaaaggaggccgccctgcacggccacaaggacttccaccccagagtgacctgcgcctgccaggagcacagaaccggcaccgtgggcagattcaagatcagcaaggtgatcgtggtgggcgacctgagcgtgggcaagacctgcctgatcaacagattctgcaaggacaccttcgacaagaactacaaggccaccatcggcgtggacttcgagatggagagattcgaggtgctgggcatccccttcagcctgcagctgtgggacaccgccggccaggagagattcaagtgcatcgccagcacctactacagaggcgcccaggccatcatcatcgtgttcaacctgaacgacgtggccagcctggagcacaccaagcagtggctggccgacgccctgaaggagaacgaccccagcagcgtgctgctgttcctggtgggcagcaagaaggacctgagcacccccgcccagtacgccctgatggagaaggacgccctgcaggtggcccaggagatgaagaccgtgcagagactgcccagccccagagccctgtgccacccccacagcagcagagcctag

SEQ ID NO: 54354 - DNA, 807 bp, Artificial Sequence
  derived and/or modified sequence
atgagccacctgcccggcctggagctgagaagagaggccccccccctgctgggccccctgctgagccccttccccctgcccgccggcagctggcacagacagatgctgagaagcagcctgagattccccatcaccaacagcgccggcgccccctgcaaggccgccggcagaatgaacatcctggcccccgtgagaagagacagagtgctggccgagctgccccagtgcctgagaaaggaggccgccctgcacggccacaaggacttccaccccagagtgacctgcgcctgccaggagcacagaaccggcaccgtgggcagattcaagatcagcaaggtgatcgtggtgggcgacctgagcgtgggcaagacctgcctgatcaacagattctgcaaggacaccttcgacaagaactacaaggccaccatcggcgtggacttcgagatggagagattcgaggtgctgggcatccccttcagcctgcagctgtgggacaccgccggccaggagagattcaagtgcatcgccagcacctactacagaggcgcccaggccatcatcatcgtgttcaacctgaacgacgtggccagcctggagcacaccaagcagtggctggccgacgccctgaaggagaacgaccccagcagcgtgctgctgttcctggtgggcagcaagaaggacctgagcacccccgcccagtacgccctgatggagaaggacgccctgcaggtggcccaggagatgaagaccgtgcagagactgcccagccccagagccctgtgccacccccacagcagcagagcctag

SEQ ID NO: 54355 - protein, 313 aa, Artificial Sequence
  derived and/or modified sequence
MRHNQMCCETPPTVTVYVKSGSNRSHQPKKPITLKRPICKDNWQAFEKNTHNNNKSKRPKGPCLVIQRQDMTAFFKLFDDDLIQDFLWMDCCCKIADKYLLAMTFVYFKRAKFTISEHTRINFFIALYLANTVEEDEEETKYEIFPWALGKNWRKLFPNFLKLRDQLWDRIDYRAIVSRRCCEEVMAIAPTHYIWQRERSVHHSGAVRNYNRDEVQLPRGPSATPVDCSLCGKKRRYVRLGLSSSSSLSSHTAGVTEKHSQDSYNSLSMDIIGDPSQAYTGSEVVNDHQSNKGKKTNFLKKDKSMEWFTGSEE

SEQ ID NO: 54356 - protein, 127 aa, Artificial Sequence
  derived and/or modified sequence
MRHNQMCCETPPTVTVYVKSGSNRSHQPKKPITLKRPICKDNWQAFEKNTHNNNKSKRPKGPCLVIQRQDMTAFFKLFDDDLIQDFLWMDCCCKIADKYLLAMTFVYFKRAKFTISEHTRINFFIAL

SEQ ID NO: 54357 - DNA, 942 bp, Artificial Sequence
  derived and/or modified sequence
atgagacacaaccagatgtgctgcgagaccccccccaccgtgaccgtgtacgtgaagagcggcagcaacagaagccaccagcccaagaagcccatcaccctgaagagacccatctgcaaggacaactggcaggccttcgagaagaacacccacaacaacaacaagagcaagagacccaagggcccctgcctggtgatccagagacaggacatgaccgccttcttcaagctgttcgacgacgacctgatccaggacttcctgtggatggactgctgctgcaagatcgccgacaagtacctgctggccatgaccttcgtgtacttcaagagagccaagttcaccatcagcgagcacaccagaatcaacttcttcatcgccctgtacctggccaacaccgtggaggaggacgaggaggagaccaagtacgagatcttcccctgggccctgggcaagaactggagaaagctgttccccaacttcctgaagctgagagaccagctgtgggacagaatcgactacagagccatcgtgagcagaagatgctgcgaggaggtgatggccatcgcccccacccactacatctggcagagagagagaagcgtgcaccacagcggcgccgtgagaaactacaacagagacgaggtgcagctgcccagaggccccagcgccacccccgtggactgcagcctgtgcggcaagaagagaagatacgtgagactgggcctgagcagcagcagcagcctgagcagccacaccgccggcgtgaccgagaagcacagccaggacagctacaacagcctgagcatggacatcatcggcgaccccagccaggcctacaccggcagcgaggtggtgaacgaccaccagagcaacaagggcaagaagaccaacttcctgaagaaggacaagagcatggagtggttcaccggcagcgaggagtag

SEQ ID NO: 54358 - DNA, 942 bp, Artificial Sequence
  derived and/or modified sequence
atgcggcacaatcagatgtgttgcgagacacccccaaccgtgactgtctacgtcaagtccggcagtaaccgctcacaccagccgaagaagccaattacactcaagcgtcctatctgtaaggacaattggcaggccttcgagaaaaacacacacaacaataataagagcaagcgtccgaagggaccgtgtcttgtgattcagaggcaggatatgaccgcattcttcaaactattcgacgatgacctgatccaggatttcctctggatggactgttgctgtaaaattgccgataaatatctcctcgcaatgaccttcgtatattttaagagagctaaatttactatcagtgagcacaccagaattaacttctttatcgctctgtatctcgcaaatacagtcgaggaggatgaggaggagactaaatacgagattttcccttgggctctggggaagaattggcgcaagctgttccccaactttctgaagctccgggatcagctctgggaccgcattgattacagggcaattgtgtcaaggagatgctgcgaggaggtcatggctatcgcccccacacactatatttggcagagggaaaggtccgtacatcatagcggagccgtgcgcaactataatcgcgacgaagtgcaactcccaagaggcccgagcgctacgcccgtcgactgtagtctatgcgggaaaaaaaggaggtacgtccggctgggcctatcctcttcctcctccctgtcatctcacaccgctggcgtgaccgagaaacatagccaagactcctataacagtctcagcatggacatcattggagaccccagccaagcatatacgggttccgaggtcgtgaatgaccaccagagcaacaagggtaagaaaactaactttctgaaaaaggacaaatccatggagtggtttaccggaagtgaggagtag

SEQ ID NO: 54359 - DNA, 942 bp, Artificial Sequence
  derived and/or modified sequence
atgcgacataatcagatgtgttgtgagactcctcccacggtcaccgtctatgtgaagagcgggagcaaccgatctcaccagcctaagaagcccattacccttaaaaggccgatttgtaaggataattggcaggcgtttgagaagaacacacataacaataataagtcaaaacgccctaaaggtccctgcttggtaattcagaggcaggacatgaccgcctttttcaagctgttcgacgatgatttgatccaggacttcctttggatggactgttgttgtaagatagccgataagtacctcctcgcgatgacgtttgtgtacttcaaaagagcaaaatttaccatcagcgaacatacgcgcattaatttttttattgcactttacctagcaaacacagtcgaagaggacgaggaggagaccaaatatgagatctttccctgggcattgggaaagaactggcggaaactctttcctaatttcctgaagttgcgggatcagctctgggataggattgattatagagccatcgtctcaaggaggtgttgcgaggaagtcatggctatagcccctacacattatatctggcagcgggaaaggtccgtccaccatagcggggcggttcgtaattataatagggatgaagtgcagttgccgcgagggccctccgcaaccccagtggattgttcactctgcggtaagaagcgtcggtacgtgcggcttgggttatcctctagctcctccctgagcagtcatactgcaggggtgacagaaaaacatagccaggactcttataacagtctcagcatggacatcatcggcgatccctctcaggcttatactggcagtgaagttgtcaacgaccaccaatcaaacaagggcaagaaaacaaattttctgaagaaggataagagcatggagtggttcactggaagcgaagaatag

SEQ ID NO: 54360 - DNA, 942 bp, Artificial Sequence
  derived and/or modified sequence
atgaggcacaaccagatgtgctgtgagaccccacccaccgtgacagtgtatgtgaagagcggcagcaacagaagccaccagcccaagaagcccatcaccctgaagaggcccatctgcaaggacaactggcaggcctttgagaagaacacccacaacaacaacaagagcaagaggcccaagggcccctgcctggtgatccagaggcaggacatgacagccttcttcaagctgtttgatgatgacctgatccaggacttcctgtggatggactgctgctgcaagattgctgacaagtacctgctggccatgacctttgtgtacttcaagagggccaagttcaccatcagcgagcacacccgcatcaacttcttcatcgccctgtacctggccaacacagtggaggaggatgaggaggagaccaagtatgagatcttcccctgggccctgggcaagaactggaggaagctgttccccaacttcctgaagctgcgggaccagctgtgggacagaattgactaccgggccatcgtgtcccggcgctgctgtgaggaggtgatggccatcgcccccacccactacatctggcagcgggagaggtctgtgcaccacagcggggctgtgaggaactacaacagagatgaggtgcagctgccccggggccccagcgccacccctgtggactgcagcctgtgtgggaagaagagaagatatgtgcggctgggcctgagcagcagcagcagcctgagcagccacacagctggggtgacagagaagcacagccaggacagctacaacagcctgtccatggacatcatcggggaccccagccaggcctacacaggcagcgaggtggtgaatgaccaccagagcaacaagggcaagaagaccaacttcctgaagaaggacaagtccatggagtggttcaccggcagcgaggagtag

SEQ ID NO: 54361 - DNA, 942 bp, Artificial Sequence
  derived and/or modified sequence
atgcggcacaaccagatgtgctgcgagaccccccccaccgtgaccgtgtacgtcaagtcggggtcgaatcggagccatcagcctaagaagcctataactttaaagcgccctatctgcaaggataattggcaagctttcgagaagaacacccataataataacaagtccaagcggccgaaagggccctgcttggtcatccagcgacaggacatgacggccttctttaagttgtttgacgacgatctcatccaggacttcttgtggatggattgctgctgcaaaatcgccgacaagtacctgctggccatgaccttcgtgtattttaaacgggccaaattcactatttccgagcacacaagaataaattttttcattgccttgtacctggcgaacaccgtggaagaagatgaagaggaaacaaaatatgagatattcccctgggcactcggcaaaaactggaggaaattgtttcctaactttctcaaacttcgagatcagctctgggaccgaattgactatagggcgatcgtaagtcgtcgctgttgcgaagaggtcatggccatcgcccccacccattacatatggcagcgtgaacgctctgtacatcactctggggccgtgcggaactacaatcgagatgaggtccaactgcccaggggcccctctgccactccagtagactgttccctgtgtgggaaaaaaagaaggtacgtgcgtctgggtctctccagcagttcctcactttcaagtcatacagccggcgtgacggagaagcattctcaggactcatataactccctgtctatggacattataggagatccaagccaagcctacactgggtcggaagtggtgaacgaccatcagagtaacaagggcaagaagactaattttctcaaaaaggacaaatcaatggaatggtttacgggatcggaggaatag

SEQ ID NO: 54362 - DNA, 942 bp, Artificial Sequence
  derived and/or modified sequence
atgcggcacaaccagatgtgctgcgagaccccccccaccgtgaccgtgtacgttaagtcaggcagcaaccgttctcaccaacctaagaaacctatcacgttgaaaaggccaatctgtaaggataactggcaagcctttgaaaaaaatacacacaacaacaacaaatccaagcggcctaagggcccttgtttggtaatccagcggcaggacatgaccgccttttttaaactttttgatgatgatcttatccaggacttcttatggatggattgctgctgtaagattgctgacaagtatcttctggctatgacctttgtgtattttaagcgtgctaaattcacaattagtgagcacactagaatcaatttctttatcgcactgtatctagccaataccgttgaagaagacgaagaagagacaaagtatgagatcttcccatgggccttagggaaaaattggaggaagctgtttcctaactttctcaaactgcgagaccagctgtgggatagaatagactaccgagccatagttagtcgcaggtgctgtgaagaagtgatggctatcgccccaacgcactacatttggcaaagggagcggagtgtgcaccattcaggagccgtcagaaattacaaccgcgacgaagtgcagttacctcggggcccaagcgcgacccctgtggactgttccctttgtgggaaaaagaggcgctatgtacgtctaggcctgtccagctcctccagtctgtctagccacacagcaggagttaccgaaaaacatagccaggacagctacaattcattgagcatggacatcatcggtgacccaagccaggcctataccgggagtgaagtggtcaatgatcaccagagcaacaagggcaagaaaaccaacttcctgaaaaaagataagtcaatggaatggtttacagggagcgaggagtag

SEQ ID NO: 54363 - DNA, 942 bp, Artificial Sequence
  derived and/or modified sequence
atgagacataatcaaatgtgctgtgaaacccctcccactgttaccgtctatgttaaatcagggtcaaacagaagtcaccagcctaagaaaccgattaccctgaagaggcccatctgcaaagacaactggcaggcgttcgagaaaaacacacacaataacaataaatctaaaaggcctaagggaccttgccttgtgatacaacggcaagatatgacggctttttttaagctattcgatgatgatctcattcaggatttcctgtggatggactgttgttgtaagatcgccgataaatacctgctggccatgacgtttgtgtattttaagagagcaaaatttacaatatcagaacatacacggatcaatttctttatcgccctttacctagcaaacaccgtggaagaggatgaggaggagacaaagtacgagatattcccttgggccctgggaaaaaactggcgcaagctgtttccaaacttcctaaaactgcgcgaccaattatgggatcgaattgattacagagcaatagtatcccgccgttgttgtgaggaagtcatggccatagctccaacacactatatctggcagcgggaaaggtcagtccaccactctggcgcagtccggaattataaccgagatgaagtacagctccctagaggcccatcagctacaccggtggattgttctctctgtgggaagaaacggaggtacgttaggctgggcctatcaagcagttctagtcttagctcccatacggcgggtgttacagagaagcactctcaggactcttacaattccctgagcatggatatcatcggcgacccgtcacaggcatacactgggtccgaagttgtcaatgatcaccagtccaataagggcaaaaaaacgaattttctcaagaaagataagtctatggaatggtttaccgggtccgaggaatag

SEQ ID NO: 54364 - DNA, 942 bp, Artificial Sequence
  derived and/or modified sequence
atgcgacacaaccagatgtgttgtgagacgccacccactgtgaccgtgtacgtgaaatctggaagtaaccgctcacaccagcccaaaaagcctataaccctgaaacgcccaatctgtaaggacaattggcaggccttcgaaaagaacactcacaataacaataagtctaagagacctaagggcccatgcctggtcatccagagacaggacatgacagctttcttcaaactcttcgacgatgacttgattcaggatttcttgtggatggactgctgttgtaaaatcgcagataaatacctgcttgcaatgacatttgtgtactttaaacgcgcaaagttcaccatcagcgaacacacccggattaatttcttcattgccctctatttggccaataccgttgaagaggacgaggaggaaaccaagtatgaaatttttccctgggccctagggaaaaattggagaaagctcttccccaattttttaaagctccgggaccaactgtgggataggatagactaccgggctatagtgtctaggaggtgttgcgaggaggttatggctattgccccaacccactacatctggcagcgtgagaggtccgtgcatcactctggggctgtgcgtaattacaacagagacgaagttcagctccctaggggcccaagtgctacgccagtggattgttcgctgtgcggaaaaaagagaagatatgtgcgacttggcctcagctcatccagcagccttagcagccatacagccggagtcaccgaaaaacattcccaagactcttataactccctgtccatggatattataggggaccctagccaagcttacactggatcggaagtggtgaacgatcaccagagcaataaggggaaaaagaccaattttctgaagaaagataagagcatggaatggttcacagggtcagaagaatag

SEQ ID NO: 54365 - DNA, 1801 bp, Artificial Sequence
  derived and/or modified sequence
agcgaccgacgagcaaccgtctgaggccaggagcgctgcgacggagccttgaccgccgttgcccggccctctcccgcgcagccccgggcttccgcagtccttccttcagaagggaaatttctgagggtcaggaaggggaatctgtacctcactccttgaacaccaaggaaggaatattgggaaaccaaaatgaggcacaatcagatgtgttgtgagacaccacctactgtcactgtttatgtaaaatcagggtcaaatagatcacatcagcctaaaaagcccattactctgaagcgtcctatttgtaaagataattggcaagcatttgaaaaaaatacacataataacaacaaatctaaacgccccaaaggaccttgtctggttatacagcgtcaggatatgactgctttctttaaattatttgatgacgatttaattcaagatttcttgtggatggactgctgctgtaaaattgcagacaagtatcttttggctatgacctttgtttatttcaagagggctaaatttactataagtgagcataccaggataaatttctttattgctctgtatctggctaatacagttgaagaagatgaagaagaaaccaagtacgaaatttttccatgggctttagggaaaaactggagaaaattgttccctaatttcttaaagttaagggaccagctctgggatagaattgactatagggctattgtaagcaggcgatgttgtgaggaggttatggccattgcaccaacccattatatctggcaaagagaacgttctgttcatcacagtggagctgtcagaaactacaacagagatgaagttcagctgccccggggacctagtgccacaccagtagattgttcactctgtggtaaaaaaagaagatatgttagactgggattgtcttcatcatcatctttatccagtcatacagcaggggtgacagaaaaacattctcaggactcatacaactcactgtcaatggacataataggtgatccttctcaagcttatactggttctgaagtagtcaatgaccatcaatcaaataaaggaaagaaaactaatttcttgaagaaagacaaatctatggagtggtttacaggaagtgaagaatgagatggcccaactaaaccaatttggaatcattaactacaaaatgtcaaactaactgcaagacaagtgtcaaaatgggatgtttaagcagttttgctatgttatacatcttttagttgttattttcaaaattatatgtataagttatataagtcatagtaatagctaaaaatgccaatctatggaagcagtgattttcaatataaagttctattttgatatttttccatcttcaagtcagttactgtcatctggagtactcagttaagttgtggtttgaccttcctcaacttgacaagaaaagctaatttaagagaagaaaaacataaagtcattatattaattaaaagaaaaaacaccatttaatatgttctgaaaacattactcacctgtatgaccaggttgccagtgtactggtctagcaacatagggaaatgatccatatggaaaatcagaatgcgattcttctgttgtaaaaaaatatatgtactataagctacataaaatattttctatttttttcacaaaactgttaaaatatgagttactctctttattgtaagttttttctttatttatttccttgcatatgttttagagctactctgccagttattatacagaaactatttgtcaatgattatgtaataaacatatgattttataaccaaat

SEQ ID NO: 54366 - DNA, 1759 bp, Artificial Sequence
  derived and/or modified sequence
gggagaccttagagcgggtaccgctgctggctagcgaccgacgagcaaccgtctgaggccaggagcgctgcgacggagccttgaccgccgttgcccggccctctcccgcgcagccccgggcttccgcaggaatattgggaaaccaaaatgaggcacaatcagatgtgttgtgagacaccacctactgtcactgtttatgtaaaatcagggtcaaatagatcacatcagcctaaaaagcccattactctgaagcgtcctatttgtaaagataattggcaagcatttgaaaaaaatacacataataacaacaaatctaaacgccccaaaggaccttgtctggttatacagcgtcaggatatgactgctttctttaaattatttgatgacgatttaattcaagatttcttgtggatggactgctgctgtaaaattgcagacaagtatcttttggctatgacctttgtttatttcaagagggctaaatttactataagtgagcataccaggataaatttctttattgctctgtatctggctaatacagttgaagaagatgaagaagaaaccaagtacgaaatttttccatgggctttagggaaaaactggagaaaattgttccctaatttcttaaagttaagggaccagctctgggatagaattgactatagggctattgtaagcaggcgatgttgtgaggaggttatggccattgcaccaacccattatatctggcaaagagaacgttctgttcatcacagtggagctgtcagaaactacaacagagatgaagttcagctgccccggggacctagtgccacaccagtagattgttcactctgtggtaaaaaaagaagatatgttagactgggattgtcttcatcatcatctttatccagtcatacagcaggggtgacagaaaaacattctcaggactcatacaactcactgtcaatggacataataggtgatccttctcaagcttatactggttctgaagtagtcaatgaccatcaatcaaataaaggaaagaaaactaatttcttgaagaaagacaaatctatggagtggtttacaggaagtgaagaatgagatggcccaactaaaccaatttggaatcattaactacaaaatgtcaaactaactgcaagacaagtgtcaaaatgggatgtttaagcagttttgctatgttatacatcttttagttgttattttcaaaattatatgtataagttatataagtcatagtaatagctaaaaatgccaatctatggaagcagtgattttcaatataaagttctattttgatatttttccatcttcaagtcagttactgtcatctggagtactcagttaagttgtggtttgaccttcctcaacttgacaagaaaagctaatttaagagaagaaaaacataaagtcattatattaattaaaagaaaaaacaccatttaatatgttctgaaaacattactcacctgtatgaccaggttgccagtgtactggtctagcaacatagggaaatgatccatatggaaaatcagaatgcgattcttctgttgtaaaaaaatatatgtactataagctacataaaatattttctatttttttcacaaaactgttaaaatatgagttactctctttattgtaagttttttctttatttatttccttgcatatgttttagagctactctgccagttattatacagaaactatttgtcaatgattatgtaataaacatatgattttataaccaaat

SEQ ID NO: 54367 - protein, 1700 aa, Artificial Sequence
  derived and/or modified sequence
MDGNSLLSVPSNLESSRMYDVLEPQQGRGCGSSGSGPGNSITACKKVLRSNSLLESTDYWLQNQRMPCQIGFVEDKSENCASVCFVNLDVNKDECSTEHLQQKLVNVSPDLPKLISSMNVQQPKENEIVVLSGLASGNLQADFEVSQCPWLPDICLVQCARGNRPNSTNCIIFEINKFLIGLELVQERQLHLETNILKLEDDTNCSLSSIEEDFLTASEHLEEESEVDESRNDYENINVSANVLESKQLKGATQVEWNCNKEKWLYALEDKYINKYPTPLIKTERSPENLTKNTALQSLDPSAKPSQWKREAVGNGRQATHYYHSEAFKGQMEKSQALYIPKDAYFSMMDKDVPSACAVAEQRSNLNPGDHEDTRNALPPRQDGEVTTGKYATNLAESVLQDAFIRLSQSQSTLPQESAVSVSVGSSLLPSCYSTKDTVVSRSWNELPKIVVVQSPDGSDAAPQPGISSWPEMEVSVETSSILSGENSSRQPQSALEVALACAATVIGTISSPQATERLKMEQVVSNFPPGSSGALQTQAPQGLKEPSINEYSFPSALCGMTQVASAVAVCGLGEREEVTCSVAPSGSLPPAAEASEAMPPLCGLASMELGKEAIAKGLLKEAALVLTRPNTYSSIGDFLDSMNRRIMETASKSQTLCSENVVRNELAHTLSNVILRHSIDEVHHKNMIIDPNDNRHSSEILDTLMESTNQLLLDVICFTFKKMSHIVRLGECPAVLSKETIRRRETEPSCQPSDPGASQAWTKATESSSSSPLSNSHNTSLVINNLVDGMYSKQDKGGVRPGLFKNPTLQSQLSRSHRVPDSSTATTSSKEIYLKGIAGEDTKSPHHSENECRASSEGQRSPTVSQSRSGSQEAEESIHPNTQEKYNCATSRINEVQVNLSLLGDDLLLPAQSTLQTKHPDIYCITDFAEELADTVVSMATEIAAICLDNSSGKQPWFCAWKRGSEFLMTPNVPCRSLKRKKESQGSGTAVRKHKPPRLSEIKRKTDEHPELKEKLMNRVVDESMNLEDVPDSVNLFANEVAAKIMNLTEFSMVDGMWQAQGYPRNRLLSGDRWSRLKASSCESIPEEDSEARAYVNSLGLMSTLSQPVSRASSVSKQSSCESITDEFSRFMVNQMENEGRGFELLLDYYAGKNASSILNSAMQQACRKSDHLSVRPSCPSKQSSTESITEEFYRYMLRDIERDSRESASSRRSSQDWTAGLLSPSLRSPVCHRQSSMPDSRSPCSRLTVNVPIKANSLDGFAQNCPQDFLSVQPVSSASSSGLCKSDSCLYRRGGTDHITNMLIHETWASSIEALMRKNKIIVDDAEEADTEPVSGGSPSQAEKCANRLAASRMCSGPTLLVQESLDCPRKDSVTECKQPPVSSLSKTASLTNHSPLDSKKETSSCQDPVPINHKRRSLCSREVPLIQIETDQREACAGEPEPFLSKSSLLEEAEGHSNDKNIPDVVRGGDTAVSACQIHSDSLDTRDVPEAEASTEARAPDEAPNPPSSSEESTGSWTQLANEEDNPDDTSSFLQLSERSMSNGNSSATSSLGIMDLDIYQESMPSSPMINELVEEKKILKGQSESTEAPASGPPTGTASPQRSLLVINFDLEPECPDAELRATLQWIAASELGIPTIYFKKSQENRIEKFLDVVQLVHRKSWKVGDIFHAVVQYCKMHEEQKDGRLSLFDWLLELG

SEQ ID NO: 54368 - DNA, 5103 bp, Artificial Sequence
  derived and/or modified sequence
atggacggcaacagcctgctgagcgtgcccagcaacctggagagcagcagaatgtacgacgtgctggagccccagcagggcagaggctgcggcagcagcggcagcggccccggcaacagcatcaccgcctgcaagaaggtgctgagaagcaacagcctgctggagagcaccgactactggctgcagaaccagagaatgccctgccagatcggcttcgtggaggacaagagcgagaactgcgccagcgtgtgcttcgtgaacctggacgtgaacaaggacgagtgcagcaccgagcacctgcagcagaagctggtgaacgtgagccccgacctgcccaagctgatcagcagcatgaacgtgcagcagcccaaggagaacgagatcgtggtgctgagcggcctggccagcggcaacctgcaggccgacttcgaggtgagccagtgcccctggctgcccgacatctgcctggtgcagtgcgccagaggcaacagacccaacagcaccaactgcatcatcttcgagatcaacaagttcctgatcggcctggagctggtgcaggagagacagctgcacctggagaccaacatcctgaagctggaggacgacaccaactgcagcctgagcagcatcgaggaggacttcctgaccgccagcgagcacctggaggaggagagcgaggtggacgagagcagaaacgactacgagaacatcaacgtgagcgccaacgtgctggagagcaagcagctgaagggcgccacccaggtggagtggaactgcaacaaggagaagtggctgtacgccctggaggacaagtacatcaacaagtaccccacccccctgatcaagaccgagagaagccccgagaacctgaccaagaacaccgccctgcagagcctggaccccagcgccaagcccagccagtggaagagagaggccgtgggcaacggcagacaggccacccactactaccacagcgaggccttcaagggccagatggagaagagccaggccctgtacatccccaaggacgcctacttcagcatgatggacaaggacgtgcccagcgcctgcgccgtggccgagcagagaagcaacctgaaccccggcgaccacgaggacaccagaaacgccctgccccccagacaggacggcgaggtgaccaccggcaagtacgccaccaacctggccgagagcgtgctgcaggacgccttcatcagactgagccagagccagagcaccctgccccaggagagcgccgtgagcgtgagcgtgggcagcagcctgctgcccagctgctacagcaccaaggacaccgtggtgagcagaagctggaacgagctgcccaagatcgtggtggtgcagagccccgacggcagcgacgccgccccccagcccggcatcagcagctggcccgagatggaggtgagcgtggagaccagcagcatcctgagcggcgagaacagcagcagacagccccagagcgccctggaggtggccctggcctgcgccgccaccgtgatcggcaccatcagcagcccccaggccaccgagagactgaagatggagcaggtggtgagcaacttcccccccggcagcagcggcgccctgcagacccaggccccccagggcctgaaggagcccagcatcaacgagtacagcttccccagcgccctgtgcggcatgacccaggtggccagcgccgtggccgtgtgcggcctgggcgagagagaggaggtgacctgcagcgtggcccccagcggcagcctgccccccgccgccgaggccagcgaggccatgccccccctgtgcggcctggccagcatggagctgggcaaggaggccatcgccaagggcctgctgaaggaggccgccctggtgctgaccagacccaacacctacagcagcatcggcgacttcctggacagcatgaacagaagaatcatggagaccgccagcaagagccagaccctgtgcagcgagaacgtggtgagaaacgagctggcccacaccctgagcaacgtgatcctgagacacagcatcgacgaggtgcaccacaagaacatgatcatcgaccccaacgacaacagacacagcagcgagatcctggacaccctgatggagagcaccaaccagctgctgctggacgtgatctgcttcaccttcaagaagatgagccacatcgtgagactgggcgagtgccccgccgtgctgagcaaggagaccatcagaagaagagagaccgagcccagctgccagcccagcgaccccggcgccagccaggcctggaccaaggccaccgagagcagcagcagcagccccctgagcaacagccacaacaccagcctggtgatcaacaacctggtggacggcatgtacagcaagcaggacaagggcggcgtgagacccggcctgttcaagaaccccaccctgcagagccagctgagcagaagccacagagtgcccgacagcagcaccgccaccaccagcagcaaggagatctacctgaagggcatcgccggcgaggacaccaagagcccccaccacagcgagaacgagtgcagagccagcagcgagggccagagaagccccaccgtgagccagagcagaagcggcagccaggaggccgaggagagcatccaccccaacacccaggagaagtacaactgcgccaccagcagaatcaacgaggtgcaggtgaacctgagcctgctgggcgacgacctgctgctgcccgcccagagcaccctgcagaccaagcaccccgacatctactgcatcaccgacttcgccgaggagctggccgacaccgtggtgagcatggccaccgagatcgccgccatctgcctggacaacagcagcggcaagcagccctggttctgcgcctggaagagaggcagcgagttcctgatgacccccaacgtgccctgcagaagcctgaagagaaagaaggagagccagggcagcggcaccgccgtgagaaagcacaagccccccagactgagcgagatcaagagaaagaccgacgagcaccccgagctgaaggagaagctgatgaacagagtggtggacgagagcatgaacctggaggacgtgcccgacagcgtgaacctgttcgccaacgaggtggccgccaagatcatgaacctgaccgagttcagcatggtggacggcatgtggcaggcccagggctaccccagaaacagactgctgagcggcgacagatggagcagactgaaggccagcagctgcgagagcatccccgaggaggacagcgaggccagagcctacgtgaacagcctgggcctgatgagcaccctgagccagcccgtgagcagagccagcagcgtgagcaagcagagcagctgcgagagcatcaccgacgagttcagcagattcatggtgaaccagatggagaacgagggcagaggcttcgagctgctgctggactactacgccggcaagaacgccagcagcatcctgaacagcgccatgcagcaggcctgcagaaagagcgaccacctgagcgtgagacccagctgccccagcaagcagagcagcaccgagagcatcaccgaggagttctacagatacatgctgagagacatcgagagagacagcagagagagcgccagcagcagaagaagcagccaggactggaccgccggcctgctgagccccagcctgagaagccccgtgtgccacagacagagcagcatgcccgacagcagaagcccctgcagcagactgaccgtgaacgtgcccatcaaggccaacagcctggacggcttcgcccagaactgcccccaggacttcctgagcgtgcagcccgtgagcagcgccagcagcagcggcctgtgcaagagcgacagctgcctgtacagaagaggcggcaccgaccacatcaccaacatgctgatccacgagacctgggccagcagcatcgaggccctgatgagaaagaacaagatcatcgtggacgacgccgaggaggccgacaccgagcccgtgagcggcggcagccccagccaggccgagaagtgcgccaacagactggccgccagcagaatgtgcagcggccccaccctgctggtgcaggagagcctggactgccccagaaaggacagcgtgaccgagtgcaagcagccccccgtgagcagcctgagcaagaccgccagcctgaccaaccacagccccctggacagcaagaaggagaccagcagctgccaggaccccgtgcccatcaaccacaagagaagaagcctgtgcagcagagaggtgcccctgatccagatcgagaccgaccagagagaggcctgcgccggcgagcccgagcccttcctgagcaagagcagcctgctggaggaggccgagggccacagcaacgacaagaacatccccgacgtggtgagaggcggcgacaccgccgtgagcgcctgccagatccacagcgacagcctggacaccagagacgtgcccgaggccgaggccagcaccgaggccagagcccccgacgaggcccccaacccccccagcagcagcgaggagagcaccggcagctggacccagctggccaacgaggaggacaaccccgacgacaccagcagcttcctgcagctgagcgagagaagcatgagcaacggcaacagcagcgccaccagcagcctgggcatcatggacctggacatctaccaggagagcatgcccagcagccccatgatcaacgagctggtggaggagaagaagatcctgaagggccagagcgagagcaccgaggcccccgccagcggcccccccaccggcaccgccagcccccagagaagcctgctggtgatcaacttcgacctggagcccgagtgccccgacgccgagctgagagccaccctgcagtggatcgccgccagcgagctgggcatccccaccatctacttcaagaagagccaggagaacagaatcgagaagttcctggacgtggtgcagctggtgcacagaaagagctggaaggtgggcgacatcttccacgccgtggtgcagtactgcaagatgcacgaggagcagaaggacggcagactgagcctgttcgactggctgctggagctgggctag

SEQ ID NO: 54369 - DNA, 5103 bp, Artificial Sequence
  derived and/or modified sequence
atggatggcaacagtctgctgagtgtgcccagcaatctggaaagttctcgcatgtatgacgtcctagaaccccaacagggcaggggctgcggctcctccgggtctggcccaggaaactctatcactgcttgtaaaaaggtgctcagaagcaactctctgctggaatcgaccgattattggttgcagaatcagcggatgccttgtcagatcgggttcgtggaagataagtccgagaattgtgcgagtgtgtgctttgtcaatttggatgtgaacaaagatgagtgcagcactgaacacttacagcagaagctggttaatgtaagccccgacctacccaaacttatctccagtatgaacgtgcagcaacccaaggagaacgagatagttgtcctctccggcctggccagtgggaacctgcaagcagattttgaggtgtcacagtgcccgtggctccctgacatttgtctcgtgcagtgcgctcggggcaatcgaccaaacagcactaattgtataattttcgagattaacaaattcttgattgggctggagttagttcaggaaaggcagctgcatctggaaactaacatactaaagctggaggatgataccaattgtagtttatcgtcaatcgaagaggattttctaaccgctagtgaacacttggaagaggaatcagaggtggatgagtcaaggaacgattacgagaacatcaacgtgagcgccaatgtcctggaatccaaacagttaaaaggtgcaacccaggtggaatggaattgcaacaaagaaaagtggctgtatgctctagaagacaaatacattaacaagtaccctacacccttgatcaagaccgagcgcagccccgagaacctgaccaaaaacacagcattacaaagcctcgatccctctgccaagccttctcagtggaagcgggaggccgtgggtaacgggaggcaagccacccattattaccactccgaagctttcaaaggccaaatggagaagtcccaggcgctgtacatccccaaggatgcctatttctctatgatggacaaggatgtgcccagcgcttgcgctgtggcggaacaacggtctaatctcaaccctggagatcacgaggatacgcgcaacgctctcccacccaggcaagacggtgaggtgactacgggaaaatacgccacaaacctggcagaaagcgtgctgcaggacgccttcatccgtctgtcgcagtcccagagcactctgcctcaggagtccgcggtcagcgtctcagttggctcgtcactgctgccttcctgctattcaactaaagacaccgtggtcagtcggtcatggaacgaactccctaagatcgtggtggtccagtcccctgacggatctgatgctgcaccccagcccggtatcagtagttggcccgagatggaggtgtcagtggagacgtcctcgatcctgagcggagagaacagcagccgccaacctcagtctgcactagaggtggcgctggcgtgcgctgcaaccgtgataggcacaatttcatccccacaggcgacagaacggctgaagatggaacaggtggtctctaacttcccacctggctcctccggcgcgcttcaaacacaggctcctcagggccttaaagagccaagcatcaatgagtattcttttccttctgctctgtgtggtatgacacaggtggcttcggccgttgccgtatgtggcctgggcgaacgagaggaggtgacatgctcagtcgccccgtccgggtctcttccccctgcggccgaggctagcgaggctatgcctcccctctgcggcctcgccagtatggaactgggtaaggaggccatcgcaaagggtctgctgaaggaggccgccctggtgctgacccgcccgaacacttacagctcaatcggagacttccttgactctatgaataggaggatcatggaaactgcttcgaaatctcagacactctgcagcgaaaatgtcgtgcgcaacgaacttgcccatactttgtccaatgtcatcctgaggcactcaatcgacgaggtacaccacaagaacatgattattgatcctaatgataaccggcactccagcgaaattctcgataccttgatggaaagcacgaatcagctgctgctcgacgtcatatgcttcactttcaagaagatgtcccacattgtccggctcggcgaatgccccgcagtcctgtctaaagagacgatccgacgacgcgagacagagcctagttgccagccctctgatcccggagccagccaggcctggacaaaggcaaccgagtcctctagctctagccctctgagtaattcacataacacgtccctcgtgattaataatctggtcgacggcatgtactccaagcaggacaaagggggcgtacgccctggcctgtttaagaacccaaccttacagtctcagttgagcaggtcccatagagttcctgattccagtactgccaccacttcctctaaggagatttacctcaagggcatagcaggggaagacacaaaatctccacaccacagcgagaatgaatgcagagcatcatccgaagggcagagaagtccaaccgtcagccaatctcggtctgggtcccaggaagctgaagagagcatacaccctaatactcaagagaagtataattgcgcgactagcaggattaatgaagtccaggtaaacctaagtctgctcggcgacgatttgcttctacctgcccaatccacactgcaaacaaaacacccagacatctattgcatcactgacttcgctgaggaactggctgatactgtggtcagcatggctaccgagatagccgctatttgtctcgataatagcagcggcaagcagccttggttctgtgcctggaagcgcgggtctgagtttctgatgacccccaatgtcccatgtcggagcctgaagagaaaaaaggagtcacagggttcaggaacagctgttaggaagcacaagccccctagactttcagagattaaaagaaaaactgatgagcaccctgagctcaaagaaaaattgatgaatcgggtcgtagatgagtcaatgaacctggaggacgtaccagatagcgttaacttgtttgccaacgaagtcgctgcaaaaatcatgaaccttacagagttttcaatggtggacggcatgtggcaggctcaggggtacccaagaaataggttgctcagcggggacaggtggagccggctcaaggcctcaagttgcgaaagtatccctgaggaagactcagaggctcgagcttatgtgaattctctgggccttatgagcacgctctcccaacccgtcagccgtgccagctcggtgtccaaacagagctcatgtgaatcgatcaccgacgagttctctcgattcatggtgaaccaaatggaaaatgagggtcgagggtttgagctcctgctcgattattatgctgggaagaacgcatcttcaatcctgaatagtgctatgcagcaggcgtgccggaaaagcgatcacctgtctgtgaggccaagctgcccctcgaaacagtccagcacagaatccattactgaagagttctaccggtacatgcttcgggatatcgagcgagactcccgagagtctgcctcaagcagacgctctagccaggattggaccgctggcctgctgtccccctctcttcgcagtccagtgtgccaccggcagtcctccatgcccgactctcgatctccctgtagcagactcaccgtgaatgtgccaatcaaagctaattcactcgatggcttcgcccagaactgtccccaggacttcctgtcagtccaacccgtgtccagtgcgagctctagcggcctgtgcaaatccgactcttgcctgtataggcgtgggggtactgaccatattacgaatatgcttatccatgagacgtgggccagcagtatcgaggccctcatgcgtaagaacaagattattgtggacgacgcggaggaggcagacaccgaacctgtatctggcggaagcccgagtcaagctgagaaatgtgccaatcggttagccgctagtcgcatgtgctccggaccaacactgctggttcaggagtccttggactgcccaagaaaagacagcgtgaccgaatgcaaacaaccgccagtctcctctttgtctaaaaccgccagcctgacgaaccacagccccttagatagtaagaaggaaacatcgagctgccaggatcccgtgcctataaaccacaaaaggcgatctctgtgtagtagggaggtgcccttgatccagattgagaccgatcagagggaggcctgcgccggggaacccgaaccatttttgtcaaagtcctctttactcgaggaggctgagggacacagcaacgataaaaatatccctgatgtggttcgggggggtgatacagccgtcagcgcctgccagatccatagtgatagcctggatacccgcgatgtccctgaggcagaagccagtactgaggcaagagcccccgatgaggcaccaaacccgcccagctcttccgaggagagtacagggagctggacacagctggcaaacgaagaggacaatccggatgacaccagctcatttttgcagttgtcagaacgatcaatgtccaacggcaacagtagcgctacttcctctttgggaatcatggatcttgacatctaccaggaatctatgccatcttctcccatgatcaacgaacttgtggaggagaagaaaatcctgaaaggacaaagtgaaagcacggaggcacccgcatcagggccaccgaccggaaccgcgagccctcaaagatctttacttgtgattaatttcgatcttgagcctgaatgccctgacgcagagctcagagccaccctgcagtggatagcagcctcagaactggggattccaaccatatacttcaaaaagtctcaggaaaatcgtattgaaaagtttctggatgtggtccagcttgtgcacagaaagtcttggaaggtgggcgatatatttcacgcagtggtgcagtattgtaaaatgcatgaggaacagaaagatgggcgcctgagcctttttgactggttactggagctcggctag

SEQ ID NO: 54370 - DNA, 5103 bp, Artificial Sequence
  derived and/or modified sequence
atggatggcaacagcctgctgtctgtgcccagcaacctggagagcagcaggatgtatgatgtgctggagccccagcagggccggggctgcggcagcagcggcagcggccctggcaacagcatcacagcctgcaagaaggtgctgcggagcaacagcctgctggagagcacagactactggctgcagaaccagaggatgccctgccagatcggctttgtggaggacaagtctgagaactgtgcctctgtgtgctttgtgaacctggatgtgaacaaggatgagtgcagcacagagcacctgcagcagaagctggtgaatgtgtccccagacctgcccaagctgatcagctccatgaatgtgcagcagcccaaggaaaatgagatcgtggtgctgagcggcctggccagcggcaacctgcaggccgactttgaggtgtcccagtgcccctggctgcctgacatctgcctggtgcagtgtgcccggggcaaccggcccaacagcaccaactgcatcatctttgagatcaacaagttcctgattggcctggagctggtgcaggagcggcagctgcacctggagaccaacatcctgaagctggaggatgacaccaactgcagcctgagcagcattgaggaggacttcctgacagccagcgagcacctggaggaggagagcgaggtggatgagagcagaaatgactatgagaacatcaacgtgtctgccaacgtgctggagagcaagcagctgaagggggccacccaggtggagtggaactgcaacaaggagaagtggctgtatgccctggaggacaagtacatcaacaagtaccccacccccctcatcaagacagagaggagccctgagaacctgaccaagaacacagccctgcagagcctggaccccagcgccaagcccagccagtggaagcgggaggccgtgggcaatggccggcaggccacccactactaccacagcgaggccttcaagggccagatggagaagagccaggccctgtacatccccaaggatgcctacttctccatgatggacaaggatgtgcccagcgcctgtgctgtggccgagcagaggagcaacctgaaccctggggaccacgaggacaccagaaatgccctgcccccccggcaggatggagaggtgaccaccgggaagtatgccaccaacctggccgagagcgtgctgcaggatgccttcatccggctgagccagagccagagcaccctgccccaggagagcgctgtgtctgtgtctgtgggcagcagcctgctgcccagctgctacagcaccaaggacacagtggtgagccgctcctggaatgagctgcccaagatcgtggtggtgcagagcccagatggcagtgatgctgccccccagcccggcatcagctcctggccagagatggaggtgtctgtggagaccagcagcatcctgagcggggagaacagcagccggcagccccagagcgccctggaggtggccctggcctgtgccgccaccgtgattggcaccatcagcagcccccaggccacagagcggctgaagatggagcaggtggtgagcaacttccccccaggcagcagcggggccctgcagacccaggccccccagggcctgaaggagcccagcatcaatgagtacagcttccccagcgccctgtgtggcatgacccaggtggccagcgctgtggccgtgtgtggcctgggggagcgggaggaggtgacctgcagcgtggcccccagcggcagcctgcccccagctgctgaggccagcgaggccatgccacccctgtgtggcctggcctccatggagctgggcaaggaggccatcgccaagggcctgctgaaggaggccgccctggtgctgacccggcccaacacctacagcagcatcggggacttcctggacagcatgaacagacgcatcatggagacagccagcaagagccagaccctgtgcagtgaaaatgtggtgagaaatgagctggcccacaccctgagcaatgtcatcctgcggcacagcattgatgaggtgcaccacaagaacatgatcatcgaccccaatgacaacagacacagcagcgagatcctggacaccctgatggagagcaccaaccagctgctgctggatgtgatctgcttcaccttcaagaagatgagccacatcgtgcggctgggggagtgcccagctgtgctgagcaaggagaccatcagaagaagagaaacagagcccagctgccagcccagcgaccccggggccagccaggcctggaccaaggccacagagagcagcagcagcagccccctgagcaacagccacaacaccagcctggtgatcaacaacctggtggatggcatgtacagcaagcaggacaagggcggcgtgcggcccggcctcttcaagaaccccaccctgcagagccagctgagccgcagccaccgggtgcctgacagcagcacagccaccaccagcagcaaggagatctacctgaagggcattgctggggaggacaccaagagcccccaccacagtgaaaatgaatgtcgggccagcagcgagggccagaggagccccaccgtgtcccagagccgcagcggcagccaggaggccgaggagagcatccaccccaacacccaggagaagtacaactgtgccaccagccgcatcaatgaggtgcaggtgaacctgagcctgctgggagatgacctgctgctgcctgcccagagcaccctgcagaccaagcacccagacatctactgcatcacagactttgctgaggagctggccgacacagtggtgtccatggccacagaaattgctgccatctgcctggacaacagcagcggcaagcagccctggttctgtgcctggaagaggggcagcgagttcctgatgaccccaaatgtgccctgccgcagcctgaagaggaagaaggagagccagggcagcggcacagctgtgaggaagcacaagccaccccggctgtctgagatcaagaggaagacagatgagcaccctgagctgaaggagaagctgatgaacagagtggtggatgagagcatgaacctggaggatgtgcctgacagcgtgaacctgtttgccaatgaggtggccgccaagatcatgaacctgacagagttctccatggtggatggcatgtggcaggcccagggctaccccaggaaccggctgctgagcggggaccgctggagccggctgaaggccagcagctgtgagagcatcccagaagaagattctgaggcccgggcctacgtgaacagcctgggcctgatgagcaccctgagccagcctgtgtcccgggccagctctgtgtccaagcagagcagctgtgagagcatcacagatgagttcagccgcttcatggtgaaccagatggagaatgaaggccggggctttgagctgctgctggactactatgctgggaagaatgccagcagcatcctgaacagcgccatgcagcaggcctgcaggaagagtgaccacctgtctgtgcggcccagctgccccagcaagcagagcagcacagagagcatcacagaggagttctaccgctacatgctgcgggacatcgagcgggacagccgggagagcgccagcagcagaagaagcagccaggactggacagctggcctgctgagccccagcctgcggagccctgtgtgccaccggcagagctccatgccagacagccgcagcccctgcagccggctgactgtgaatgtgcccatcaaggccaacagcctggatggctttgcccagaactgcccccaggacttcctgtctgtgcagcctgtgtcctctgccagcagcagcggcctgtgcaagagtgacagctgcctgtaccgccggggcggcacagaccacatcaccaacatgctgattcatgagacctgggccagcagcattgaggccctgatgaggaagaacaagatcatcgtggatgatgctgaggaggccgacacagagcctgtgtctgggggcagccccagccaggccgagaagtgtgccaaccggctggccgccagcaggatgtgcagcggccccaccctgctggtgcaggagagcctggactgccccaggaaggacagcgtgacagagtgcaagcagccccctgtgagcagcctgagcaagacagccagcctgaccaaccacagccccctggacagcaagaaggagaccagcagctgccaggaccctgtgcccatcaaccacaagaggaggagcctgtgcagccgggaggtgcccctcatccagattgaaacagaccagcgggaggcctgtgccggggagcctgagcccttcctgagcaagagcagcctgctggaggaggccgagggccacagcaatgacaagaacatcccagatgtggtgcggggcggggacacagctgtgtctgcctgccagatccacagcgacagcctggacaccagagatgtgcctgaggccgaggccagcacagaggcccgggccccagatgaggcccccaacccccccagcagcagcgaggagagcacaggctcctggacccagctggccaatgaggaggacaacccagatgacaccagcagcttcctgcagctgtctgagaggtccatgagcaatggaaacagcagcgccaccagcagcctgggcatcatggacctggacatctaccaggagagcatgcccagcagccccatgatcaatgagctggtggaggagaagaagatcctgaagggccagagcgagagcacagaggccccagccagcggccccccaactggaacagccagcccccagaggagcctgctggtgatcaactttgacctggagcctgagtgcccagatgctgagctgcgggccaccctgcagtggattgctgccagcgagctgggcatccccaccatctacttcaagaagagccaggagaacagaattgagaagttcctggatgtggtgcagctggtgcacaggaagtcctggaaggtgggggacatcttccacgctgtggtgcagtactgcaagatgcatgaggagcagaaggatggccgcctgagcctgtttgactggctgctggagctgggctag

SEQ ID NO: 54371 - DNA, 5103 bp, Artificial Sequence
  derived and/or modified sequence
atggacggcaacagcctgctgagcgtgcccagcaacctggagagctctcgaatgtacgacgtgctggaacctcagcagggacgcggctgcgggtcatcgggctctggcccgggaaacagcattaccgcctgcaagaaggtcttgagatcaaactcactgctcgagtcaacggactattggctgcaaaaccagagaatgccgtgtcaaatcggcttcgttgaggacaaaagcgaaaattgcgcttccgtctgtttcgttaatctcgacgtgaacaaggacgagtgcagtaccgagcatttgcagcaaaagcttgtgaacgtgtcgccagacctgcccaagctgatcagctcaatgaatgtacagcagccgaaagaaaatgagattgtggtgttgtccggtctggcgtccggcaatctgcaggccgactttgaagtgtcgcagtgtccgtggctacccgacatctgcctggttcagtgcgcccggggcaacagaccgaatagcacaaactgcatcattttcgagatcaataagtttctcatagggctggaactggtgcaagagaggcagttgcatctggagacaaatattctgaaattggaagacgataccaactgttcgctctccagtattgaagaggactttctgacagctagcgagcacctggaggaagagtcagaagtggacgagagtcgtaatgattacgagaatattaacgtgtctgctaacgtgctggagtcaaaacagcttaagggagcgacccaggtggagtggaactgcaataaagagaaatggttgtacgctttagaagataaatacataaataagtatcctacgccgctgattaaaaccgaacggtctccagagaatctaaccaaaaatactgccttgcagagcctggacccatccgctaagccctcccagtggaaaagggaagcggtcggcaatgggaggcaagcgacccactattatcactcggaggcgtttaaaggtcagatggagaaatcacaggccctgtacattcctaaagacgcgtacttttcgatgatggataaagatgtcccttctgcctgcgccgtagcagaacaacggtcgaatctcaaccccggcgaccatgaggacacacgtaacgctctcccaccgaggcaggatggagaggtgacaaccggaaagtacgctactaacctggcagaaagcgtgctgcaagacgcttttataagactcagtcagtcacagagcaccttgccccaagaaagcgcagtatcagtgtctgtcggaagttccctgctacctagctgctactccactaaggacacagttgtgagcaggtcatggaacgaactccccaaaatcgttgtggtgcagagcccagatggctctgacgctgcgcctcagccagggatcagctcctggcccgagatggaagtcagcgtggaaacatcgtcaattctgagcggtgagaactccagtagacagccccagagtgccctggaggtggccctcgcttgcgcggctacagtgattggcaccatatctagtccccaggcaactgaacgactcaagatggagcaggtcgtttccaatttccctcctggctcttccggcgctttgcagactcaggcgccccagggactcaaggaaccgtcaattaatgaatactcttttccgtcagccctgtgtggcatgacacaggttgcctctgctgtggccgtctgtggcctgggcgagagggaggaggtaacgtgttctgtggcccctagcggatccctgccaccagctgctgaggccagcgaggcaatgccgcccctctgcggactggccagtatggagctaggaaaggaggcaatagcaaagggtttattgaaggaggctgccctggtccttactcgccctaacacgtatagctcgataggagatttcctggattctatgaatagacgtattatggagacggcttctaagagtcagacgctgtgttcagagaacgtggtccgaaatgagctggcccataccctttccaatgttattctgcgccacagtatcgacgaggtgcaccataaaaatatgattatcgacccgaatgacaatcgacattccagtgagatattggatactttgatggagagcacaaaccagctgctgctggatgtgatctgctttaccttcaagaagatgagccatatcgtccgacttggcgaatgtccagcggttctgagtaaagaaactattagaaggagagaaaccgaaccaagctgccaaccctcagacccaggcgcatctcaggcctggaccaaggccacagagtctagtagctcctctccacttagcaatagtcataacacatccttggtcattaacaacctagtggacggtatgtactccaagcaggataagggcggagttagacctggccttttcaagaacccgaccctacagtcccagttgagccgctctcatcgagtccccgactcttccactgctacaacaagctcaaaggagatctacctgaaaggtatcgccggggaggatacgaagtctcctcaccattccgaaaacgagtgcagagcatcgtccgagggacaaaggagtcctactgtgagtcagtcacgaagcggctcacaggaggcggaggagagtattcacccaaacacccaggagaaatacaattgcgcaaccagccgtattaacgaggttcaggtgaatctgtctctactgggagatgacctactcctgccagcccagagtacactccaaactaaacaccccgatatttattgtataaccgacttcgcggaagagcttgccgacactgtcgtgtcgatggccacggaaattgctgcgatttgtctagacaacagttccgggaaacaaccatggttctgtgcgtggaaacggggttcagaatttttgatgacacctaacgttccctgtcgttctctaaaaagaaaaaaggagagccaagggagcgggactgccgtcaggaaacacaagccaccaaggctcagcgagatcaaaaggaagacggacgagcaccctgagctaaaggagaagctcatgaatcgcgttgtggatgagtccatgaacttagaagatgtcccggatagtgtcaatctattcgcaaatgaggtcgccgccaagatcatgaacctcaccgagtttagcatggtggatggcatgtggcaggcgcaggggtacccccgcaatcgcctgctgtccggggaccggtggtccagactgaaagcctcttcctgcgagagcattccagaggaggattctgaggcgagagcctatgtcaactccctgggactgatgtccacgctgtctcagcccgtgagccgcgcttcctccgtctcaaagcagagctcctgtgaatccatcacagacgagttctcacggtttatggtgaaccagatggaaaacgaggggagagggttcgaactcctgcttgactactatgcgggcaaaaatgcaagctccattcttaactctgctatgcaacaggcctgccgaaagagcgaccacttgagcgtgaggccctcttgtcccagtaagcagagtagcacagaatcaattacagaggagttttacagatacatgctacgcgatatagaacgtgattctagggaatcagcctctagccgacgctcatcccaggattggacagcaggattgctgtcccctagcttacgatctcctgtatgccatcgacagtctagcatgccagactctcggagcccctgctctcgccttactgttaacgtgccgatcaaggcaaactccttagatgggtttgcccagaactgtcctcaagactttttgtccgtccagcccgtttcttccgcctccagcagcggattatgcaagagtgactcgtgcctgtatagaagaggtgggaccgatcacatcacgaatatgctcatccacgaaacatgggcctcttctatcgaagcactcatgagaaagaacaaaatcattgtggacgacgcagaggaagcggatacagaaccagttagcggcggtagcccgtctcaggctgaaaagtgtgctaacaggctagctgcctcaagaatgtgttctgggccgaccctactcgtgcaggagtcactggactgcccacgcaaggactccgttactgaatgcaaacaaccaccggtgagcagcctgagtaaaaccgctagtcttaccaaccacagccccctggatagtaaaaaggagacctcttcatgtcaggatccagtcccgatcaaccataagcgcaggtccctgtgttccagggaagttcctctaatacaaattgagaccgatcagagggaggcttgcgctggagaacctgagcctttcctgtctaaaagctccctcctcgaagaggccgagggtcatagcaatgacaaaaatatccctgacgtggtacgcggcggcgataccgctgtgagtgcatgtcagattcatagtgacagtcttgacacccgggacgtgcccgaggccgaggcatcaacagaagctcgtgcgccagacgaagcacctaatccaccctccagctcagaggaatccactggtagttggacccagctggcgaatgaggaagataatcctgacgacacatcttctttcctccagttgagcgaaaggagcatgtccaacgggaactcaagtgccacctccagcctgggcattatggatctggacatatatcaggaaagcatgccaagctctcccatgattaacgagctcgtcgaggagaagaaaatccttaagggccaaagtgagtccacggaagcaccggcatccggccctcccaccggcacagcatcaccccagcgaagcctgctggtcataaattttgatctcgagcctgagtgtcctgatgccgaacttcgagcgacactgcaatggatcgccgcctctgagctgggaatccccaccatttattttaagaaatctcaggagaatcgcatagagaaatttttagatgtggtgcagctcgttcaccgtaaatcatggaaagtgggagacatctttcacgccgtcgtccagtactgcaagatgcacgaagaacaaaaagatggcagactctcgctgttcgactggctgctggagctgggctag

SEQ ID NO: 54372 - DNA, 5102 bp, Artificial Sequence
  derived and/or modified sequence
atggacggcaactcactcctgagcgtaccttccaatctggagagttccagaatgtacgacgtgctcgagcctcaacagggcaggggatgtgggtccagtgggagtggccctgggaatagcatcacagcctgcaagaaggtactgaggtcaaattccttactggaatcaacagattattggctgcagaaccagaggatgccatgccagattggtttcgtcgaggataagtccgaaaactgcgcttcagtctgtttcgtgaatctggatgtgaacaaagacgaatgctccactgagcatctgcaacagaaactggtcaacgtgtctccggacctgcccaagttgatcagtagtatgaacgtgcagcagcccaaagaaaatgagatcgtcgtactgagcgggctggctagtggtaacctgcaggcagactttgaagtgagccagtgtccctggttgccagatatatgtttggtgcaatgcgccagagggaatcggcctaactccactaactgtattatcttcgagatcaataagttcctgattggcctggagttagtacaggaacggcaactgcatcttgagacaaacatacttaagcttgaggatgatacaaactgctccctgtcaagcatcgaggaagattttctgaccgcatctgaacatcttgaggaagaatcggaagtcgatgagagtaggaacgactacgaaaacatcaacgtcagcgccaatgtactggagtccaagcagctgaagggggcaactcaagtcgaatggaattgtaataaagaaaaatggctgtacgcactcgaggataagtacataaataaatatcctacgccacttatcaagacagagcgctccccagagaatctcacaaagaataccgccctgcagagcttggacccttctgccaaaccttcccaatggaaaagagaggctgttgggaacggaagacaggcgacacattactatcattctgaggcattcaagggacaaatggagaaatctcaggctttgtacattccgaaagacgcctacttttctatgatggacaaagatgtgccatccgcatgcgctgtcgctgagcaaaggtctaatttgaatccaggagatcatgaggacaccagaaacgccctgccaccacgccaagatggcgaggttaccactggcaagtacgccacgaacctggcagagtctgttctgcaggacgctttcattagactctcccagagccagtcaacactcccacaggaaagtgccgtgagtgttagcgtgggcagttccttgctccccagctgctactcaaccaaggatactgtggtcagtagatcctggaacgagttacccaagattgtcgttgttcaatctcctgatgggagcgatgcggctcctcagcccggaatttccagttggcctgaaatggaggttagcgtagaaacgtcctcaattttgtcaggcgaaaactcctcccggcaaccccagtcagctctggaggtagcacttgcctgcgcagcgacagtgattgggacgattagctcgccgcaggcaacagaacggttaaagatggagcaggtggtcagcaatttccccccagggagtagtggcgcactccagacccaagcaccgcaaggactgaaggagccaagtattaacgagtattcgtttcctagcgccttatgcggaatgacccaggtggcctccgctgtggctgtctgcgggctgggcgagcgagaagaagtgacttgctcagtggctcccagcggctccctcccaccagcagccgaggctagtgaagcgatgcctccgctctgcggactggcctccatggaattgggcaaggaggcgattgcaaaaggacttctgaaggaggctgctctggtgctgacgcggcctaacacttacagttctatcggagattttctagactctatgaacagaaggatcatggagactgcttccaagtcacagacactgtgttcggagaatgtcgtccgcaatgagctcgcacatactctaagtaatgttatattgaggcattctatagatgaggtgcaccacaagaatatgataatcgaccccaatgataatcggcatagttccgaaatactggataccttaatggagtccaccaatcagttattactggacgttatctgcttcacgttcaagaagatgagtcacattgtccgcctaggggagtgtcccgcagtgctttccaaggaaaccataagacgacgggaaacagaaccgtcatgtcaaccgagcgatcctggggcatcccaggcgtggactaaagctacagaatctagtagctcctctccactgtccaactctcataacaccagcctcgtcatcaataaccttgtcgacggcatgtactcaaagcaggataaggggggagtgcgccctggcctgttcaagaaccctactctgcagagtcagctcagtcggtcccatagagtgcctgactcctcaacagccaccaccagttcaaaggaaatctacctgaaaggcatcgcaggggaggatacgaaaagcccccaccactcagaaaacgagtgtagagccagcagcgaaggacaaagaagtccaaccgtctcccagtcccggagcggttcccaggaggcagaagaatcgatccaccccaatacccaagagaaatataactgcgcaacttctcgaattaacgaagttcaggtgaacctgtcgcttttgggtgacgacctgctgctcccagcacagtccacccttcaaacgaaacatccggacatatattgcattacagacttcgccgaagaattagcggataccgtcgtgtcgatggctactgagatcgcggctatctgtctggataactcttctggaaaacagccctggttttgtgcgtggaagagagggtccgagttccttatgacacctaatgtgccctgcagaagcctcaaaagaaagaaagagtctcaaggtagtggcacggccgtgcggaagcacaagccacctcgcctatctgaaatcaagcggaagactgacgagcaccccgaactgaaggaaaaacttatgaacagagtggtggacgagtccatgaacttggaagacgtgcccgactcagtcaatctttttgccaacgaggtagcagccaagattatgaatctgactgagttctcaatggtggacggcatgtggcaggcccagggatatccaaggaataggctcctgtcaggagataggtggtccaggttgaaggcatcctcatgcgaatccatacccgaggaggattccgaagcccgtgcctatgtcaattccctcggccttatgtctacactcagtcagcctgtatcaagggcatcaagtgtttctaagcaatcgagttgtgaatccattacagacgagttcagccgttttatggtaaatcaaatggaaaacgagggtcgaggattcgaactgcttttggattattatgcagggaagaacgcatcaagcatcctgaactcagctatgcagcaagcatgccggaagtcagatcacctttctgtccgccctagttgtccttccaagcagagtagtactgagtctataactgaggaattctaccgctacatgctcagggatattgagagagacagtcgtgagagtgccagcagcagacgctcctcacaagactggacggcgggtctgctgtcaccttcactcagaagtcccgtttgtcataggcagtccagcatgccagattcccgatctccgtgtagccgactaacagtgaatgtacccatcaaggctaactcactggacggctttgcacaaaactgcccgcaggactttttgagtgtgcaacccgtgtcaagtgcgtcaagcagcggactgtgcaaatctgatagctgcctgtacagacgtggaggtaccgatcatataactaacatgttaatccacgagacctgggctagttccatcgaggctctgatgaggaagaataagataatcgtagatgatgctgaggaggctgataccgagcccgtgagcggcggaagcccttctcaagccgagaagtgtgcaaatcggctggctgcttctagaatgtgttccggccctacattactggttcaggaatcccttgactgtcctagaaaagatagcgtgacagagtgcaagcagccccctgtgtcttcactcagtaaaactgcgtcgctgactaatcacagccccttggactcgaaaaaggagacaagctcatgtcaggatcctgtgcctataaatcataagcgtagatctctgtgcagcagagaggtcccactgatccagatcgaaacagatcagagagaagcatgcgctggcgagcccgaaccctttctgtctaaatcttctttactggaggaagccgaaggtcactctaatgacaaaaacatccccgacgtggtcagagggggagatactgctgtgtcagcatgtcagatccattcggacagcctggacacgagagacgtgccagaggcagaggcatcaacagaagctagggccccagacgaagctccgaacccgccttctagtagcgaagagagcaccgggtcatggacccaattggccaatgaggaagacaaccccgacgacaccagctctttcctccagctgtctgaacggagcatgtcaaacggtaactcaagcgcaacgagctcactggggattatggacctggacatataccaggagtctatgcccagctccccaatgatcaatgagctcgtcgaagaaaaaaagatactaaaagggcagtctgaatctacggaggcccctgcctctggacccccaaccgggactgctagtccccagagaagtctgctcgttattaacttcgacctagaaccagaatgtccagacgccgagctgcgcgctacgctacagtggattgctgcttcggagctgggaattcccactatatattttaagaaaagccaggaaaatcggatcgaaaaatttttggatgtagttcagttggtccataggaaatcatggaaggtgggcgatattttccatgccgtggttcagtactgtaagatgcacgaggaacagaaagatgggagactgtccctattcgactggttgttggaacttggcta

SEQ ID NO: 54373 - DNA, 6917 bp, Artificial Sequence
  derived and/or modified sequence
tccttcgcctgcactttccgtctttcttctctgggcgcccaccaacaatggatggcaactccctgctctcggtaccaagcaacttggagtcatcacggatgtatgacgttttggaaccgcagcagggcagaggctgtggcagctcaggaagcggcccggggaactccatcacagcctgtaagaaggttcttcgcagcaatagcctgctggagtcaacagactactggttgcagaatcagaggatgccctgccaaattggttttgtagaagacaagtctgaaaactgtgcttctgtctgctttgtgaatcttgatgtgaacaaggatgaatgcagcacagagcacctgcaacagaaactggtcaacgtttcaccagatcttccaaaacttatcagttccatgaatgtccaacaaccaaaagaaaatgaaattgttgtcctaagtgggttagcctctggaaatctccaggcagattttgaagtttcacagtgcccttggctgccagatatctgcttggtccaatgtgcaagagggaacagaccaaacagtaccaactgcatcatctttgaaatcaacaaatttctgattggtctggaactggtgcaggagcgacagctccacctggaaacaaacatcttgaaactggaggatgacacgaactgttccttatcttcaatcgaggaagactttctcaccgcttctgagcacttggaggaggaaagcgaggtggatgaatctaggaacgattatgaaaatataaatgtctcagccaatgttttggaaagtaaacagctaaagggagccacccaggtggaatggaattgcaacaaggaaaagtggctttatgctttggaagacaaatacatcaacaaatatcccacaccattgattaaaacagaacgatctccagaaaacctaacaaagaacacagccttgcagagtctagatccctcagccaagccatcacagtggaaaagagaagctgtggggaatgggagacaagccacacattattatcattcagaagcttttaaaggtcaaatggaaaaatcacaggcactgtatattccaaaagatgcttatttctccatgatggataaagatgtaccttctgcatgtgctgtggcagagcagagaagcaacctaaacccaggagaccatgaagacacaagaaacgctctccctcctagacaagatggagaagtcaccactggcaagtatgctacaaatttagcagaatccgtgctgcaggatgcatttattagattatctcaatctcagtccacattaccccaggaatctgcagtcagtgtttctgtaggaagttctctgcttcccagttgctattccacaaaagatacagtggtttctcggtcatggaatgagctccccaaaatcgtcgttgttcagagtccagatggcagtgatgctgccccacagccaggcatctcctcctggcctgagatggaagtctctgttgaaacctcaagcatcctctctggagagaactccagcagacaaccccagagtgctctagaagtggcgttagcttgtgcagccactgtgattggaactatttccagtccacaggccacagaaagactcaaaatggagcaagtggtctcgaactttcccccagggagcagtggtgcactgcaaactcaagcaccccaaggactcaaggaaccttccatcaatgagtactcctttccatctgctttgtgtggcatgactcaggtggccagtgccgtggctgtctgtggtctgggtgaaagagaagaggtgacatgctcagtggctccaagtggtagcctcccgcctgcagctgaggcttctgaagccatgcccccactttgtggtttagcaagcatggagcttggcaaggaagccattgccaagggattgctcaaggaggctgctctggttttaacaaggcctaatacctacagcagcattggagactttctggactccatgaacaggagaatcatggaaactgcttcaaagtctcagaccctgtgctcagaaaatgtcgtcaggaatgaactggcacataccctgtccaatgttatcctgaggcattccattgatgaagttcaccacaaaaatatgataatcgaccccaatgacaacaggcattcatctgaaattctggacaccttaatggaaagtacaaatcaactgcttttagatgtgatatgcttcacgttcaagaagatgagtcatattgtacggcttggtgaatgtcctgctgtcctttctaaggagaccatcagaaggagggagacagaaccaagctgccagccatctgatccgggtgctagtcaagcttggacaaaagccactgaatcctccagcagctctccacttagcaattcacacaacacgagtcttgtcatcaacaatcttgtggatggcatgtattcaaaacaagacaagggtggagtgaggccaggcctcttcaagaaccccacgctgcagtcacaattatcacgtagtcacagagtgcccgattcttcaactgctacaacatcctccaaggaaatatatctgaaaggaatagcaggagaggatacaaaaagccctcatcacagtgagaatgaatgcagagcctcttccgaaggacaaaggtccccaacggtcagccagtccagaagtggttcccaggaggctgaggagagtatccacccaaacacccaagaaaagtacaactgtgccacatctcgcatcaacgaagttcaagtcaacctgtccttgttaggggatgacctgctgcttcctgctcaatccacgcttcaaacaaagcatccagacatctactgcattacagactttgcggaagaattagcagacacggtcgtctccatggcaactgaaattgcagcgatttgccttgacaactccagtggaaaacaaccctggttttgtgcatggaaaagagggagtgagtttctgatgacacccaacgtaccctgccgatccttgaagaggaagaaagagagccaggggagcgggaccgctgtgaggaaacacaagcctccccggctcagtgagatcaagaggaagacggacgagcaccctgagcttaaagaaaagctgatgaacagggttgtggatgagtccatgaaccttgaagatgtcccagattctgtcaatctttttgccaatgaagtggcagccaagatcatgaacctaacggagttctctatggtggacggcatgtggcaggcgcagggctatccccggaatcggttactgagtggcgacaggtggagccggctgaaggcctccagctgcgaaagcattcctgaggaagactccgaggccagggcctatgtcaacagcctgggcttaatgagcacgctgagccagccggtcagcagggccagctctgtctccaagcagtcgagctgtgagagcatcaccgatgagttttccaggttcatggtgaaccagatggaaaatgaagggagaggatttgagttactgctggattactatgctggcaagaacgccagcagcattctgaactcagccatgcaacaggcgtgccggaaaagtgaccacctcagtgtgaggcctagctgtccctctaagcagtccagcacagagagcatcactgaggagttctacaggtacatgctgagggacatcgaaagagacagcagagaaagtgcctcctccagacggagcagccaggattggacagccggcctgctgtctccttctctgcgatccccagtgtgccacagacagtcgtccatgccagacagcagatccccatgctccaggctgacagtgaatgtgcccatcaaagccaactctttagatggctttgctcagaactgcccacaagatttcctaagcgtgcagccggtcagtagcgcgtcctcatccggtctctgcaaatctgactcttgcttgtatcggagaggtgggactgaccacatcaccaacatgttaattcatgaaacgtgggctagctccattgaggctctcatgcgcaagaacaaaatcattgtggatgatgcagaggaagctgacactgagcctgtttctggtggctctccctcgcaagcagagaagtgtgcaaatagattagctgcgagcaggatgtgcagtgggccaactctgcttgttcaggagtctctcgattgcccgaggaaagactctgttaccgaatgtaaacagcccccagtgtcatctttgagcaaaactgcttctcttacaaaccacagccctttagattctaaaaaagaaacttcctcgtgccaggaccctgtaccaataaaccacaaaaggcgatcactttgctcgagggaagtgcctttgattcagattgaaacagatcagagagaagcctgtgctggggaacctgaacccttcctttccaaaagcagcctcctagaggaagcagaagggcattcgaatgacaaaaacatcccagatgtggtgagaggtggagacacagccgtgagcgcttgtcaaatccatagtgacagccttgataccagagatgtaccagaggctgaagcctccacagaagccagagcccccgatgaggcccccaaccctccaagcagcagcgaggagagcacaggcagctggacccagcttgccaatgaggaagacaacccagatgacacaagtagctttctccagctcagtgagcgatccatgagcaatggcaacagtagtgccactagcagtcttggcattatggatctggacatttatcaggaaagcatgccatcttctcccatgattaatgaattagtagaagaaaagaagattcttaaaggacagtcagaaagcacagaggcacctgcatctggaccgcctacgggaacagccagcccccagaggagcctgctggtgatcaactttgacctggagccagagtgtccagatgccgagctccgagccactctgcagtggatagctgcctctgaactggggattcccaccatctactttaagaaatctcaggaaaacagaattgaaaagtttctagatgtcgtgcagctggttcatcggaagtcctggaaagtgggtgatatcttccatgcagttgtccagtactgcaaaatgcatgaggagcagaaggatgggagactgagtctctttgactggctcttggaactgggataataaggcagtctgccgtatagatcattccttccctttattccaacttagattacagtggtttgttctaaatgctctaaacattctcaaaacatcacatcacattagcagaactataaaaaaaaatctgctactcagatccactgcatacagaataagtcagaggaaaagcaaaatataggtctgtccaaattcatacaacttgtgggtgagttccaaagagcttggattagaagggctggacaaagagagaattcaatggggcccaaattagaatgcttataatgagacccaatctccaggaaaacaacactcacataagtttaatcatataaaatgatttgtaatgtctctaattagatgaatcaactagaaacaaactcagtggtcaaaataatttttaagagtattccgtaacctatattttacttttctgattatattaaggggctgccagcccggagaaatacttaagatatgggtgagaaatccccagacttttatacaaaagatttccactttcaaatcaatgtcagtagacattgataaaagtatagcagcatcctctactgaggtgatttcatttattccctgcagcccactgataaatatctcacttctcccaaatagtatgtggactcccagctaagcagaaaactattgtcattcaactgaagaagaggaagataaaagattgtcttgtttccatcactgtattacttgtgtaacatgattacataattcttatcctaagagaaagctttcatatttaaaaaaaagtcttttcagataaaatctgcttgtgtcttgaataatatgaaatacaaactttcactttattttattgtaaattataaagagattattgtcttaaataatatattgagttagcttcaagcttcctaaaatatgaagagattgttgtctaaagtcacatattgacattgagctcagtggcctgtttcatcacgtatgtgctgctacctgtacagcagacatgccgctccagtgacatttataatgacagaagcagggtaatggtcttgtgtttgacatgatcagttaggatcatagactttccctgactcgtagatattagccttgaattgggggaaaagaagactttgacacattttagttattttaataacagagatttactcttttgaaaaataaaggtatctaatgtctccctaataagtcttctttccttccaactaaatgacctacacggacttttattttcttgatcaaagaggtgtttattaaggacttctggataactatacttttactctatttttaaagatcacaaagtaattttaaatgtgaacaggttcccataccatgaatgctggcctcaccttctctatcatccacattttgaaatgcaaagaaagctcccttgtaagccatacttccttccccactcccatcctaggatacttgcccagtgctcattaggcatttcttattcagatagtccaaatttaggttattatgcttaatttgacacattaactaaatgcccagttttaaaatatatccatcaattcacgctgaaatgtgcttctttgtgctatcaaatggaatagaatacacttattttttaaacaatcccagaatactgtgtgtagacttttgttgtgctcaaataaatgtttacttatcttacaaagctcaaatactggattgtaaccatgtgatgaagttatctatgttgtacctaacattgcaaattaatcaataaatctctgttgtcagattgtt

SEQ ID NO: 54374 - protein, 121 aa, Artificial Sequence
  derived and/or modified sequence
MSFIFEWIYNGFSSVLQFLGLYKKSGKLVFLGLDNAGKTTLLHMLKDDRLGQHVPTLHPTSEELTIAGMTFTTFDLGGHEQARRVWKNYLPAINGIVFLVDCADHSRLVESKVELNVCFVL

SEQ ID NO: 54375 - protein, 198 aa, Artificial Sequence
  derived and/or modified sequence
MSFIFEWIYNGFSSVLQFLGLYKKSGKLVFLGLDNAGKTTLLHMLKDDRLGQHVPTLHPTSEELTIAGMTFTTFDLGGHEQARRVWKNYLPAINGIVFLVDCADHSRLVESKVELNALMTDETISNVPILILGNKIDRTDAISEEKLREIFGLYGQTTGKGNVTLKELNARPMEVFMCSVLKRQGYGEGFRWLSQYID

SEQ ID NO: 54376 - protein, 117 aa, Artificial Sequence
  derived and/or modified sequence
MGLSFWWTVQIILASWNPKLSLMIYCSSLLTLAPNALMTDETISNVPILILGNKIDRTDAISEEKLREIFGLYGQTTGKGNVTLKELNARPMEVFMCSVLKRQGYGEGFRWLSQYID

SEQ ID NO: 54377 - protein, 115 aa, Artificial Sequence
  derived and/or modified sequence
  misc_feature (1)..(1): Xaa can be any naturally occurring amino acid
XSFWWTVQIILASWNPKLSLMIYCSSLLTLAPNALMTDETISNVPILILGNKIDRTDAISEEKLREIFGLYGQTTGKGNVTLKELNARPMEVFMCSVLKRQGYGEGFRWLSQYID

SEQ ID NO: 54378 - protein, 155 aa, Artificial Sequence
  derived and/or modified sequence
MLKDDRLGQHVPTLHPTSEELTIAGMTFTTFDLGGHEQARRVWKNYLPAINGIVFLVDCADHSRLVESKVELNALMTDETISNVPILILGNKIDRTDAISEEKLREIFGLYGQTTGKGNVTLKELNARPMEVFMCSVLKRQGYGEGFRWLSQYID

SEQ ID NO: 54379 - DNA, 366 bp, Artificial Sequence
  derived and/or modified sequence
atgtccttcatcttcgaatggatctacaacggctttagctccgttctgcagttcctgggcttgtacaagaaaagtggtaagctcgtgttcctcggtctggataacgctggaaagaccaccctactgcacatgctaaaagacgatcgactcggtcagcacgtccccacactgcatccaacatcagaggagctgaccatcgccggaatgacctttaccaccttcgacctgggcggacacgaacaggctcgccgagtgtggaagaactacctgcctgcaattaatggtattgttttcttggtcgactgtgctgaccatagcaggttagtggagtcaaaagtagagctcaatgtctgctttgtgctgtag

SEQ ID NO: 54380 - DNA, 597 bp, Artificial Sequence
  derived and/or modified sequence
atgtcctttattttcgaatggatctacaatggcttctcaagcgtcctccagttcctaggactctataagaaatccggtaagctcgtgtttctgggcctggataacgctggtaagactaccctgctgcatatgcttaaggacgaccgcctcgggcaacatgtgccaaccctacatcctacctctgaggagctaaccatcgctggcatgaccttcaccaccttcgatctcggaggccacgagcaagccagacgagtgtggaagaattaccttcccgccatcaacgggatcgtgttccttgttgattgtgccgatcacagcaggctagtcgagtcaaaagtggagttaaacgctttaatgaccgacgaaaccatctctaacgtccctatcctgatcctcggcaacaagattgatagaacggatgcaatatctgaggaaaaactccgtgaaattttcggcttgtacggccagacaactggcaaagggaatgtcacactgaaggagctaaacgcccggcctatggaggtctttatgtgctcggtgctgaaacggcagggttatggagaaggcttccggtggctgagtcaatacattgattag

SEQ ID NO: 54381 - DNA, 597 bp, Artificial Sequence
  derived and/or modified sequence
atgtccttcatctttgaatggatctacaacggcttctcatctgtactgcagttcttaggactgtacaagaagtctggaaagctggtttttctggggttggacaacgctggcaaaacgactctgctccacatgttgaaggatgatcgcctcggccagcacgttcctaccttacatcccacttccgaagaactgactatcgcgggtatgacttttacgacctttgacctgggtggacatgagcaagccaggagggtttggaaaaattacctgcctgctatcaacggcattgtgttcctggttgattgcgccgaccactcgcgactggtggaatctaaggtagagttaaatgcactcatgaccgatgagaccattagtaacgtgcccatattgatcctcggcaacaaaattgaccggacagatgcaatttcagaggagaagctgcgggagatcttcggcctgtatggccaaacgaccggcaaagggaatgtgaccctcaaagagttgaacgctcggcccatggaggtctttatgtgctctgtgctcaagcgccaaggctacggtgaaggattcaggtggttgagccagtatatcgactag

SEQ ID NO: 54382 - DNA, 597 bp, Artificial Sequence
  derived and/or modified sequence
atgtccttcatctttgagtggatttataacgggttctcatccgtgctgcagttcctgggcctttacaaaaagagcggcaaattggtatttctggggctagataacgccggaaagaccactctactgcacatgttgaaagacgatcgcctggggcaacatgtcccaacgcttcatccgacgagcgaagagcttacaattgctggtatgacctttaccaccttcgacctggggggtcacgagcaggctaggcgtgtgtggaagaattacctgccagccatcaatggcattgtgttcctggtcgattgcgccgatcattctagactggtggaatctaaagtggagctcaacgctcttatgaccgacgaaaccattagcaacgtgcccattctgatcctgggcaacaagattgatcgcaccgacgcaatctcagaggagaaactccgggagattttcggactgtacggacagaccactggcaagggcaatgtgaccctcaaggaactgaatgctcggccaatggaagtcttcatgtgcagtgtgctcaagcgccaaggttatggcgagggattccgttggcttagccaatacattgactag

SEQ ID NO: 54383 - DNA, 597 bp, Artificial Sequence
  derived and/or modified sequence
atgtcattcatctttgaatggatatacaatggcttttccagcgtcctgcagttcctggggctctacaaaaaaagcgggaagttggtgtttttgggcctcgataatgccggaaagacgacacttctgcacatgctgaaggatgatcggctgggccagcacgtgcccaccctgcaccctacgtccgaggaacttactattgcaggaatgacttttaccaccttcgacctcggcgggcatgagcaggctaggagggtgtggaagaattacctgccagcaattaacgggattgtgttcctcgtggactgcgctgatcactcccggcttgtcgagtctaaagtggaacttaatgctctaatgaccgacgaaacaattagcaatgtgcctattctaatcctggggaataagatcgatcggactgacgctatcagcgaagaaaagctgagggagatctttggactctacggccagaccacaggtaaaggtaatgtaacactcaaggagctgaatgctcggcctatggaggtgttcatgtgtagcgtcctcaagcgacaaggctatggagagggatttcggtggttgagtcagtatattgactag

SEQ ID NO: 54384 - DNA, 354 bp, Artificial Sequence
  derived and/or modified sequence
atgggtctctcgttttggtggaccgtccagattattttggccagctggaaccctaagctatccctgatgatctattgctcatccctgctaaccctggcacccaacgcattaatgacggatgagaccatttctaatgtgccaatactgattttagggaacaagatagatcgtacagacgctataagcgaagagaagttgcgcgaaatcttcggtctgtatggccagaccacaggcaagggcaacgttacactgaaggagctcaatgctcgccctatggaagtgtttatgtgctcggtccttaagcgccaaggatacggcgagggatttaggtggctctcccagtatatcgattag

SEQ ID NO: 54385 - DNA, 597 bp, Artificial Sequence
  derived and/or modified sequence
atgagtttcattttcgagtggatatacaatggcttttcctcagtgttacaattcctgggtctgtataaaaaatctgggaagctcgtgtttctgggtctggataatgccggaaagacaacgctgctgcatatgcttaaggacgacagattaggacaacatgtaccaacactgcaccctacatctgaagaattaaccattgcaggcatgacatttacgacctttgacttaggcggtcacgagcaggcacgacgcgtgtggaaaaactacttacccgcgattaacggcattgtgtttttggtggactgtgcagaccatagtcgcctggtggaatccaaggtagaactgaacgccctgatgacagacgaaacaattagcaacgtgccaatcctaatcctcggcaataagatagataggacagatgctatctccgaggaaaaactccgagagatctttggcctgtacgggcaaaccaccggaaagggaaatgtcacccttaaagagctcaacgccagacccatggaggtttttatgtgctctgtcctgaaacgtcaagggtacggggagggcttccggtggctgtctcagtatatcgattag

SEQ ID NO: 54386 - DNA, 348 bp, Artificial Sequence
  derived and/or modified sequence
tgatcattttggtggactgtgcagatcatcctggcctcctggaaccccaagctgtcactgatgatatattgttcctctcttcttaccctggctcccaacgctcttatgacagatgaaaccatctccaacgtccctatcctaattctgggaaataaaattgataggacggacgccattagcgaagagaaactgagggaaatcttcggattgtacggccagacaacaggaaagggcaacgtgactctaaaggagttaaatgctcggcccatggaagtgttcatgtgctctgtcctaaagagacagggatacggcgaggggttccgctggctgagccagtacatcgattag

SEQ ID NO: 54387 - DNA, 468 bp, Artificial Sequence
  derived and/or modified sequence
atgctgaaggatgatcggctcgggcaacatgttccaaccctgcaccccaccagcgaagaactgaccatagcaggtatgactttcacgacctttgacctgggtggccacgagcaggcacggcgagtgtggaaaaattaccttccagcaattaatggcattgtgtttctggtggactgtgccgaccactcacgccttgtggagagcaaggtggagttgaacgccctgatgaccgatgagactatcagcaacgtccctattttgattctaggcaataaaattgacagaaccgacgccatctcagaagagaaactaagggagatcttcggactatacggccagacaacaggcaagggaaacgttaccctgaaggaactaaacgctaggcctatggaggtgtttatgtgttccgtgctgaaacgtcagggctacggcgaaggatttagatggctttcgcagtacattgactag

SEQ ID NO: 54388 - DNA, 366 bp, Artificial Sequence
  derived and/or modified sequence
atgtccttcatctttgagtggatctacaacggcttcagctctgtgctgcagttcctgggcctgtacaagaagagcggcaagctggtgttcctgggcctggacaatgctgggaagaccaccctgctgcacatgctgaaggatgaccggctgggccagcacgtgcccaccctgcaccccaccagcgaggagctgaccatcgccggcatgaccttcaccacctttgacctgggcggccacgagcaggccaggagagtgtggaagaactacctgcctgccatcaatggcatcgtgttcctggtggactgtgccgaccacagccggctggtggagagcaaggtggagctgaatgtgtgctttgtgctgtag

SEQ ID NO: 54389 - DNA, 597 bp, Artificial Sequence
  derived and/or modified sequence
atgtccttcatctttgagtggatctacaacggcttcagctctgtgctgcagttcctgggcctgtacaagaagagcggcaagctggtgttcctgggcctggacaatgctgggaagaccaccctgctgcacatgctgaaggatgaccggctgggccagcacgtgcccaccctgcaccccaccagcgaggagctgaccatcgccggcatgaccttcaccacctttgacctgggcggccacgagcaggccaggagagtgtggaagaactacctgcctgccatcaatggcatcgtgttcctggtggactgtgccgaccacagccggctggtggagagcaaggtggagctgaatgccctgatgacagatgagaccatcagcaatgtgcccatcctgatcctgggcaacaagattgacagaacagatgccatcagcgaggagaagctgcgggagatcttcggcctgtatggccagaccactggaaaaggaaatgtgaccctgaaggagctgaatgcccggcccatggaggtgttcatgtgcagcgtgctgaagaggcagggctacggggagggcttccgctggctgagccagtacattgattag

SEQ ID NO: 54390 - DNA, 354 bp, Artificial Sequence
  derived and/or modified sequence
atgggcctgtccttctggtggacagtgcagatcatcctggcctcctggaaccccaagctgagcctgatgatctactgcagcagcctgctgaccctggccccaaatgccctgatgacagatgagaccatcagcaatgtgcccatcctgatcctgggcaacaagattgacagaacagatgccatcagcgaggagaagctgcgggagatcttcggcctgtatggccagaccactggaaaaggaaatgtgaccctgaaggagctgaatgcccggcccatggaggtgttcatgtgcagcgtgctgaagaggcagggctatggagagggcttccgctggctgagccagtacatcgactag

SEQ ID NO: 54391 - DNA, 348 bp, Artificial Sequence
  derived and/or modified sequence
tgaagcttctggtggacagtgcagatcatcctggcctcctggaaccccaagctgagcctgatgatctactgcagcagcctgctgaccctggccccaaatgccctgatgacagatgagaccatcagcaatgtgcccatcctgatcctgggcaacaagattgacagaacagatgccatcagcgaggagaagctgcgggagatcttcggcctgtatggccagaccactggaaaaggaaatgtgaccctgaaggagctgaatgcccggcccatggaggtgttcatgtgcagcgtgctgaagaggcagggctatggagagggcttccgctggctgagccagtacatcgactag

SEQ ID NO: 54392 - DNA, 468 bp, Artificial Sequence
  derived and/or modified sequence
atgctgaaggatgaccggctgggccagcacgtgcccaccctgcaccccaccagcgaggagctgaccatcgccggcatgaccttcaccacctttgacctgggcggccacgagcaggcccggcgggtgtggaagaactacctgcctgccatcaatggaattgtgttcctggtggactgtgccgaccacagccggctggtggagagcaaggtggagctgaatgccctgatgacagatgagaccatcagcaatgtgcccatcctgatcctgggcaacaagattgacagaacagatgccatcagcgaggagaagctgcgggagatcttcggcctgtatggccagaccactggaaaaggaaatgtgaccctgaaggagctgaatgcccggcccatggaggtgttcatgtgcagcgtgctgaagaggcagggctatggagagggcttccgctggctgagccagtacatcgactag

SEQ ID NO: 54393 - DNA, 366 bp, Artificial Sequence
  derived and/or modified sequence
atgagcttcatcttcgagtggatctacaacggcttcagcagcgtgttgcagttcctgggtctttacaagaaatctggcaaactcgtgttcctgggccttgacaacgccggtaaaaccacactgctgcacatgctaaaagatgatcgactcggtcaacatgtcccaacgctgcaccctacgagcgaggaactgaccattgcaggcatgacctttacaactttcgatctgggagggcacgaacaggcccgccgtgtgtggaagaattacctacctgccatcaatgggatcgtcttcctggtcgactgcgccgaccactcaagacttgtcgaaagtaaggtggaactgaatgtgtgttttgtgctctag

SEQ ID NO: 54394 - DNA, 597 bp, Artificial Sequence
  derived and/or modified sequence
atgagcttcatcttcgagtggatctacaacggcttcagcagcgtgctgcagtttctggggctatacaaaaagtcaggaaagctcgtgtttctgggcctcgacaatgccggtaagacgactctactgcacatgctgaaggacgaccgactgggccagcacgtcccgacactgcatccaacatctgaagagttaacaatagcagggatgaccttcacaacctttgacctaggcggccatgagcaggctcggcgggtgtggaaaaactatctccctgctatcaatggtatcgtttttctggtcgattgcgcggatcattcaagacttgtcgagagtaaagtggagctgaatgccctaatgaccgacgagacaattagtaacgtccctatcttgattcttggcaataaaatcgacaggaccgacgccattagcgaggagaagttgagggaaatattcggtctttacggacaaactaccggaaaggggaatgtgacattgaaggagcttaacgcacgacctatggaggtctttatgtgtagcgtgttgaaacggcaaggatatggggaaggattccgatggctgtcccagtatatcgattag

SEQ ID NO: 54395 - DNA, 597 bp, Artificial Sequence
  derived and/or modified sequence
atgagcttcatcttcgagtggatctacaacggcttcagcagcgtgctgcaatttctggggctgtacaaaaagtccggtaagttggtgttcctgggcctggataacgccggaaagaccaccctgctccatatgctgaaggatgacaggctgggacagcacgtgccaaccctgcatcctacaagtgaggagctaacgattgcaggaatgacgttcaccaccttcgacctgggaggccacgaacaagctcgtcgagtgtggaaaaactatctgcccgcaattaacggtatagtatttctagttgattgcgcagatcacagcaggctcgtggagagcaaggtagagctgaacgccctcatgaccgatgaaaccatctccaacgttcctattcttatcctggggaataaaatcgacaggactgacgctataagtgaggagaaactgcgcgagatcttcggtctttatggtcagacaacaggtaagggcaatgtgaccttgaaagaactcaacgcgaggcccatggaggtatttatgtgctctgtactcaaacgacagggctacggagagggcttccgatggctgagccagtacatagactag

SEQ ID NO: 54396 - DNA, 597 bp, Artificial Sequence
  derived and/or modified sequence
atgagcttcatcttcgagtggatctacaacggcttcagcagcgtgctccaattccttggtttatataagaaaagcggcaaactagtatttctggggttagacaacgccggcaagaccacacttctgcatatgctaaaggacgaccggctgggccagcacgtgccaacactccatccaacttcagaagagctaactattgctgggatgacgtttacaacgttcgacttaggaggtcacgaacaggcaagacgagtgtggaaaaactacttgccggccatcaacggcattgtatttctggtagattgtgctgatcactctagactggtcgagagcaaggtagagttaaacgcattgatgacggatgagaccataagtaacgtgcctattctcatcctgggcaacaaaatagatcggaccgatgcgatcagtgaggaaaaactgagagagatattcggactgtacggacaaacaacgggtaaaggtaacgtgaccctcaaggaattaaacgccaggccaatggaagtcttcatgtgttccgtcttgaaacgtcagggttatggggagggctttcggtggcttagtcagtacatcgactag

SEQ ID NO: 54397 - DNA, 597 bp, Artificial Sequence
  derived and/or modified sequence
atgagcttcatcttcgagtggatctacaacggcttcagcagcgtgttgcagtttctcggactttacaaaaaaagcgggaagctggttttcctcggcctggacaatgcagggaagacaacgctgttgcacatgctgaaggacgatcgcttgggacagcatgtcccaacgctccatccgacgtcagaggaactgactattgcgggcatgacattcaccacatttgatctgggtggccatgaacaggccagacgcgtgtggaaaaactacctaccagccataaacggcatagtattcctggttgactgtgctgatcactcgaggctggtagagtcaaaagtggagctgaatgcactcatgaccgatgagacaatctcaaatgtgccaatcctgatactgggcaacaagattgaccgaaccgacgccatctccgaggaaaaacttcgggaaattttcggcctctatggtcagaccaccggcaaagggaatgtgactctaaaagagctaaatgccagaccgatggaggtatttatgtgcagcgtgttgaagcggcagggttacggagaagggttccgatggctctcacagtatatcgactag

SEQ ID NO: 54398 - DNA, 354 bp, Artificial Sequence
  derived and/or modified sequence
atgggcctgagcttctggtggaccgtgcagatcatcctggccagctggaatccgaagctgtcacttatgatctattgttcttcgctcttgactcttgccccaaatgctcttatgacagacgaaacaatcagcaacgtgccaatactgatacttggaaacaaaatagatagaacagacgccatctccgaagagaaactccgagagatctttggcctgtacggacagaccacgggaaagggtaacgtgacgcttaaggagcttaatgcccgtcccatggaggtgttcatgtgttctgtcctgaaacgccagggctacggtgagggattcaggtggctgagccaatatatcgattag

SEQ ID NO: 54399 - DNA, 597 bp, Artificial Sequence
  derived and/or modified sequence
atgagcttcatcttcgagtggatctacaacggcttcagcagcgtgctacagttcctgggtctgtataagaaatcaggtaagctagttttcctcggcctggataacgccggtaagaccaccctgcttcacatgttgaaagacgacagactcggccagcacgtgcccactctccaccccacctccgaggaattaacaatcgccggaatgaccttcacaaccttcgatttgggcgggcacgagcaggctagacgtgtgtggaagaactacctgccagctatcaacgggatagtgtttttggtggattgcgctgaccacagccgtctcgtcgaaagcaaagtcgagcttaatgccctgatgacagacgagaccataagcaacgtgccaatcttgatcctgggaaataaaatcgatcggactgatgctatctcagaggagaagcttagagagatcttcggactctacggccagacgacaggaaagggcaacgtcaccctaaaggaattgaatgcacggcccatggaggtctttatgtgttctgtgctgaaaaggcaaggatatggtgaaggattcaggtggctttcacagtacatcgattag

SEQ ID NO: 54400 - DNA, 348 bp, Artificial Sequence
  derived and/or modified sequence
tgaagcttctggtggaccgtgcagatcatcctggccagctggaaccctaagctaagccttatgatctactgctcctccctactaacgctcgcacctaatgcccttatgactgatgagaccatttctaatgttcccatcctgatactcggcaacaaaatagatagaacagatgcgattagtgaagaaaaactccgggagattttcggcctgtacggccagacaaccgggaaggggaatgtaacccttaaagagttgaatgccaggcctatggaggtgtttatgtgcagcgtcctgaagaggcagggttacggtgaaggattccgatggctgtctcagtacattgactag

SEQ ID NO: 54401 - DNA, 468 bp, Artificial Sequence
  derived and/or modified sequence
atgctgaaggacgaccggctgggccagcacgtgcccaccctgcacccaacatctgaagaactgactatagccggtatgacctttactacatttgacctcggagggcacgagcaagcaagacgggtatggaaaaactacctccccgcaatcaatggtatagtgttcctcgtagattgcgccgatcactctagattggttgaaagtaaagtggaacttaacgccttaatgacagacgaaacgatatccaacgtgcccatcttaattctcggtaacaagatcgatcgtacagatgctatctccgaagaaaaactaagggagatctttggcctctacggacagactacaggcaagggcaatgtgacacttaaagagctcaacgcgagaccaatggaagtgtttatgtgctcggttctcaagaggcaggggtacggcgaagggtttcgctggctatctcagtacatcgattag

SEQ ID NO: 54402 - DNA, 366 bp, Artificial Sequence
  derived and/or modified sequence
atgtcctttatctttgaatggatttataacggcttctctagcgtgctccagttcctggggctgtacaaaaaaagcggaaaactggtctttctgggactggacaacgcaggcaaaactaccctgctgcacatgctgaaggatgatcggctgggccaacatgtgcctacccttcacccaacctcagaagaactgaccattgcaggtatgacattcacgactttcgatctcggtggccacgaacaagcaaggagagtttggaaaaattacctgcccgcaatcaacgggatcgtgtttctagtcgactgtgctgatcacagcagactagtggagagcaaggtcgaacttaacgtctgctttgtcctttag

SEQ ID NO: 54403 - DNA, 597 bp, Artificial Sequence
  derived and/or modified sequence
atgtcattcattttcgagtggatctataacggttttagctccgtattgcaattcctgggcttgtacaagaaatcgggcaagctggtgttcctgggactggataatgctgggaagaccacgttgcttcacatgcttaaggatgaccgtcttggacagcatgtacccacgctccacccgacctccgaggagcttaccatcgcgggtatgactttcactaccttcgatctcggcggacacgaacaggctcgcagggtctggaaaaattatctccctgcaattaacggaattgtattccttgtagactgtgccgaccacagtagactggttgagagtaaagtggaactcaacgccctcatgactgacgaaacaatctcaaacgtgccaatccttatactggggaataagatcgataggacagacgcaatttcagaagaaaaacttagggaaatcttcggactgtacggacagacaaccggcaaaggaaacgttacactgaaggagctgaatgcacgcccaatggaggtgtttatgtgcagcgtcctcaagcgtcagggatacggcgaagggtttaggtggttgagccagtatattgactag

SEQ ID NO: 54404 - DNA, 597 bp, Artificial Sequence
  derived and/or modified sequence
atgtccttcatttttgaatggatctataatggtttttctagcgttcttcagttcctgggcctgtacaagaaaagcggcaagctggtgtttctcggtctggacaatgcagggaaaactaccctgctgcatatgctaaaggacgaccgtctaggccagcacgtgcctaccctacaccccacaagtgaagagctcacaatcgctgggatgaccttcactacctttgatctcggtggtcatgaacaggcgaggagggtctggaagaattatctgccggcaatcaacgggatcgtcttccttgtggattgcgccgatcatagtcgcttggtggagtcaaaagtggagctcaacgccctcatgaccgacgagactatttctaatgtacccatcctgatattgggcaataagatcgacaggaccgacgccatttctgaagagaaactgcgcgaaatctttgggctttacgggcagacaaccgggaagggcaatgtcactttgaaagaactgaatgcccgtcctatggaagttttcatgtgcagtgttctgaagcggcaggggtatggcgaaggcttcaggtggctgagccaatatattgactag

SEQ ID NO: 54405 - DNA, 597 bp, Artificial Sequence
  derived and/or modified sequence
atgagcttcatcttcgagtggatttataacggcttctcatccgttctgcagttcctcggcctgtataagaagtctggaaaattagtttttctggggcttgataacgctggtaaaacgacactgctccacatgctgaaggatgaccgattgggccagcacgtgcctactcttcacccaacaagtgaggaacttactatcgcaggaatgaccttcacgacgtttgacctgggcggtcacgaacaggcgaggagggtatggaaaaattacctccctgctattaacgggatagtgtttctggtagattgtgccgatcacagtcgcctcgtggagtccaaggttgagctgaatgctttgatgacggatgagaccattagcaacgttccgattctgatcttgggaaacaagattgataggactgacgctatctcagaggaaaagctcagagaaatttttggcctgtatggccagacaacaggaaagggaaatgtaacccttaaggagctgaacgcccgacctatggaggtcttcatgtgctccgtgctgaagcgccagggctacggcgagggcttccgatggctctcccagtacatcgactag

SEQ ID NO: 54406 - DNA, 597 bp, Artificial Sequence
  derived and/or modified sequence
atgagttttatcttcgaatggatatacaatgggttcagttctgtattgcagtttttgggcctgtacaagaagagtggcaagctcgtgttcttaggcctcgacaacgctgggaagactacactccttcacatgctcaaagatgatcgcttgggacagcatgtgccaacactgcaccccacctcagaggaactgactatcgccggaatgacgtttactacatttgacttgggtgggcacgagcaggctcgtcgcgtttggaaaaattacttgcctgccatcaatggtattgtgtttctggtggactgtgccgatcactcccgactggttgagtcaaaagtggagttaaacgccctaatgactgatgagactatctccaatgttccaatcctgatcctcggaaacaagattgaccggacggacgctatctccgaggaaaaactgcgcgagattttcgggctatacggccaaactaccggaaagggcaacgtgaccctaaaggagctaaacgcccgtcctatggaggtttttatgtgttcagttctcaagagacaaggctacggggaaggctttaggtggctgtcacaatatatcgactag

SEQ ID NO: 54407 - DNA, 354 bp, Artificial Sequence
  derived and/or modified sequence
atgggcctttctttctggtggaccgtacagatcattctcgcctcatggaaccccaaactcagtttgatgatctactgcagcagcctgctgacactcgcgccaaacgccctgatgacagacgaaaccatatcaaatgtgccaattctgatccttggcaacaaaattgacagaactgatgcaatttctgaggagaaactgcgcgagattttcggcctatatggccagacaacgggaaaaggaaatgttaccctcaaggaactcaatgccagaccaatggaagtattcatgtgctccgtgctgaagaggcaaggatatggtgaagggtttaggtggctgagccaatacatagattag

SEQ ID NO: 54408 - DNA, 597 bp, Artificial Sequence
  derived and/or modified sequence
atgagttttatatttgagtggatttataacggattcagctcggttcttcagtttcttggcctttataagaagtctgggaagctggtatttctcggactcgacaacgccggtaagaccaccctcctgcatatgctaaaggacgaccggctaggacagcatgtgcccactctgcatcccacctcagaagagctgaccattgctggcatgaccttcaccaccttcgatctgggtggccacgagcaggcgagacgtgtttggaagaattacctaccagccatcaatgggatcgtgtttcttgtcgattgcgctgatcactcacgactcgttgagtcaaaagttgaactgaatgcactcatgaccgacgaaaccattagcaacgtccccattctcatactggggaacaagatagatcgtaccgacgcgatcagtgaggagaaactgcgtgaaatcttcggcctgtatggtcaaactacaggaaaggggaacgtgacactgaaagaactgaatgcccgacccatggaagtcttcatgtgcagcgttctgaagcgtcaaggttacggggaaggctttagatggttatcacagtacattgattag

SEQ ID NO: 54409 - DNA, 348 bp, Artificial Sequence
  derived and/or modified sequence
tgatccttctggtggactgttcagataattctcgctagctggaatcctaagctgtctcttatgatctactgctctagccttttaactttggcacctaacgcacttatgaccgatgagaccatcagcaatgtgcctattctgatcttgggtaacaagatcgaccggaccgacgcaataagcgaagaaaagttacgtgagatttttgggttgtacggtcagacaacagggaagggcaatgtgacactgaaagagcttaacgcccgaccaatggaagtcttcatgtgctctgtattaaaacgccaaggctacggagaagggtttcggtggctatcccagtatattgattag

SEQ ID NO: 54410 - DNA, 468 bp, Artificial Sequence
  derived and/or modified sequence
atgctaaaggatgacaggctggggcagcacgtccccaccctgcaccccacttcagaagaattgactattgccggaatgacgtttacaacgtttgatctgggcggacatgagcaagccagacgagtgtggaagaactaccttcctgccatcaacggtattgtttttttggtggattgtgccgatcacagtagattagtggaaagcaaggtggagctgaacgcacttatgacggatgaaaccatatcaaacgtgcctatcctaattttagggaacaagattgatcgcacagacgccattagcgaggagaagcttagggagatattcggactctacggccagaccacagggaagggcaatgtcaccctgaaggagcttaacgctcgccctatggaagtgtttatgtgcagtgtcctgaaaagacagggctacggggaaggattccgctggctttcccagtacatcgactag

SEQ ID NO: 54411 - DNA, 437 bp, Artificial Sequence
  derived and/or modified sequence
atgtctttcatctttgagtggatctacaatggcttcagcagtgtgctccagttcctaggactgtacaagaaatctggaaaacttgtattcttaggtttggataatgcaggcaaaaccactcttcttcacatgctcaaagatgacagattgggccaacatgttccaacactacatccgacatcagaagagctaacaattgctggaatgacctttacaacttttgatcttggtgggcacgagcaagcacgtcgcgtttggaaaaattatctcccagcaattaatgggattgtctttctggtggactgtgcagatcattctcgcctcgtggaatccaaagttgagcttaatgtatgttttgtcctttaatgtgtattttaatgtatattttgttcttttttggcctctatttttttttaaggaatatagctcagtagtgc

SEQ ID NO: 54412 - DNA, 3227 bp, Artificial Sequence
  derived and/or modified sequence
cctgttactttcacttggagaatagggaggcttggggtgggggcaggactgtggaggaagtcaagtttgctgtcttctatggttgtggtttgtggcacaacaaaacaattatactagtaataccaaagatcactgatcatagatcatgatgacagatataagaataatgaaaaagtttgaaatattgtgtgagaattaccaaaatgtaacatagagacatgaagggagcacatgctgttagaagatggtactgatacacttactcaactcagggctgcttccaaccttcaatttgtaaaaaaaccagaaaacctcaggatccacaaagtatcatcaaatgaggtagtaagcattaataatgtctttcatctttgagtggatctacaatggcttcagcagtgtgctccagttcctaggactgtacaagaaatctggaaaacttgtattcttaggtttggataatgcaggcaaaaccactcttcttcacatgctcaaagatgacagattgggccaacatgttccaacactacatccgacatcagaagagctaacaattgctggaatgacctttacaacttttgatcttggtgggcacgagcaagcacgtcgcgtttggaaaaattatctcccagcaattaatgggattgtctttctggtggactgtgcagatcattctcgcctcgtggaatccaaagttgagcttaatgctttaatgactgatgaaacaatatccaatgtgccaatccttatcttgggtaacaaaattgacagaacagatgcaatcagtgaagaaaaactccgtgagatatttgggctttatggacagaccacaggaaaggggaatgtgaccctgaaggagctgaatgctcgccccatggaagtgttcatgtgcagtgtgctcaagaggcaaggttacggcgagggtttccgctggctctcccagtatattgactgatgtttggacggtgaaaataaaagagttttacttctctggactgatcctattcacagcttcctcatgaacttttctaatagaacaaggaaagctctccaaccatgtctggcgttgagaagccaagagtctctgtcaactctctcattgcccagtggtgacatgtgctcttctccacactgttgggaggtaatgctgccccacgtgctggtgcaggtcagtatcctgggacttggaagctggcaggatttgccgggtaaagctgtatgccatcatggggcacctgaaaagaaaaacacgtctcaccactgtggttgattcaaaagaaagtgattctattttttaaagaaagcgttgttaatgtaattggtatccctcctaactttttgagttcacaatttacttggtccagagttttctattcttttttttttttaaactaatgaatgacatttagatacttcataaaattatgaacagatatggaggccagagctcatttgggtaaacttactcctgctgagttagcaggttggtgagagaagctcccctgagctcacctgtctctctgactgccttggagtaggtggcataaccttgtgcacagagaactagaaaaggggcagaaccccggccttgcagttgtggcaggtttccactgtggtaagctaggttcattcctcatcaaggaatgtgtagcagattgttcactgtggaggagttaattatagaatgggttattgttgttattcttactcatgaagttacagattttagccagtctttgcttttatacttttgtgaaatttaatttctctctatagcaccttcctttttcgttttcagttatcaaaagtgactttgacctcataaaagagttgagaacatctctcgtgtcacatactgcaggtgcatcagttacttttgcacagattctagggggacatttttctgaataggaagacaggacaaagttaacagcttaagggctcttaattctgtgagttgaggacttaaaagtattgtagcatttgtttggatccatgaaaaatgtattcagtgggctttaaaatttccatttgcagaatttggtctctcaggctgtttgggagctcttttttttacattttttctcctttgacacctattttattggtgtttaaagtaaaggttaacatctgtagcttttccaggtttttttttttttttttttttttttggtatgaaattgtctttctccattgcagaaataagctagggaaacactaacccaaaaactttctgtagagctgttcctttggaggcagcatcacttattggcagtaaagactcagtataaaagcaccggcatccctacttgggtgatggggattaattttatagcattccattttcctagtgccacatgtgaaattggattttgatgatcttaatctatattctacccttataataaaagatcaaaagatatatctcctatgaacagattggagataggagatgaaaagttgggaggatgtctttattctaatgtgagggtagggaaaatgtggataacattactggggtgagggaggcattgttctttagttggagttctcattcttattctccagtactgacttgtggggaaagcatactttttcactgccaggtactgaatgcagaggctcagtgaagtatatatgtgggaagtgcatgcatttcgtttattagcaaacatagctggattaagacaaagttgttggtttggaaaggggttaaagccttaagtgaacaaatctagctaacagtgaatgaactaggtaatataacttgcatatttttaatttcctttggttaaaggtcccccatacttctctgttcggagacatgagaagtatgattacttcagtgttagttttcttaattttttttttcccctatttgtcccttgtcactttgttgcaagctagaaatctgtgggttatacatagggcagctctttgtgaaagtggtttattccactggagaaaggggattgaaaatcagttagaaccaatgtatttcttgccccacggaacactattcctataagatagctgaaagaagctgctgtgaggagctcagctccaaacacaggatcagcaccttgtataggaattcccatgaattatgacttctcattctgttttatcagagtgcatatatgtcctacttcaggaaaagtaaaacagtcatttacgaaagaaagtcaatctgtatcctaagcattttaataaaaagttaaaacaaa

SEQ ID NO: 54413 - DNA, 3185 bp, Artificial Sequence
  derived and/or modified sequence
acatccggcgagtagctggcggtcccgggtgctgctggttagtgtgctctgagggagggtccgagccagccgctgttttgccggaggagcccctcaggccgttcaagcgtttctcctgcctcagccttctgcatagctgggattacaagcaagcgctgccgcgcccagctgttcattttattcttcatctggcattctttgaatagatgcaggtctctctatgttacccaggctggtcttgaactcctgaggtcagggaggaatcccccacctcagccttgcaaaatgctgggattacaggtagtaagcattaataatgtctttcatctttgagtggatctacaatggcttcagcagtgtgctccagttcctaggactgtacaagaaatctggaaaacttgtattcttaggtttggataatgcaggcaaaaccactcttcttcacatgctcaaagatgacagattgggccaacatgttccaacactacatccgacatcagaagagctaacaattgctggaatgacctttacaacttttgatcttggtgggcacgagcaagcacgtcgcgtttggaaaaattatctcccagcaattaatgggattgtctttctggtggactgtgcagatcattctcgcctcgtggaatccaaagttgagcttaatgctttaatgactgatgaaacaatatccaatgtgccaatccttatcttgggtaacaaaattgacagaacagatgcaatcagtgaagaaaaactccgtgagatatttgggctttatggacagaccacaggaaaggggaatgtgaccctgaaggagctgaatgctcgccccatggaagtgttcatgtgcagtgtgctcaagaggcaaggttacggcgagggtttccgctggctctcccagtatattgactgatgtttggacggtgaaaataaaagagttttacttctctggactgatcctattcacagcttcctcatgaacttttctaatagaacaaggaaagctctccaaccatgtctggcgttgagaagccaagagtctctgtcaactctctcattgcccagtggtgacatgtgctcttctccacactgttgggaggtaatgctgccccacgtgctggtgcaggtcagtatcctgggacttggaagctggcaggatttgccgggtaaagctgtatgccatcatggggcacctgaaaagaaaaacacgtctcaccactgtggttgattcaaaagaaagtgattctattttttaaagaaagcgttgttaatgtaattggtatccctcctaactttttgagttcacaatttacttggtccagagttttctattcttttttttttttaaactaatgaatgacatttagatacttcataaaattatgaacagatatggaggccagagctcatttgggtaaacttactcctgctgagttagcaggttggtgagagaagctcccctgagctcacctgtctctctgactgccttggagtaggtggcataaccttgtgcacagagaactagaaaaggggcagaaccccggccttgcagttgtggcaggtttccactgtggtaagctaggttcattcctcatcaaggaatgtgtagcagattgttcactgtggaggagttaattatagaatgggttattgttgttattcttactcatgaagttacagattttagccagtctttgcttttatacttttgtgaaatttaatttctctctatagcaccttcctttttcgttttcagttatcaaaagtgactttgacctcataaaagagttgagaacatctctcgtgtcacatactgcaggtgcatcagttacttttgcacagattctagggggacatttttctgaataggaagacaggacaaagttaacagcttaagggctcttaattctgtgagttgaggacttaaaagtattgtagcatttgtttggatccatgaaaaatgtattcagtgggctttaaaatttccatttgcagaatttggtctctcaggctgtttgggagctcttttttttacattttttctcctttgacacctattttattggtgtttaaagtaaaggttaacatctgtagcttttccaggtttttttttttttttttttttttttggtatgaaattgtctttctccattgcagaaataagctagggaaacactaacccaaaaactttctgtagagctgttcctttggaggcagcatcacttattggcagtaaagactcagtataaaagcaccggcatccctacttgggtgatggggattaattttatagcattccattttcctagtgccacatgtgaaattggattttgatgatcttaatctatattctacccttataataaaagatcaaaagatatatctcctatgaacagattggagataggagatgaaaagttgggaggatgtctttattctaatgtgagggtagggaaaatgtggataacattactggggtgagggaggcattgttctttagttggagttctcattcttattctccagtactgacttgtggggaaagcatactttttcactgccaggtactgaatgcagaggctcagtgaagtatatatgtgggaagtgcatgcatttcgtttattagcaaacatagctggattaagacaaagttgttggtttggaaaggggttaaagccttaagtgaacaaatctagctaacagtgaatgaactaggtaatataacttgcatatttttaatttcctttggttaaaggtcccccatacttctctgttcggagacatgagaagtatgattacttcagtgttagttttcttaattttttttttcccctatttgtcccttgtcactttgttgcaagctagaaatctgtgggttatacatagggcagctctttgtgaaagtggtttattccactggagaaaggggattgaaaatcagttagaaccaatgtatttcttgccccacggaacactattcctataagatagctgaaagaagctgctgtgaggagctcagctccaaacacaggatcagcaccttgtataggaattcccatgaattatgacttctcattctgttttatcagagtgcatatatgtcctacttcaggaaaagtaaaacagtcatttacgaaagaaagtcaatctgtatcctaagcattttaataaaaagttaaaacaaa

SEQ ID NO: 54414 - DNA, 2996 bp, Artificial Sequence
  derived and/or modified sequence
gggtgtgacgtacatccggcgagtagctggcggtcccgggtgctgctggttagtgtgctctgagggagggtccgagccagccgctgttttgccggaggagcccctcaggccgtagtaagcattaataatgtctttcatctttgagtggatctacaatggcttcagcagtgtgctccagttcctaggactgtacaagaaatctggaaaacttgtattcttaggtttggataatgcaggcaaaaccactcttcttcacatgctcaaagatgacagattgggccaacatgttccaacactacatccgacatcagaagagctaacaattgctggaatgacctttacaacttttgatcttggtgggcacgagcaagcacgtcgcgtttggaaaaattatctcccagcaattaatgggattgtctttctggtggactgtgcagatcattctcgcctcgtggaatccaaagttgagcttaatgctttaatgactgatgaaacaatatccaatgtgccaatccttatcttgggtaacaaaattgacagaacagatgcaatcagtgaagaaaaactccgtgagatatttgggctttatggacagaccacaggaaaggggaatgtgaccctgaaggagctgaatgctcgccccatggaagtgttcatgtgcagtgtgctcaagaggcaaggttacggcgagggtttccgctggctctcccagtatattgactgatgtttggacggtgaaaataaaagagttttacttctctggactgatcctattcacagcttcctcatgaacttttctaatagaacaaggaaagctctccaaccatgtctggcgttgagaagccaagagtctctgtcaactctctcattgcccagtggtgacatgtgctcttctccacactgttgggaggtaatgctgccccacgtgctggtgcaggtcagtatcctgggacttggaagctggcaggatttgccgggtaaagctgtatgccatcatggggcacctgaaaagaaaaacacgtctcaccactgtggttgattcaaaagaaagtgattctattttttaaagaaagcgttgttaatgtaattggtatccctcctaactttttgagttcacaatttacttggtccagagttttctattcttttttttttttaaactaatgaatgacatttagatacttcataaaattatgaacagatatggaggccagagctcatttgggtaaacttactcctgctgagttagcaggttggtgagagaagctcccctgagctcacctgtctctctgactgccttggagtaggtggcataaccttgtgcacagagaactagaaaaggggcagaaccccggccttgcagttgtggcaggtttccactgtggtaagctaggttcattcctcatcaaggaatgtgtagcagattgttcactgtggaggagttaattatagaatgggttattgttgttattcttactcatgaagttacagattttagccagtctttgcttttatacttttgtgaaatttaatttctctctatagcaccttcctttttcgttttcagttatcaaaagtgactttgacctcataaaagagttgagaacatctctcgtgtcacatactgcaggtgcatcagttacttttgcacagattctagggggacatttttctgaataggaagacaggacaaagttaacagcttaagggctcttaattctgtgagttgaggacttaaaagtattgtagcatttgtttggatccatgaaaaatgtattcagtgggctttaaaatttccatttgcagaatttggtctctcaggctgtttgggagctcttttttttacattttttctcctttgacacctattttattggtgtttaaagtaaaggttaacatctgtagcttttccaggtttttttttttttttttttttttttggtatgaaattgtctttctccattgcagaaataagctagggaaacactaacccaaaaactttctgtagagctgttcctttggaggcagcatcacttattggcagtaaagactcagtataaaagcaccggcatccctacttgggtgatggggattaattttatagcattccattttcctagtgccacatgtgaaattggattttgatgatcttaatctatattctacccttataataaaagatcaaaagatatatctcctatgaacagattggagataggagatgaaaagttgggaggatgtctttattctaatgtgagggtagggaaaatgtggataacattactggggtgagggaggcattgttctttagttggagttctcattcttattctccagtactgacttgtggggaaagcatactttttcactgccaggtactgaatgcagaggctcagtgaagtatatatgtgggaagtgcatgcatttcgtttattagcaaacatagctggattaagacaaagttgttggtttggaaaggggttaaagccttaagtgaacaaatctagctaacagtgaatgaactaggtaatataacttgcatatttttaatttcctttggttaaaggtcccccatacttctctgttcggagacatgagaagtatgattacttcagtgttagttttcttaattttttttttcccctatttgtcccttgtcactttgttgcaagctagaaatctgtgggttatacatagggcagctctttgtgaaagtggtttattccactggagaaaggggattgaaaatcagttagaaccaatgtatttcttgccccacggaacactattcctataagatagctgaaagaagctgctgtgaggagctcagctccaaacacaggatcagcaccttgtataggaattcccatgaattatgacttctcattctgttttatcagagtgcatatatgtcctacttcaggaaaagtaaaacagtcatttacgaaagaaagtcaatctgtatcctaagcattttaataaaaagttaaaacaaa

SEQ ID NO: 54415 - DNA, 3066 bp, Artificial Sequence
  derived and/or modified sequence
gggtgtgacgtacatccggcgagtagctggcggtcccgggtgctgctggttagtgtgctctgagggagggtccgagccagccgctgttttgccggaggagcccctcaggccggctgcttccaaccttcaatttgtaaaaaaaccagaaaacctcaggatccacaaagtatcatcaaatgaggtagtaagcattaataatgtctttcatctttgagtggatctacaatggcttcagcagtgtgctccagttcctaggactgtacaagaaatctggaaaacttgtattcttaggtttggataatgcaggcaaaaccactcttcttcacatgctcaaagatgacagattgggccaacatgttccaacactacatccgacatcagaagagctaacaattgctggaatgacctttacaacttttgatcttggtgggcacgagcaagcacgtcgcgtttggaaaaattatctcccagcaattaatgggattgtctttctggtggactgtgcagatcattctcgcctcgtggaatccaaagttgagcttaatgctttaatgactgatgaaacaatatccaatgtgccaatccttatcttgggtaacaaaattgacagaacagatgcaatcagtgaagaaaaactccgtgagatatttgggctttatggacagaccacaggaaaggggaatgtgaccctgaaggagctgaatgctcgccccatggaagtgttcatgtgcagtgtgctcaagaggcaaggttacggcgagggtttccgctggctctcccagtatattgactgatgtttggacggtgaaaataaaagagttttacttctctggactgatcctattcacagcttcctcatgaacttttctaatagaacaaggaaagctctccaaccatgtctggcgttgagaagccaagagtctctgtcaactctctcattgcccagtggtgacatgtgctcttctccacactgttgggaggtaatgctgccccacgtgctggtgcaggtcagtatcctgggacttggaagctggcaggatttgccgggtaaagctgtatgccatcatggggcacctgaaaagaaaaacacgtctcaccactgtggttgattcaaaagaaagtgattctattttttaaagaaagcgttgttaatgtaattggtatccctcctaactttttgagttcacaatttacttggtccagagttttctattcttttttttttttaaactaatgaatgacatttagatacttcataaaattatgaacagatatggaggccagagctcatttgggtaaacttactcctgctgagttagcaggttggtgagagaagctcccctgagctcacctgtctctctgactgccttggagtaggtggcataaccttgtgcacagagaactagaaaaggggcagaaccccggccttgcagttgtggcaggtttccactgtggtaagctaggttcattcctcatcaaggaatgtgtagcagattgttcactgtggaggagttaattatagaatgggttattgttgttattcttactcatgaagttacagattttagccagtctttgcttttatacttttgtgaaatttaatttctctctatagcaccttcctttttcgttttcagttatcaaaagtgactttgacctcataaaagagttgagaacatctctcgtgtcacatactgcaggtgcatcagttacttttgcacagattctagggggacatttttctgaataggaagacaggacaaagttaacagcttaagggctcttaattctgtgagttgaggacttaaaagtattgtagcatttgtttggatccatgaaaaatgtattcagtgggctttaaaatttccatttgcagaatttggtctctcaggctgtttgggagctcttttttttacattttttctcctttgacacctattttattggtgtttaaagtaaaggttaacatctgtagcttttccaggtttttttttttttttttttttttttggtatgaaattgtctttctccattgcagaaataagctagggaaacactaacccaaaaactttctgtagagctgttcctttggaggcagcatcacttattggcagtaaagactcagtataaaagcaccggcatccctacttgggtgatggggattaattttatagcattccattttcctagtgccacatgtgaaattggattttgatgatcttaatctatattctacccttataataaaagatcaaaagatatatctcctatgaacagattggagataggagatgaaaagttgggaggatgtctttattctaatgtgagggtagggaaaatgtggataacattactggggtgagggaggcattgttctttagttggagttctcattcttattctccagtactgacttgtggggaaagcatactttttcactgccaggtactgaatgcagaggctcagtgaagtatatatgtgggaagtgcatgcatttcgtttattagcaaacatagctggattaagacaaagttgttggtttggaaaggggttaaagccttaagtgaacaaatctagctaacagtgaatgaactaggtaatataacttgcatatttttaatttcctttggttaaaggtcccccatacttctctgttcggagacatgagaagtatgattacttcagtgttagttttcttaattttttttttcccctatttgtcccttgtcactttgttgcaagctagaaatctgtgggttatacatagggcagctctttgtgaaagtggtttattccactggagaaaggggattgaaaatcagttagaaccaatgtatttcttgccccacggaacactattcctataagatagctgaaagaagctgctgtgaggagctcagctccaaacacaggatcagcaccttgtataggaattcccatgaattatgacttctcattctgttttatcagagtgcatatatgtcctacttcaggaaaagtaaaacagtcatttacgaaagaaagtcaatctgtatcctaagcattttaataaaaagttaaaacaaa

SEQ ID NO: 54416 - DNA, 783 bp, Artificial Sequence
  derived and/or modified sequence
ctggcggtcccgggtgctgctggttagtgtgctctgagggagggtccgagccagccgctgttttgccggaggagcccctcaggccgtagtaagcattaataatgtctttcatctttgagtggatctacaatggcttcagcagtgtgctccagttcctaggactgtacaagaaatctggaaaacttgtattcttaggtttggataatgcaggcaaaaccactcttcttcacatgctcaaagatgacagattgggccaacatgttccaacactacatccgacatcagaagagctaacaattgctggaatgacctttacaacttttgatcttggtgggcacgagcaagcacgtcgcgtttggaaaaattatctcccagcaattaatgggattgtctttctggtggactgtgcagatcattctcgcctcgtggaatccaaagttgagcttaatgatatattgcagctcacttctcacactggcccctaatgctttaatgactgatgaaacaatatccaatgtgccaatccttatcttgggtaacaaaattgacagaacagatgcaatcagtgaagaaaaactccgtgagatatttgggctttatggacagaccacaggaaaggggaatgtgaccctgaaggagctgaatgctcgccccatggaagtgttcatgtgcagtgtgctcaagaggcaaggttacggcgagggtttccgctggctctcccagtatattgactgatgtttggacggtgaaaataaaagagttttacttctctggactgatcct

SEQ ID NO: 54417 - DNA, 2810 bp, Artificial Sequence
  derived and/or modified sequence
atgtctttcatctttgagtggatctacaatggcttcagcagtgtgctccagttcctaggactgtacaagaaatctggaaaacttgtattcttaggtttggataatgcaggcaaaaccactcttcttcacatgctcaaagatgacagattgggccaacatgttccaacactacatccgacatcagaagagctaacaattgctggaatgacctttacaacttttgatcttggtgggcacgagcaagcacgtcgcgtttggaaaaattatctcccagcaattaatgggattgtctttctggtggactgtgcagatcattctcgcctcgtggaatccaaagttgagcttaatgctttaatgactgatgaaacaatatccaatgtgccaatccttatcttgggtaacaaaattgacagaacagatgcaatcagtgaagaaaaactccgtgagatatttgggctttatggacagaccacaggaaaggggaatgtgaccctgaaggagctgaatgctcgccccatggaagtgttcatgtgcagtgtgctcaagaggcaaggttacggcgagggtttccgctggctctcccagtatattgactgatgtttggacggtgaaaataaaagagttttacttctctggactgatcctattcacagcttcctcatgaacttttctaatagaacaaggaaagctctccaaccatgtctggcgttgagaagccaagagtctctgtcaactctctcattgcccagtggtgacatgtgctcttctccacactgttgggaggtaatgctgccccacgtgctggtgcaggtcagtatcctgggacttggaagctggcaggatttgccgggtaaagctgtatgccatcatggggcacctgaaaagaaaaacacgtctcaccactgtggttgattcaaaagaaagtgattctattttttaaagaaagcgttgttaatgtaattggtatccctcctaactttttgagttcacaatttacttggtccagagttttctattcttttttttttttaaactaatgaatgacatttagatacttcataaaattatgaacagatatggaggccagagctcatttgggtaaacttactcctgctgagttagcaggttggtgagagaagctcccctgagctcacctgtctctctgactgccttggagtaggtggcataaccttgtgcacagagaactagaaaaggggcagaaccccggccttgcagttgtggcaggtttccactgtggtaagctaggttcattcctcatcaaggaatgtgtagcagattgttcactgtggaggagttaattatagaatgggttattgttgttattcttactcatgaagttacagattttagccagtctttgcttttatacttttgtgaaatttaatttctctctatagcaccttcctttttcgttttcagttatcaaaagtgactttgacctcataaaagagttgagaacatctctcgtgtcacatactgcaggtgcatcagttacttttgcacagattctagggggacatttttctgaataggaagacaggacaaagttaacagcttaagggctcttaattctgtgagttgaggacttaaaagtattgtagcatttgtttggatccatgaaaaatgtattcaggctgtttgggagctcttttttttacattttttctcctttgacacctattttattggtgtttaaagtaaaggttaacatctgtagcttttccaggtttttttttttttttttttttttttggtatgaaattgtctttctccattgcagaaataagctagggaaacactaacccaaaaactttctgtagagctgttcctttggaggcagcatcacttattggcagtaaagactcagtataaaagcaccggcatccctacttgggtgatggggattaattttatagcattccattttcctagtgccacatgtgaaattggattttgatgatcttaatctatattctacccttataataaaagatcaaaagatatatctcctatgaacagattggagataggagatgaaaagttgggaggatgtctttattctaatgtgagggtagggaaaatgtggataacattactggggtgagggaggcattgttctttagttggagttctcattcttattctccagtactgacttgtggggaaagcatactttttcactgccaggtactgaatgcagaggctcagtgaagtatatatgtgggaagtgcatgcatttcgtttattagcaaacatagctggattaagacaaagttgttggtttggaaaggggttaaagccttaagtgaacaaatctagctaacagtgaatgaactaggtaatataacttgcatatttttaatttcctttggttaaaggtcccccatacttctctgttcggagacatgagaagtatgattacttcagtgttagttttcttaattttttttttcccctatttgtcccttgtcactttgttgcaagctagaaatctgtgggttatacatagggcagctctttgtgaaagtggtttattccactggagaaaggggattgaaaatcagttagaaccaatgtatttcttgccccacggaacactattcctataagatagctgaaagaagctgctgtgaggagctcagctccaaacacaggatcagcaccttgtataggaattcccatgaattatgacttctcattctgttttatcagagtgcatatatgtcctacttcaggaaaagtaaaacagtcatttacgaaagaaagtcaatctgtatcctaagcatttt

SEQ ID NO: 54418 - DNA, 672 bp, Artificial Sequence
  derived and/or modified sequence
gtctttctggtggactgtgcagatcattctcgcctcgtggaatccaaagttgagcttaatgatatattgcagctcacttctcacactggcccctaatgctttaatgactgatgaaacaatatccaatgtgccaatccttatcttgggtaacaaaattgacagaacagatgcaatcagtgaagaaaaactccgtgagatatttgggctttatggacagaccacaggaaaggggaatgtgaccctgaaggagctgaatgctcgccccatggaagtgttcatgtgcagtgtgctcaagaggcaaggttacggcgagggtttccgctggctctcccagtatattgactgatgtttggacggtgaaaataaaagagttttacttctctggactgatcctattcacagcttcctcatgaacttttctaatagaacaaggaaagctctccaaccatgtctggcgttgagaagccaagagtctctgtcaactctctcattgcccagtggtgacatgtgctcttctccacactgttgggaggtaatgctgccccacgtgctggtgcaggtcagtatcctgggacttggaagctggcaggatttgccgggtaaagctgtatgccatcatggggcacctgaaaagaaaaacacgtctcaccactgtggttgattcaaaagaaa

SEQ ID NO: 54419 - DNA, 1082 bp, Artificial Sequence
  derived and/or modified sequence
agtgtgctctgagggagggtccgagccagccgctgttttgccggaggagcccctcaggccgtttggataatgcaggcaaaaccactcttcttcacatgctcaaagatgacagattgggccaacatgttccaacactacatccgacatcagaagagctaacaattgctggaatgacctttacaacttttgatcttggtgggcacgagcaagcacgtcgcgtttggaaaaattatctcccagcaattaatgggattgtctttctggtggactgtgcagatcattctcgcctcgtggaatccaaagttgagcttaatgctttaatgactgatgaaacaatatccaatgtgccaatccttatcttgggtaacaaaattgacagaacagatgcaatcagtgaagaaaaactccgtgagatatttgggctttatggacagaccacaggaaaggggaatgtgaccctgaaggagctgaatgctcgccccatggaagtgttcatgtgcagtgtgctcaagaggcaaggttacggcgagggtttccgctggctctcccagtatattgactgatgtttggacggtgaaaataaaagagttttacttctctggactgatcctattcacagcttcctcatgaacttttctaatagaacaaggaaagctctccaaccatgtctggcgttgagaagccaagagtctctgtcaactctctcattgcccagtggtgacatgtgctcttctccacactgttgggaggtaatgctgccccacgtgctggtgcaggtcagtatcctgggacttggaagctggcaggatttgccgggtaaagctgtatgccatcatggggcacctgaaaagaaaaacacgtctcaccactgtggttgattcaaaagaaagtgattctattttttaaagaaagcgttgttaatgtaattggtatccctcctaactttttgagttcacaatttacttggtccagagttttctattcttttttttttttaaactaatgaatgacatttagatacttcataaaattatgaacagatatggaggccagagctcatttgggtaaacttactcctgctg

SEQ ID NO: 54420 - DNA, 366 bp, Artificial Sequence
  derived and/or modified sequence
atgagcttcatcttcgagtggatctacaacggcttcagcagcgtgctgcagttcctgggcctgtacaagaagagcggcaagctggtgttcctgggcctggacaacgccggcaagaccaccctgctgcacatgctgaaggacgacagactgggccagcacgtgcccaccctgcaccccaccagcgaggagctgaccatcgccggcatgaccttcaccaccttcgacctgggcggccacgagcaggccagaagagtgtggaagaactacctgcccgccatcaacggcatcgtgttcctggtggactgcgccgaccacagcagactggtggagagcaaggtggagctgaacgtgtgcttcgtgctgtag

SEQ ID NO: 54421 - DNA, 597 bp, Artificial Sequence
  derived and/or modified sequence
atgagcttcatcttcgagtggatctacaacggcttcagcagcgtgctgcagttcctgggcctgtacaagaagagcggcaagctggtgttcctgggcctggacaacgccggcaagaccaccctgctgcacatgctgaaggacgacagactgggccagcacgtgcccaccctgcaccccaccagcgaggagctgaccatcgccggcatgaccttcaccaccttcgacctgggcggccacgagcaggccagaagagtgtggaagaactacctgcccgccatcaacggcatcgtgttcctggtggactgcgccgaccacagcagactggtggagagcaaggtggagctgaacgccctgatgaccgacgagaccatcagcaacgtgcccatcctgatcctgggcaacaagatcgacagaaccgacgccatcagcgaggagaagctgagagagatcttcggcctgtacggccagaccaccggcaagggcaacgtgaccctgaaggagctgaacgccagacccatggaggtgttcatgtgcagcgtgctgaagagacagggctacggcgagggcttcagatggctgagccagtacatcgactag

SEQ ID NO: 54422 - DNA, 354 bp, Artificial Sequence
  derived and/or modified sequence
atgggcctgagcttctggtggaccgtgcagatcatcctggccagctggaaccccaagctgagcctgatgatctactgcagcagcctgctgaccctggcccccaacgccctgatgaccgacgagaccatcagcaacgtgcccatcctgatcctgggcaacaagatcgacagaaccgacgccatcagcgaggagaagctgagagagatcttcggcctgtacggccagaccaccggcaagggcaacgtgaccctgaaggagctgaacgccagacccatggaggtgttcatgtgcagcgtgctgaagagacagggctacggcgagggcttcagatggctgagccagtacatcgactag

SEQ ID NO: 54423 - DNA, 348 bp, Artificial Sequence
  derived and/or modified sequence
tgaagcttctggtggaccgtgcagatcatcctggccagctggaaccccaagctgagcctgatgatctactgcagcagcctgctgaccctggcccccaacgccctgatgaccgacgagaccatcagcaacgtgcccatcctgatcctgggcaacaagatcgacagaaccgacgccatcagcgaggagaagctgagagagatcttcggcctgtacggccagaccaccggcaagggcaacgtgaccctgaaggagctgaacgccagacccatggaggtgttcatgtgcagcgtgctgaagagacagggctacggcgagggcttcagatggctgagccagtacatcgactag

SEQ ID NO: 54424 - DNA, 468 bp, Artificial Sequence
  derived and/or modified sequence
atgctgaaggacgacagactgggccagcacgtgcccaccctgcaccccaccagcgaggagctgaccatcgccggcatgaccttcaccaccttcgacctgggcggccacgagcaggccagaagagtgtggaagaactacctgcccgccatcaacggcatcgtgttcctggtggactgcgccgaccacagcagactggtggagagcaaggtggagctgaacgccctgatgaccgacgagaccatcagcaacgtgcccatcctgatcctgggcaacaagatcgacagaaccgacgccatcagcgaggagaagctgagagagatcttcggcctgtacggccagaccaccggcaagggcaacgtgaccctgaaggagctgaacgccagacccatggaggtgttcatgtgcagcgtgctgaagagacagggctacggcgagggcttcagatggctgagccagtacatcgactag

SEQ ID NO: 54425 - protein, 892 aa, Artificial Sequence
  derived and/or modified sequence
MFCAAVLENLGQTIVPDLGSLESQHDFRTPEFEEFNGKPDSLFFNDGQRRIDFVLVYEDESRKETNKKGTNEKQRRKRQAYESNLICHGLQLEATRSVLDDKLVFVKVHAPWEVLCTYAEIMHIKLPLKPNDLKNRSSAFGTLNWFTKVLSVDESIIKPEQEFFTAPFEKNRMNDFYIVDRDAFFNPATRSRIVYFILSRVKYQVINNVSKFGINRLVNSGIYKAAFPLHDCKFRRQSEDPSCPNERYLLYREWAHPRSIYKKQPLDLIRKYYGEKIGIYFAWLGYYTQMLLLAAVVGVACFLYGYLNQDNCTWSKEVCHPDIGGKIIMCPQCDRLCPFWKLNITCESSKKLCIFDSFGTLVFAVFMGVWVTLFLEFWKRRQAELEYEWDTVELQQEEQARPEYEARCTHVVINEITQEEERIPFTAWGKCIRITLCASAVFFWILLIIASVIGIIVYRLSVFIVFSAKLPKNINGTDPIQKYLTPQTATSITASIISFIIIMILNTIYEKVAIMITNFELPRTQTDYENSLTMKMFLFQFVNYYSSCFYIAFFKGKFVGYPGDPVYWLGKYRNEECDPGGCLLELTTQLTIIMGGKAIWNNIQEVLLPWIMNLIGRFHRVSGSEKITPRWEQDYHLQPMGKLGLFYEYLEMIIQFGFVTLFVASFPLAPLLALVNNILEIRVDAWKLTTQFRRLVPEKAQDIGAWQPIMQGIAILAVVTNAMIIAFTSDMIPRLVYYWSFSVPPYGDHTSYTMEGYINNTLSIFKVADFKNKSKGNPYSDLGNHTTCRYRDFRYPPGHPQEYKHNIYYWHVIAAKLAFIIVMEHVIYSVKFFISYAIPDVSKRTKSKIQREKYLTQKLLHENHLKDMTKNMGVIAERMIEAVDNNLRPKSE

SEQ ID NO: 54426 - DNA, 2679 bp, Artificial Sequence
  derived and/or modified sequence
atgttttgcgctgccgttctggaaaacctgggccagacaatcgtaccggacctgggttcccttgaatctcagcacgacttccggacccccgagtttgaggaatttaacggtaagcccgattctctcttttttaacgatggccagcgccgaattgacttcgtcctcgtttacgaggatgagagtaggaaggagaccaacaagaaaggcacaaacgagaagcagcgacggaagcggcaggcctatgagagtaatctcatttgccatggccttcagctggaggcgacccgtagcgtattggacgataagctcgtgtttgtaaaggttcatgctccctgggaagtgctgtgcacctatgcggagattatgcacatcaaactgcccctaaagcctaatgacctgaaaaaccgtagctctgccttcggaaccctaaactggtttaccaaagtgctatctgtagatgagtccatcatcaaaccggaacaggaattctttactgcgcccttcgaaaaaaaccgaatgaacgacttctatatcgtcgatcgagacgccttcttcaatcccgctaccaggtctcggattgtgtacttcatcctgagtcgtgtgaaatatcaggtgatcaacaatgtttcaaagttcggcattaaccggttggtgaattccggtatttataaggccgcatttcccttgcacgattgtaaatttcgcagacagagcgaggatccctcttgccccaatgaacgctacttgctgtatcgtgaatgggcacaccccagaagcatctataaaaaacagccgcttgacctcatccgcaagtactacggcgaaaagattggaatatactttgcctggctgggctactatacacaaatgctgttgctggcagcggtcgtgggggtggcctgctttctttatggttacttaaaccaggataattgtacgtggagcaaagaggtatgtcatcctgacatcgggggtaagattatcatgtgtcctcaatgcgatagattgtgtcctttttggaagcttaacatcacgtgcgaatccagcaaaaaactgtgcatctttgacagcttcggcacattagtgtttgcagtgtttatgggcgtgtgggtgaccctgttcctggaattctggaaacgcagacaagccgaactggagtatgaatgggacactgtcgagctccagcaggaggaacaggcccgcccagagtatgaagcaagatgcactcacgttgttattaacgaaattactcaggaagaggaaagaatccctttcacagcctggggcaagtgtatcagaatcaccctgtgtgcgagcgcggttttcttctggatccttttgatcatagcttctgtgatcggaataattgtgtaccggctgtccgtctttatagttttttcggccaagctgccaaaaaacattaacgggaccgaccctattcaaaagtatcttacacctcagaccgccacttcaattaccgcatccataatcagcttcatcatcataatgatcctgaataccatctacgagaaggtagcaattatgattaccaacttcgaactgcccagaacacagaccgattatgagaattcgctcacaatgaaaatgttcctcttccagttcgtcaactattatagcagctgtttttacatcgccttttttaaaggaaagtttgtggggtaccctggtgatcctgtgtattggctggggaaatataggaacgaagagtgcgatccaggggggtgtctactggagttaaccacccagctaacaatcataatgggaggtaaagccatatggaataacatacaagaggtcctcctgccatggattatgaacctaatcggtcggtttcatcgcgtcagcggaagtgaaaaaattacaccccgctgggagcaggactaccacctccagcccatggggaaactgggtctcttttatgagtacctggagatgattattcagttcggcttcgtcaccctctttgtggcttctttcccgctggctcctttattggccttagtcaacaatattctggaaatccgggtcgacgcctggaaactcaccacccagttcaggcgactagtccctgagaaagcccaggacattggcgcctggcagccaattatgcagggcattgccatcctggccgtcgtcaccaacgccatgatcatcgcatttacgtcagacatgatcccgcggctggtgtattactggagttttagcgtgcctccctacggtgatcatacgagctatacaatggaggggtatattaacaatacattgtcgattttcaaggttgccgacttcaagaataagtccaagggcaatccctattctgaccttgggaaccacacgacttgcagatatcgagattttcggtacccacccggacacccacaggagtataaacataacatctactattggcacgtcatcgcagctaaactcgcattcataattgtcatggagcatgtgatctattcagtcaagtttttcatctcttatgccatcccagacgttagtaagagaaccaagtctaagatccagagagaaaaatacctgacacagaaactactccacgaaaatcacctgaaggatatgaccaaaaatatgggagttatcgctgagcgaatgatcgaagccgtggataataacctgaggcccaaaagtgaatag

SEQ ID NO: 54427 - DNA, 2679 bp, Artificial Sequence
  derived and/or modified sequence
atgttctgtgccgctgtgctggagaacctgggccagaccatcgtgcctgacctgggcagcctggagagccagcacgacttccgcaccccagagtttgaggagttcaacgggaagccagacagcctcttcttcaatgatggccagaggagaattgactttgtgctggtgtatgaagatgagagcaggaaggagaccaacaagaagggcaccaatgagaagcagaggaggaagaggcaggcctatgagagcaacctgatctgccacggcctgcagctggaggccaccaggtctgtgctggatgacaagctggtgtttgtgaaggtgcacgccccctgggaggtgctgtgcacctatgcagagatcatgcacatcaagctgcccctgaagcccaatgacctgaagaacagaagcagcgccttcggcaccctgaactggttcaccaaggtgctgtctgtggatgagagcatcatcaagccagagcaggagttcttcaccgccccctttgagaagaacaggatgaatgacttctacatcgtggacagagatgccttcttcaacccagccaccaggagcagaattgtgtacttcatcctgagccgggtgaagtaccaggtgatcaacaacgtgtccaagtttggcatcaaccggctggtgaacagcggcatctacaaggccgccttccccctgcatgactgcaagttccggcggcagagcgaggaccccagctgccccaatgaaagatacctgctgtaccgggagtgggcccaccccaggagcatctacaagaagcagcccctggacctgatcaggaagtactatggagagaagattggcatctactttgcctggctgggctactacacccagatgctgctgctggccgctgtggtgggcgtggcctgcttcctgtatggctacctgaaccaggacaactgcacctggagcaaggaggtgtgccacccagacattggaggcaagatcatcatgtgcccccagtgtgaccggctgtgccccttctggaagctgaacatcacctgtgagagcagcaagaagctgtgcatctttgacagctttggcaccctggtgtttgctgtgttcatgggcgtgtgggtgaccctcttcctggagttctggaagaggcggcaggccgagctggagtatgagtgggacacagtggagctgcagcaggaggagcaggcccggccagaatatgaggcccgctgcacccacgtggtgatcaatgagatcacccaggaggaggagcgcatccccttcaccgcctggggcaagtgcatccgcatcaccctgtgtgccagcgctgtgttcttctggatcctgctgatcatcgcctctgtgattggcatcatcgtgtaccgcctgtctgtgttcatcgtgttttctgccaagctgcccaagaacatcaatggaacagaccccatccagaagtacctgaccccccagacagccaccagcatcacagccagcatcatctccttcatcatcatcatgatcctgaacaccatctatgagaaggtggccatcatgatcaccaactttgagctgcccaggacccagacagattatgagaacagcctgaccatgaagatgttcctgttccagtttgtgaactactacagcagctgcttctacatcgccttcttcaagggcaagtttgtgggctacccaggggaccctgtgtactggctgggcaagtacagaaatgaggagtgtgaccccggcggctgcctgctggagctgaccacccagctgaccatcatcatgggcggcaaggccatctggaacaacatccaggaggtgctgctgccctggatcatgaacctgattggccgcttccaccgggtgtctggcagcgagaagatcaccccccgctgggagcaggactaccacctgcagcccatgggcaagctgggcctcttctatgagtacctggagatgatcatccagtttggatttgtgaccctgtttgtggccagcttccccctggcccccctgctggccctggtgaacaacatcctggagatccgggtggatgcctggaagctgaccacccagttccggcggctggtgcctgagaaggcccaggacattggagcctggcagcccatcatgcagggcatcgccatcctggccgtggtgaccaatgccatgatcatcgccttcaccagtgacatgatcccccggctggtgtactactggagcttctctgtgcccccctacggggaccacaccagctacaccatggagggctacatcaacaacaccctgagcatcttcaaggtggccgacttcaagaacaagagcaaaggaaacccctacagcgacctgggcaaccacaccacctgccgctacagagacttccgctacccacctggccacccccaggagtacaagcacaacatctactactggcacgtgattgctgccaagctggccttcatcatcgtgatggagcacgtgatctacagcgtgaagttcttcatctcctatgccatcccagatgtgtccaagaggaccaagagcaagatccagcgggagaagtacctgacccagaagctgctgcacgagaaccacctgaaggacatgaccaagaacatgggcgtgattgctgagaggatgattgaggccgtggacaacaacctgcggcccaagtctgagtag

SEQ ID NO: 54428 - DNA, 2679 bp, Artificial Sequence
  derived and/or modified sequence
atgttctgcgccgccgtgctggagaacctgggccagaccatcgtgccagatctaggtagccttgagtcccagcacgactttcggacaccagagtttgaagaattcaatggaaagcccgattcattattttttaatgatggccagagacggatcgattttgtgcttgtctacgaggacgaatcccgaaaagagactaacaaaaagggcacgaatgaaaagcaaagaagaaagcgacaggcttatgaaagcaacctcatttgtcatggcctgcagcttgaggctactagaagcgtcctcgacgataagctcgtattcgtgaaggtccacgccccatgggaagtgttgtgtacctatgcagaaatcatgcatatcaaattacctctgaaacccaatgacctcaaaaatcggagtagcgcattcgggacccttaactggtttacaaaagtgctgagtgtggatgaatccattatcaaacctgaacaggagtttttcaccgcaccttttgaaaaaaaccgcatgaacgacttctatattgtggacagagacgcctttttcaacccagctacaaggtcccggatagtctacttcattctatctagggtgaaatatcaggtgattaataacgtctctaaatttggaattaaccggctggtcaatagcggaatttataaggcagcgtttcctttgcacgactgtaagtttaggcggcaatcagaggacccatcttgccccaacgagcggtatcttctgtacagagaatgggcccacccacgatcaatttataaaaaacagccactggatctcatccgaaaatattacggagagaaaatcggtatttacttcgcttggctgggctattatacacagatgctgttgctggcagcggtggttggcgtcgcttgcttcctgtatgggtatctcaaccaggacaactgcacatggtcaaaagaagtctgtcacccagacataggcgggaagatcatcatgtgcccgcagtgcgacagattatgccctttctggaaactgaatataacttgcgaaagctctaagaagctatgtatcttcgacagcttcggaacgctggtcttcgcggttttcatgggagtgtgggttacccttttcctcgagttctggaaaaggaggcaggcagaactggagtacgagtgggacaccgtagagttgcagcaggaagagcaggcaaggcctgaatatgaggcccgttgtactcacgtcgttatcaacgagattacccaagaagaggaacggatccctttcacagcatggggaaagtgcatcaggatcaccctctgcgcaagcgcggtgttcttctggattcttcttatcatcgcctctgttatcggaatcatcgtctaccgcctgtcggtgttcatcgtgtttagcgctaagctgccaaaaaacattaatggcaccgacccgattcagaagtatctgaccccccagacagccactagtattacggccagcattatctctttcatcataattatgattctcaatacaatttacgagaaagtagctataatgattacaaacttcgaactcccgcgaacacagaccgactatgagaatagtctgaccatgaaaatgttcctctttcagtttgtgaattactactcaagctgtttctacatcgcgttctttaaaggaaagtttgtgggatatcccggggacccagtatactggctgggtaaataccggaacgaggaatgcgatcctggaggctgcctgctcgagttaactacccagctgaccataatcatgggcggaaaagctatttggaataatattcaagaagtgctactcccctggataatgaaccttatcgggcgctttcatcgggtgagcggctccgagaaaatcacccctagatgggaacaggattaccatcttcagccaatgggaaaactgggcctcttttacgaataccttgagatgattatccaattcggattcgttactctgttcgtcgcaagttttccccttgccccgcttcttgccttggtgaacaacatactggaaattagagtagatgcctggaaactcacaacacagtttaggaggttggtgccggagaaggcccaggacatcggcgcttggcaacccataatgcagggaatcgcaattctggccgtagtcaccaacgccatgattatcgccttcactagcgacatgattccaagactagtgtactactggtccttcagcgtcccgccctatggggatcacacctcctataccatggagggttacatcaataacactttgtctatatttaaggtggccgactttaaaaataagtccaagggtaacccttatagcgacctggggaaccacacaacttgcaggtatcgagatttccggtatccaccaggccatccacaggagtataagcataatatatattactggcacgttatcgctgctaagctcgcgtttattatagtcatggaacacgttatttactcagtgaagttctttatctcttacgccatacctgatgtcagcaaaagaaccaagagcaagatccagcgggaaaagtatttaactcagaaactactgcacgagaaccatctgaaagatatgaccaagaacatgggcgtgatcgccgagcggatgattgaggctgtagacaacaatctgagaccaaagtcggaatag

SEQ ID NO: 54429 - DNA, 2679 bp, Artificial Sequence
  derived and/or modified sequence
atgttttgcgccgcagttctcgagaacctgggtcagaccattgtcccggaccttgggagcctggagagccagcatgatttccggaccccggagttcgaggagttcaacggcaaacctgatagcctctttttcaacgatgggcagagacgaatcgactttgtcctggtctacgaagacgagtctaggaaggaaactaacaaaaagggcacgaacgagaaacaacgccgtaagagacaggcctatgaatcaaatttgatttgtcacggcctgcagctcgaggcaacacgttccgtactggacgacaagctcgtgtttgtgaaggtccacgcgccttgggaggtcttgtgtacttatgcagagatcatgcatattaaactacctttgaaacccaacgacctgaaaaatcgcagctctgcattcggaacgctgaattggttcaccaaggtgctcagcgtggatgagagtattattaaaccagaacaagagttcttcacggctccttttgaaaagaaccgtatgaacgatttctatattgtcgacagagatgcgttcttcaatccagccacccggagccgaattgtatatttcattctgagccgtgtgaagtatcaggtaatcaataacgtgtctaaattcgggatcaataggcttgttaattccggcatttacaaagccgcttttccgctgcacgactgcaaatttcgcaggcagagcgaagacccatcctgcccgaatgaacgctatctgctttacagggaatgggcacatccccgatcaatctacaaaaagcagcccctggacctgattcggaagtactatggagagaaaatcggcatttactttgcatggctcgggtattacacgcagatgctccttctcgccgcagtcgtgggggtggcctgctttttatatggctatctgaaccaggataattgcacatggagcaaagaggtgtgccaccccgacatcggaggcaaaatcataatgtgtccccagtgtgatcgcctctgccccttctggaaactcaatattacttgtgaatcctccaagaagctgtgtatatttgattcgttcggaacgttggtcttcgcagtgtttatgggtgtctgggtcaccctgtttctcgagttctggaagcggaggcaggctgaactggaatacgagtgggacacagtggaacttcagcaggaggaacaggcacggcctgaatatgaagccaggtgtacccacgtcgtgataaatgagatcactcaagaagaggagcggatcccctttacagcatggggcaaatgcatacgcatcacattgtgtgcaagtgcagtgttcttctggattttgctgattattgccagcgtgattgggatcatcgtgtaccgactgagcgtatttattgtcttctctgctaagctgcctaagaacatcaacgggacggaccctattcagaagtaccttactccccagactgccacaagtattactgcctccattatcagttttattattattatgattctaaatactatctatgaaaaggttgctattatgataacgaacttcgagctcccacgcacacaaactgattacgaaaactcactgaccatgaagatgtttctcttccagttcgtcaactactatagcagctgtttttacatcgccttttttaaaggtaagtttgtggggtaccccggagatcctgtttattggctgggaaagtataggaatgaggagtgtgatcctggaggctgtctgctggagcttacaacacagttgacgatcattatggggggtaaagcaatctggaataatatccaggaggtattactgccctggattatgaatctaattgggcgtttccatagggtgtccggttctgagaagatcacacctagatgggagcaggactaccacctgcagccaatggggaaactaggactattctatgagtatctagaaatgattatccagttcgggtttgtgacgctctttgttgcctcgttccctcttgcccctctcctggcgctcgttaataacatccttgagatcagagtcgacgcttggaagttgacaacccagttccgcaggttagtgccggaaaaagcgcaggatatcggcgcttggcagccaattatgcaagggatagccattctggcagtggtcaccaacgctatgataatcgcctttacctccgacatgataccccgtctggtgtattactggagcttcagcgtgcccccatacggagaccacacttcttatacaatggaaggctacatcaacaatacactgtctatctttaaagtggcagacttcaagaacaagagcaagggtaacccctacagcgatcttggcaatcatacaacctgcagatacagagactttcgatacccacccggtcacccacaggagtacaagcataatatctactattggcatgtgatcgctgctaaactcgcattcatcatcgtgatggagcacgtgatctattccgtgaaattctttatctcttatgcaattcctgacgtttcgaagcgtacaaaatcaaagatacagagggagaagtacctaacccaaaagctcctgcatgagaatcacctgaaggacatgacaaagaacatgggcgttatcgcagagcggatgatcgaggccgtggataataacttacgtccgaagtccgagtag

SEQ ID NO: 54430 - DNA, 5955 bp, Artificial Sequence
  derived and/or modified sequence
ttggggcagaggaggcttgtaggaataggggaagagttcataagcagagctgaaacaacaccaaacatggaaatgttacaaggtggagaaattgtgcttactgaaactcttctcagaaatattgctgtttgtggatgatagaaatcttcagagttgtcacttaaggtagaggtaggagggtaagaagcgtcaaggactcaccgaattgtccattcccccttttgttctgctgtggaatgttttgtgctgctgtgttggaaaaccttggacagacaattgtccccgatttgggatcactggaaagtcagcatgattttcgaaccccggagtttgaagaatttaatggaaaacctgactccctcttttttaatgatggccagcgaagaattgactttgttctagtatatgaggatgaaagcagaaaagagaccaataaaaagggtacaaatgaaaaacaaaggaggaaaagacaagcatacgaatctaaccttatctgtcatggcctgcagttagaagcaacaagatcagtattggatgacaagcttgtatttgtaaaagtacacgcaccatgggaggtgttatgtacgtatgctgagataatgcacatcaaattgcctctgaaacccaatgatctgaaaaaccggtcctcagcctttggtacactcaactggtttaccaaagtcctcagtgtagacgaaagcatcatcaagccagagcaagagtttttcactgccccatttgagaagaaccggatgaatgatttttacatagttgatagagatgctttcttcaatccagccaccagaagccgcattgtttacttcatcctctctcgggtcaagtatcaagtgataaacaatgttagcaagtttgggatcaacagacttgtaaactctgggatctacaaggcagctttcccactccatgattgcaaattccgccgtcagtcagaggatcccagctgccctaatgaacggtaccttctgtacagagaatgggctcatcctcgaagcatatacaaaaagcagcccttggatcttatcaggaaatactatggagagaagattggaatctactttgcttggctgggctattacactcagatgcttctcctggccgcagttgtaggagtggcttgctttctctatggatatcttaatcaagataactgtacatggagcaaagaagtttgtcatcctgatattggtggcaagatcataatgtgtcctcagtgtgataggctttgtccattctggaaactcaatattacttgcgagtcctcaaagaaattgtgcatcttcgacagttttggaaccctggtctttgcagtatttatgggagtatgggttaccttgtttttggagttttggaagcgacgccaggcagaacttgagtatgaatgggatactgttgagttacagcaggaagaacaagcccgaccagaatacgaagcacgatgtactcacgtagtgataaatgagattactcaggaagaagaacgcattccctttactgcctggggaaaatgtatacggataaccctctgtgccagtgctgtctttttctggatcctattgatcatcgcttcagttattgggatcattgtctataggctctcggtgttcattgtattttctgcaaaacttcccaagaacattaatggaacagacccaatccagaaatacctgactccacagacagccacgtccatcacggcctccatcatcagctttataattatcatgattctgaacaccatatatgaaaaagtggcaattatgattactaacttcgaactcccaaggacccagactgattatgagaacagcctcaccatgaagatgttcttattccagtttgtcaactactactcttcatgcttctacatagcattctttaagggcaaatttgtaggctatccaggagacccagtttattggttgggaaaatacagaaatgaagagtgtgacccaggtggctgtcttcttgaactgacaactcagctgacaataatcatgggaggaaaagcaatctggaataacatacaagaagtattattgccctggatcatgaatctaattgggcgatttcacagagtttctggatcagaaaagataaccccacgatgggaacaggactaccatctgcagcctatgggcaaactgggattattttatgaatatcttgaaatgattattcagtttgggttcgtcaccttatttgtggcctcttttccactggcccctctgttggctctcgtgaacaatatattggaaataagagtggacgcatggaaactgaccacccagtttagacgcctggtaccagagaaagcccaagacattggagcatggcagcccatcatgcaaggaatagcaattctggctgtggtgaccaatgccatgatcatagctttcacgtcggacatgatcccccgcctagtgtactactggtccttctccgtccctccctacggggaccacacttcctacaccatggaagggtacatcaacaacactctctccatcttcaaagtcgcagacttcaaaaacaaaagcaagggaaacccgtactctgacctgggtaaccataccacatgcaggtatcgtgatttccgatacccacctggacacccccaggagtataaacacaacatctactattggcatgtgattgcagccaagctggcttttatcattgtcatggagcacgtcatctactctgtgaaatttttcatttcatatgcaattcccgatgtatcaaaacgcacaaagagcaagatccagagagaaaaatacctaacccaaaagcttcttcatgagaatcacctcaaagatatgacgaaaaatatgggggtgatagctgagcggatgatagaagcagtagataacaatttacggccaaaatcagaataagagctttatgttctgagaagcactttaaggaatttagctttgtcaaaatatattaggaatcactaatgagaatgtgtaagttaaatcactttggcaaatatgagtctcaactattgccatttcctcatgtattatttttcagtttcagctagcgatgcagaaactggaaaatgtaaaacttagatcatgaagggcataaaacttatcacccggaaaacctcaatgttacctttttctgataaattggaattttacagaaaaagtccctcagtgtgcttaaaaaccaccccttctaaagtagaatggattcttttttttctgtttgattattttcatttctgtctattctcaggcgcatgatctcctttatttttaagccatgtttcatttcttcacttggctagatctgttccagggtcatcttttccttacagtaccatcattatagatttaatttaatagctttcatgtgattaaaaatagctaactagactcaaggattcacaatatttaggtgtattttcaatacctccagaaaggaaacctcagttaatcagaggaaatagtttcagtcttcatttgagcatgtctttccatctcaaaaaaatactcttagtaggttggagtgaagatagcaaggttttgaagcatatttgtcctaatccacagtgacactttttatcttccaggagcactcctaggaggttccgtgcctaatcaatgttgactgctttgcagatctcaagggaataaaatgacaaaagcagggaaagttacagattcaaacagcattttaactcatgttgatctggataattaatcttttctaaagatgtgtagtttcttggaaaacagtgatatcacatgattaaaattacatttttatcaacataattgtctggaaaagataagcccctcaattttctaccagttgacttttattcattagatacagaaggtgcagtattacacatcaccagctgcctttgtgaatggctcactacacagccattggggtacaactgtgtgcatgggcagaaacagcaagtgccctcattgtggtcattgggtggggagtgccttttgtcaaggagtctgcaggaattggcttatttctgtatgccaaagtgatcaacacaccaaagtctctgccataaagaatgtggcttccttgcatcctccatcctgttactctgggcccagtaatttgatgtaactgtctgattgtactagagacaggagtatacccagcttattcataatcaagtaaagagactcagattagatttgattttttagcctcctctagagccaatcaggcagttaagagtaataaaggaaaagggtttggtcacaaaccctaccattatctggagattacttcctgctgcactcctgtcttgccatgcacgtcttgccccctcacttttgctcagcctagcagtctacttcactttattgccttgtaagtgtcaggcctcctgggcgctctggaaaagacagggagccaggccctctcacccctactggtaacaggtcattgctgggtgcacaagagggaggtgatttgcatcatggtcatgctgcatgggcttcactgggatgctgttaaacaccagaggagccaacctatcagaatcccagcagcaaaggaaaactcagattttagaggctttttacaataaagtagcgtaactctaggtcatgattgatttcaaatgcctgccatgaatgatttgtaagtaattatgtaggatccatcaaagcagtattgtaggcttttgaattgtcccagtggatccgggaccccatttcactgtctctcttgatcgtgttaatgatgcaatcagagttcaagacaggccccatgaagtctgactgcactgggatggagaaatgaatttcttcccactgaaggaaactctttctcattcgcagccaagacgggagtgccactgttcctctcttcactcctgagatactgcttctggaagcgggtgtcacttcctctctagtacctcttctcttctctgaagtgtgtgactatctcctagtgtttaaatttggcagttactcgccatgtatgtcagcatagaaaaggaaatgtttttaccttatctcctgtatgtatgatagaacttaaaagaaatgtgcatttgttttcatagccccagcagagaaaatcctcttcatagattaaatgtgctgctgtggacaggaggggaaaaaaaaccctctacatattgaaaggcaccaaatgtaatatctgacactgttaagatgcccaaaagagcaaagttgtagtggagatgcagggtcatttccccatgccatccacagtgtttgttagtgagtccacggctgacttgcagtgataaagaaaagcatggagctgtgtctgcagacaatggtggctgcatctgtaagtggcttcagaggcagcagccctggggaaattgatgggtgtggcagtggacctgtgaagagggagaatctagccttcagcctgtccagtgttaaccactagagaaactgagctttatatccttttttaatgcctgtgaattttagcatattgaaacattagagcaaatactcaggggatttttcattaaacatccctcagataatttagctatatatcattagaaagggaaagctatcatttttattttaaaactaaacaaggccatcttataaactgtcaccaaagtcttcccttttttattgcatgtgtgccttgaatttcataaaacattaattcacaatgggggtcagaatgtactcttgttgaaacacttcttgtaccattttatgttcatattatgtttgagagggtaaaaatgtatgagcagcttaactgaagtagaactattcatgatgcttttcacacattgtggcataagatgtaaagtttgtaattaatgttaatttctgtgcattttaatattcttttataattattaatgttaatttctgtgcattttaatattcttttataattatgagcattttaataaattcatttttacaaacaata

SEQ ID NO: 54431 - DNA, 2679 bp, Artificial Sequence
  derived and/or modified sequence
atgttctgcgccgccgtgctggagaacctgggccagaccatcgtgcccgacctgggcagcctggagagccagcacgacttcagaacccccgagttcgaggagttcaacggcaagcccgacagcctgttcttcaacgacggccagagaagaatcgacttcgtgctggtgtacgaggacgagagcagaaaggagaccaacaagaagggcaccaacgagaagcagagaagaaagagacaggcctacgagagcaacctgatctgccacggcctgcagctggaggccaccagaagcgtgctggacgacaagctggtgttcgtgaaggtgcacgccccctgggaggtgctgtgcacctacgccgagatcatgcacatcaagctgcccctgaagcccaacgacctgaagaacagaagcagcgccttcggcaccctgaactggttcaccaaggtgctgagcgtggacgagagcatcatcaagcccgagcaggagttcttcaccgcccccttcgagaagaacagaatgaacgacttctacatcgtggacagagacgccttcttcaaccccgccaccagaagcagaatcgtgtacttcatcctgagcagagtgaagtaccaggtgatcaacaacgtgagcaagttcggcatcaacagactggtgaacagcggcatctacaaggccgccttccccctgcacgactgcaagttcagaagacagagcgaggaccccagctgccccaacgagagatacctgctgtacagagagtgggcccaccccagaagcatctacaagaagcagcccctggacctgatcagaaagtactacggcgagaagatcggcatctacttcgcctggctgggctactacacccagatgctgctgctggccgccgtggtgggcgtggcctgcttcctgtacggctacctgaaccaggacaactgcacctggagcaaggaggtgtgccaccccgacatcggcggcaagatcatcatgtgcccccagtgcgacagactgtgccccttctggaagctgaacatcacctgcgagagcagcaagaagctgtgcatcttcgacagcttcggcaccctggtgttcgccgtgttcatgggcgtgtgggtgaccctgttcctggagttctggaagagaagacaggccgagctggagtacgagtgggacaccgtggagctgcagcaggaggagcaggccagacccgagtacgaggccagatgcacccacgtggtgatcaacgagatcacccaggaggaggagagaatccccttcaccgcctggggcaagtgcatcagaatcaccctgtgcgccagcgccgtgttcttctggatcctgctgatcatcgccagcgtgatcggcatcatcgtgtacagactgagcgtgttcatcgtgttcagcgccaagctgcccaagaacatcaacggcaccgaccccatccagaagtacctgaccccccagaccgccaccagcatcaccgccagcatcatcagcttcatcatcatcatgatcctgaacaccatctacgagaaggtggccatcatgatcaccaacttcgagctgcccagaacccagaccgactacgagaacagcctgaccatgaagatgttcctgttccagttcgtgaactactacagcagctgcttctacatcgccttcttcaagggcaagttcgtgggctaccccggcgaccccgtgtactggctgggcaagtacagaaacgaggagtgcgaccccggcggctgcctgctggagctgaccacccagctgaccatcatcatgggcggcaaggccatctggaacaacatccaggaggtgctgctgccctggatcatgaacctgatcggcagattccacagagtgagcggcagcgagaagatcacccccagatgggagcaggactaccacctgcagcccatgggcaagctgggcctgttctacgagtacctggagatgatcatccagttcggcttcgtgaccctgttcgtggccagcttccccctggcccccctgctggccctggtgaacaacatcctggagatcagagtggacgcctggaagctgaccacccagttcagaagactggtgcccgagaaggcccaggacatcggcgcctggcagcccatcatgcagggcatcgccatcctggccgtggtgaccaacgccatgatcatcgccttcaccagcgacatgatccccagactggtgtactactggagcttcagcgtgcccccctacggcgaccacaccagctacaccatggagggctacatcaacaacaccctgagcatcttcaaggtggccgacttcaagaacaagagcaagggcaacccctacagcgacctgggcaaccacaccacctgcagatacagagacttcagatacccccccggccacccccaggagtacaagcacaacatctactactggcacgtgatcgccgccaagctggccttcatcatcgtgatggagcacgtgatctacagcgtgaagttcttcatcagctacgccatccccgacgtgagcaagagaaccaagagcaagatccagagagagaagtacctgacccagaagctgctgcacgagaaccacctgaaggacatgaccaagaacatgggcgtgatcgccgagagaatgatcgaggccgtggacaacaacctgagacccaagagcgagtag

SEQ ID NO: 54432 - protein, 929 aa, Artificial Sequence
  derived and/or modified sequence
MKKMSRNVLLQMEEEEDDDDGDIVLENLGQTIVPDLGSLESQHDFRTPEFEEFNGKPDSLFFNDGQRRIDFVLVYEDESRKETNKKGTNEKQRRKRQAYESNLICHGLQLEATRSVLDDKLVFVKVHAPWEVLCTYAEIMHIKLPLKPNDLKNRSSAFGTLNWFTKVLSVDESIIKPEQEFFTAPFEKNRMNDFYIVDRDAFFNPATRSRIVYFILSRVKYQVINNVSKFGINRLVNSGIYKAAFPLHDCKFRRQSEDPSCPNERYLLYREWAHPRSIYKKQPLDLIRKYYGEKIGIYFAWLGYYTQMLLLAAVVGVACFLYGYLNQDNCTWSKEVCHPDIGGKIIMCPQCDRLCPFWKLNITCESSKKLCIFDSFGTLVFAVFMGVWVTLFLEFWKRRQAELEYEWDTVELQQEEQARPEYEARCTHVVINEITQEEERIPFTAWGKCIRITLCASAVFFWILLIIASVIGIIVYRLSVFIVFSAKLPKNINGTDPIQKYLTPQTATSITASIISFIIIMILNTIYEKVAIMITNFELPRTQTDYENSLTMKMFLFQFVNYYSSCFYIAFFKGKFVGYPGDPVYWLGKYRNEECDPGGCLLELTTQLTIIMGGKAIWNNIQEVLLPWIMNLIGRFHRVSGSEKITPRWEQDYHLQPMGKLGLFYEYLEMIIQFGFVTLFVASFPLAPLLALVNNILEIRVDAWKLTTQFRRLVPEKAQDIGAWQPIMQGIAILAVVTNAMIIAFTSDMIPRLVYYWSFSVPPYGDHTSYTMEGYINNTLSIFKVADFKNKSKGNPYSDLGNHTTCRYRDFRYPPGHPQEYKHNIYYWHVIAAKLAFIIVMEYLALLPRLGHSGMILAHCNLRLPVDCCMCYRFVDEIRLLEQLTSDFIDSLYYIFSISIISIFFSVTFFFLLLSLGPTPCFSVSNFLS

SEQ ID NO: 54433 - DNA, 2790 bp, Artificial Sequence
  derived and/or modified sequence
atgaagaaaatgagccgcaatgtgctgttgcaaatggaagaggaggaggacgacgatgacggagatatcgtgctggagaatctgggccagaccatcgtgccagatttgggctctcttgaatcccaacatgactttagaacccctgagttcgaggagttcaatgggaaacccgacagtctgttctttaacgacggccaaagacgcattgacttcgtgctggtatacgaggacgaaagtcgaaaggagaccaataagaagggcactaatgagaaacagcggcggaagagacaagcgtacgagagtaatcttatctgccatggcctccagttggaagcaaccagatctgtgctcgacgataaactggttttcgtcaaagtgcatgccccatgggaggtcctgtgtacatacgccgagataatgcatattaaattgccactgaaacccaacgacctgaaaaacagatcttccgctttcggcactctcaattggtttactaaggttctcagtgtcgacgagtcaatcatcaagccggagcaggagttcttcactgcaccctttgaaaaaaataggatgaatgatttctacatcgtggatcgagatgctttttttaatcccgctacacggagcagaatcgtctatttcatactttcacgggtgaagtatcaggtgatcaacaacgtgtccaagtttggcataaacaggctcgtgaacagtgggatttacaaagccgcctttcccctgcatgattgcaagttcaggcgccaatccgaggatccgtcctgccctaatgagaggtatctcctgtacagggaatgggcgcaccccaggtcaatttacaagaagcagccactcgacttaatccgcaagtactatggcgaaaaaataggaatttactttgcttggctcggttattacactcagatgctgctgctggccgccgttgtcggggttgcctgtttcctatacggctatctcaatcaggataactgcacctggtccaaagaagtttgccaccccgatatcgggggtaagatcattatgtgtccacagtgcgaccggctctgtcccttttggaagctcaacatcacgtgcgaatcgtccaaaaagttatgcatctttgatagcttcggtactctggtatttgcagttttcatgggagtgtgggtaacgcttttcttagagttctggaagagaagacaggccgagctagagtatgagtgggatactgttgagctacagcaggaagagcaagcgaggcccgaatatgaggctcggtgtactcatgtggttatcaacgagatcacccaagaagaagaaagaattcctttcacggcatggggcaagtgcatccgcatcacgctgtgtgccagcgcggttttcttttggatccttttaattatcgcctctgtgatcggaatcattgtgtaccgcctttcggtgtttatcgtcttcagcgcgaaattacccaaaaacatcaacggtacagatccgatacagaagtacctgacaccccaaacggccacaagtataacagcttcaattattagtttcatcatcataatgatcctcaataccatctacgagaaggtcgctatcatgataacaaattttgaacttcctcggacccaaactgactatgaaaattctctgaccatgaaaatgttcttattccagttcgttaattactattcttcttgcttttatatagcctttttcaaaggcaaatttgtcggctatccaggggatccagtttactggctgggaaagtaccggaacgaagagtgtgatccaggtggctgtctgctggagctcacaacccaattaacaatcatcatgggcgggaaagccatctggaataacatccaggaagtattgctcccatggattatgaatctgatcgggcgctttcatagggtttcagggtccgagaaaatcacaccacgctgggagcaggactaccacttgcaacccatgggcaaacttggacttttttacgagtacctcgagatgatcatccagtttggtttcgtaacactgtttgtggcctcattcccactggcccccctgctggctcttgtgaataacatcctggaaatcagggtggacgcctggaagctgactactcagtttcgaaggctggttcctgagaaggcgcaggacatcggagcttggcagcctattatgcaggggattgcgattctcgccgtggtgactaacgccatgattatcgcctttacctcagatatgatacctaggctggtatactattggtccttctctgtgcccccctatggcgaccacacctcgtacaccatggagggatacattaacaacacattgtcaatattcaaagtggccgacttcaaaaacaagagcaaggggaacccttacagcgatctcggaaaccacacgacttgtagatatagggactttagatatccccccggtcatcctcaggagtacaaacataacatctactattggcacgtgattgcggccaaactggccttcatcatcgtgatggagtacctcgccctgctgccccggctgggccatagcggaatgattttggcacactgcaacctgcgtctccccgtggattgctgtatgtgttatagatttgttgacgagataagacttcttgaacaactgacttccgacttcatcgattcactgtactacattttctcaatcagcatcatttccatttttttttctgtgactttcttcttcttgttgctttcactgggccccacaccttgcttcagcgtatcaaacttcctctcgtag

SEQ ID NO: 54434 - DNA, 2790 bp, Artificial Sequence
  derived and/or modified sequence
atgaaaaaaatgtccagaaacgtgcttctgcagatggaagaagaggaggatgatgacgatggcgatatcgttctggaaaaccttggccagacaattgtccctgatctcggaagcctggaaagtcagcatgacttccgcacacccgagttcgaagagttcaatggcaaacctgattccctgttcttcaacgacgggcagaggagaattgactttgtccttgtttacgaggacgaatcacgcaaagagaccaataagaaggggaccaatgaaaaacagagacgtaagcggcaagcgtacgagagcaatctcatttgtcacggcctccagttggaagccacccgaagcgttttagacgataagcttgtgttcgttaaggttcacgctccctgggaggtgttatgcacctacgcagagatcatgcacattaagcttccactgaaaccaaacgacctgaagaacaggagctccgcctttggcactcttaattggttcacaaaagtcctctccgtggacgaatcaattattaaacctgagcaggagttttttacggcaccgttcgagaagaaccggatgaacgatttttacatcgtggatcgagatgctttctttaatcctgcaacgagaagccggatcgtgtattttatcctctcgcgggtcaagtaccaggttatcaataacgtctcaaagttcgggatcaatagattagtcaattctgggatatacaaggcagctttccccctgcatgactgcaaatttcgacgccagagcgaagatcctagttgtcctaacgaacgctacctcctctacagagaatgggcccacccccggagtatttacaaaaagcaacctctggacctgatccggaaatactacggagagaagattgggatttacttcgcctggctagggtactatacccagatgcttttgctggcagcggtggttggcgtcgcatgctttctgtatggctacctcaatcaggataactgtacttggagtaaagaagtatgccatcctgacattggcggcaaaattataatgtgcccgcagtgtgaccgcttgtgccctttctggaagcttaacatcacttgcgaaagctctaaaaaactgtgcatcttcgatagcttcggaacccttgtgtttgctgtgtttatgggtgtgtgggtgaccttgttcctggaattttggaagagaagacaggcagagctggaatacgaatgggatactgtggaactgcaacaagaggagcaagcccgacctgagtacgaagctcgctgtacccatgtggtgatcaatgagatcactcaggaagaagagagaattccatttacagcatggggcaaatgcattagaataaccctctgcgcgagcgccgtattcttttggatcctcctcataattgcttctgttatcggaattatcgtgtaccgcctgagtgtcttcatcgtattctctgctaaacttccaaaaaatattaatggaacggacccaatccagaagtacctaacccctcagaccgccacctctatcactgcatctataatttcatttattatcatcatgatccttaatacaatctatgaaaaagtggctatcatgatcacgaactttgaactcccacgaactcaaaccgactacgaaaactccctaaccatgaagatgttcctgtttcaattcgtgaattattacagtagttgtttttatatagcattttttaagggcaagtttgtggggtaccctggggatcccgtgtattggttaggaaagtaccgcaacgaagaatgcgatcccggaggctgcctgctggaactcaccacacagctaacaataattatgggcggtaaggccatctggaacaacattcaggaagtgctgctcccatggataatgaatttgattggccgcttccaccgggtgtcaggtagcgagaaaatcactcctcgatgggagcaggactatcacctacagccaatgggcaagttgggactgttctacgagtacctagaaatgattattcaattcggcttcgtcaccctcttcgtagcctcgtttccactggcccccctcctggcactggtaaataacatcctggaaattcgggtcgatgcatggaagctgacgacacagttcaggcggctcgttccggagaaggcccaggatatcggtgcatggcaacctatcatgcagggaattgctattctggctgtggtcacaaacgctatgatcatcgccttcacctctgacatgattcccaggctggtgtactattggagcttctctgttccgccatacggggatcatacttcatatacgatggagggatacattaacaataccctatctatctttaaggtggccgacttcaaaaataagtccaaggggaacccctactcagatttaggcaatcacacaacatgtaggtacagagattttaggtatcctccaggtcatccacaggaatataagcataatatatattattggcacgttatcgctgctaagttagccttcatcattgtaatggaatatcttgctctgcttcctcgcttgggtcactctggtatgatactcgcccattgcaacttgagattgcccgtggattgctgtatgtgttaccgctttgtggacgagatcaggctgttggagcaactgacctctgatttcatagattctctctactatatcttctctatatcaattatctccatatttttttcagtgacttttttcttcttacttctctctcttgggcccaccccttgctttagtgtcagtaacttcctctcttag

SEQ ID NO: 54435 - DNA, 2790 bp, Artificial Sequence
  derived and/or modified sequence
atgaagaagatgagcagaaatgtgctgctgcagatggaggaggaggaggatgatgatgatggagacatcgtgctggagaacctgggccagaccatcgtgcctgacctgggcagcctggagagccagcacgacttccgcaccccagagtttgaggagttcaacgggaagccagacagcctcttcttcaatgatggccagaggagaattgactttgtgctggtgtatgaagatgagagcaggaaggagaccaacaagaagggcaccaatgagaagcagaggaggaagaggcaggcctatgagagcaacctgatctgccacggcctgcagctggaggccaccaggtctgtgctggatgacaagctggtgtttgtgaaggtgcacgccccctgggaggtgctgtgcacctatgcagagatcatgcacatcaagctgcccctgaagcccaatgacctgaagaacagaagcagcgccttcggcaccctgaactggttcaccaaggtgctgtctgtggatgagagcatcatcaagccagagcaggagttcttcaccgccccctttgagaagaacaggatgaatgacttctacatcgtggacagagatgccttcttcaacccagccaccaggagcagaattgtgtacttcatcctgagccgggtgaagtaccaggtgatcaacaacgtgtccaagtttggcatcaaccggctggtgaacagcggcatctacaaggccgccttccccctgcatgactgcaagttccggcggcagagcgaggaccccagctgccccaatgaaagatacctgctgtaccgggagtgggcccaccccaggagcatctacaagaagcagcccctggacctgatcaggaagtactatggagagaagattggcatctactttgcctggctgggctactacacccagatgctgctgctggccgctgtggtgggcgtggcctgcttcctgtatggctacctgaaccaggacaactgcacctggagcaaggaggtgtgccacccagacattggaggcaagatcatcatgtgcccccagtgtgaccggctgtgccccttctggaagctgaacatcacctgtgagagcagcaagaagctgtgcatctttgacagctttggcaccctggtgtttgctgtgttcatgggcgtgtgggtgaccctcttcctggagttctggaagaggcggcaggccgagctggagtatgagtgggacacagtggagctgcagcaggaggagcaggcccggccagaatatgaggcccgctgcacccacgtggtgatcaatgagatcacccaggaggaggagcgcatccccttcaccgcctggggcaagtgcatccgcatcaccctgtgtgccagcgctgtgttcttctggatcctgctgatcatcgcctctgtgattggcatcatcgtgtaccgcctgtctgtgttcatcgtgttttctgccaagctgcccaagaacatcaatggaacagaccccatccagaagtacctgaccccccagacagccaccagcatcacagccagcatcatctccttcatcatcatcatgatcctgaacaccatctatgagaaggtggccatcatgatcaccaactttgagctgcccaggacccagacagattatgagaacagcctgaccatgaagatgttcctgttccagtttgtgaactactacagcagctgcttctacatcgccttcttcaagggcaagtttgtgggctacccaggggaccctgtgtactggctgggcaagtacagaaatgaggagtgtgaccccggcggctgcctgctggagctgaccacccagctgaccatcatcatgggcggcaaggccatctggaacaacatccaggaggtgctgctgccctggatcatgaacctgattggccgcttccaccgggtgtctggcagcgagaagatcaccccccgctgggagcaggactaccacctgcagcccatgggcaagctgggcctcttctatgagtacctggagatgatcatccagtttggatttgtgaccctgtttgtggccagcttccccctggcccccctgctggccctggtgaacaacatcctggagatccgggtggatgcctggaagctgaccacccagttccggcggctggtgcctgagaaggcccaggacattggagcctggcagcccatcatgcagggcatcgccatcctggccgtggtgaccaatgccatgatcatcgccttcaccagtgacatgatcccccggctggtgtactactggagcttctctgtgcccccctacggggaccacaccagctacaccatggagggctacatcaacaacaccctgagcatcttcaaggtggccgacttcaagaacaagagcaaaggaaacccctacagcgacctgggcaaccacaccacctgccgctacagagacttccgctacccacctggccacccccaggagtacaagcacaacatctactactggcacgtgattgctgccaagctggccttcatcatcgtgatggagtacctggccctgctgccccggctgggccacagcggcatgatcctggcccactgcaacctgcggctgcctgtggactgctgcatgtgctacagatttgtggatgagatccggctgctggagcagctgaccagtgacttcatcgacagcctgtactacatcttcagcatcagcatcatcagcatcttcttctctgtgaccttcttcttcctgctgctgagcctgggccccaccccctgcttctctgtgagcaacttcctgtcctag

SEQ ID NO: 54436 - DNA, 2790 bp, Artificial Sequence
  derived and/or modified sequence
atgaagaagatgagccggaacgtgctgctgcagatggaggaggaggaagatgacgatgacggcgatattgtgcttgagaacttaggccagactattgtgccagatctcgggtcactggagagccagcacgactttaggacgcccgaattcgaggaatttaatggaaagccggatagcctattcttcaatgacggccagcggagaattgattttgtgctggtgtacgaggatgagagtcgcaaggaaacaaacaaaaaaggcaccaatgagaaacaacgccgcaaaagacaagcatatgagagcaatctcatctgccatgggttgcaactcgaggccactcggtcggtgctggacgacaaactcgtgttcgttaaagtgcacgccccatgggaagtcctctgtacttatgccgagatcatgcacatcaaacttccgctcaagcccaatgatctaaaaaaccgcagttcagcttttggcacactcaattggttcaccaaagtgctcagtgtcgacgaatcgatcatcaagcctgagcaggagttcttcacggcgccttttgagaaaaatcgcatgaacgatttttatattgtcgacagagatgccttcttcaaccccgcaaccagatctcggatcgtgtacttcatattgagtagagtgaagtatcaggtgattaataatgtcagcaaatttggtatcaaccgtctggtgaactccggcatctacaaagcagctttcccacttcacgattgcaagtttcgccgtcagtctgaagacccatcatgtccgaatgagcgctacctcctctatagagaatgggcgcatcccaggtcaatttataagaagcagcccctcgatctcattcgcaaatattacggcgagaaaatcgggatctacttcgcctggttgggctattatacgcagatgctgttgctggccgccgtagtgggagttgcttgtttcctgtacggttatctgaatcaagacaactgtacttggagcaaggaggtttgtcatccagatattgggggcaaaattatcatgtgtccccaatgcgataggctatgtccattctggaaactgaatatcacatgtgagagttctaaaaagctctgcatttttgactcctttgggacgctcgtctttgcagtatttatgggagtgtgggtcactctgtttcttgaattctggaagaggcgccaggccgagctggagtacgaatgggataccgtggaattgcagcaggaagagcaggcacgtccggagtacgaagcacgttgcacgcacgtcgtcatcaacgagataacccaagaagaggaacgaatcccattcacagcctgggggaagtgcattagaatcactttatgcgctagtgccgtgttcttttggatcctgctgattattgcgagcgttatcggtatcattgtataccgcctctccgtgttcatcgtgttcagcgctaaattacccaaaaacataaatggcactgaccctatccagaaatacctgacgccccagaccgctaccagtataactgcgtcaataatttcttttatcatcattatgatattgaatactatttacgagaaagttgctataatgatcacaaacttcgagttgccaaggacacagacagactacgagaactcactgaccatgaagatgtttctgttccagttcgtgaactattattcaagctgtttttatatcgcatttttcaagggaaagttcgtcggatatccgggcgacccagtctattggctcggcaagtatcgaaacgaggagtgcgacccaggtggctgcctcctggagcttactacgcagctgacaattatcatgggcgggaaagctatatggaacaatatccaggaagtgcttctgccttggatcatgaacctgataggtagatttcatcgggtgtccggcagtgagaaaatcaccccgagatgggagcaggattaccatctgcagcccatgggtaaacttggtcttttctatgaatacctcgaaatgatcattcagtttgggttcgtgaccctctttgtggcttcttttccactggcacctctcctggcactggtgaacaatatcttggagatcagagtcgatgcatggaagcttacgacccagttcagaaggctagtcccagaaaaagcacaggacatcggggcctggcagccaattatgcaaggcatcgcaattctggccgtggtgacaaacgccatgatcatcgctttcacaagtgacatgataccccgactcgtatactattggtctttctctgttcctccttacggtgaccacacatcatatacaatggagggttacattaataacaccctcagcatttttaaggtagccgactttaaaaacaaatccaagggcaacccatacagcgatctagggaatcacaccacatgcagatacagagattttcgatatcctcccgggcacccacaggagtataagcacaacatctattattggcacgtgatcgcagcaaagctcgcctttataattgtgatggaatacctcgcactcctacctcgcttgggtcattctggtatgatcttggcccattgcaatctccgtttacctgttgactgttgtatgtgctatcgatttgtcgacgagattaggctgctggagcagctaacttccgacttcatagattcactctactacatctttagcatctccataataagtatttttttctctgtcacctttttcttcctcctgcttagcctggggcccactccttgtttttctgtttctaactttctgtcctag

SEQ ID NO: 54437 - DNA, 2790 bp, Artificial Sequence
  derived and/or modified sequence
atgaagaagatgagccggaacgtgctgctgcagatggaggaggaggaagacgatgatgatggcgatatagttctcgagaatctgggccagaccatcgtgcccgatttaggatctctggagtcacagcatgactttcgaacaccagaatttgaggaatttaacggaaaaccggattcacttttctttaacgatggacagcgcagaatcgacttcgtgttagtgtatgaggacgagagtcgtaaagagacaaacaagaagggcaccaatgagaagcaacgccggaaacgacaagcttacgagagcaacctaatctgtcacgggctgcaattagaggccactcgttcagtgttggacgataaattggtgttcgttaaggtacatgccccttgggaagtgctgtgtacgtacgcagaaataatgcacataaagttaccgctgaaacccaatgacctcaagaaccgtagcagtgctttcgggactcttaattggtttacaaaagtgctcagcgtggatgagagtattatcaaaccagagcaagaatttttcaccgccccgtttgagaaaaacaggatgaacgatttttacattgttgatcgcgacgcatttttcaatcccgccacccgctctagaatcgtatatttcatcttatctcgcgttaaataccaggtcattaataacgtaagtaagttcggaattaacaggctggtgaactcgggcatttacaaggctgcttttcctttgcatgactgtaaatttcgacgccagtctgaagacccttcttgtcctaacgaaagatatctgttgtaccgtgagtgggcccaccctaggtcaatctataagaaacaacccctggacttgattcgaaagtactatggcgagaaaatcggtatctacttcgcatggttggggtattacacacaaatgttactgctagcggccgtagtcggagttgcttgttttctgtatggctacctcaaccaggataattgcacgtggtctaaagaggtttgccatcctgacattggaggaaagattatcatgtgcccccagtgcgaccgattgtgtccattttggaaattgaacatcacatgcgagagctctaaaaaactttgtatcttcgacagctttggaactctggtttttgccgtgtttatgggggtgtgggtgactctgttcctggagttctggaagagacggcaggctgagcttgagtacgaatgggacacagtggagctgcagcaagaagagcaggccaggcccgagtatgaagctagatgtacccatgttgtgatcaatgagatcactcaagaagaggagcgcatccctttcaccgcatgggggaagtgcatccggataaccttgtgcgcaagcgcagtctttttctggatactgttaatcattgcatcagtgattgggattatcgtgtatagactgagcgtgtttatcgttttttctgctaagctccccaagaacatcaatggtactgaccccatccagaaatacctgactccacagactgccacttccataacggccagcatcatctccttcatcattattatgattctgaacacaatttacgaaaaagtggcgatcatgattaccaatttcgaacttccccgtacccagacggactacgagaacagcctgacaatgaagatgtttctgttccagttcgtgaattattacagcagctgtttctatattgcttttttcaaaggcaagttcgtggggtatcctggggatcctgtgtattggctcgggaaataccgtaacgaagaatgtgaccccgggggatgtctacttgaactgactacacagctcaccatcattatgggtggtaaagcaatctggaataatattcaggaagtcctgcttccttggatcatgaatctcattgggagattccaccgagtgtccggatcagagaaaataacccctaggtgggagcaggactaccatctccagcctatggggaagctgggcttattttatgagtatttagagatgatcatccaatttggcttcgtcaccttatttgtcgctagttttccactggccccccttttagccctagttaacaacattctggaaatacgcgttgatgcttggaagctcaccacccagtttaggagattggttcccgaaaaagcccaggatattggcgcttggcagccaatcatgcagggcatcgcaatcctagccgttgtgactaatgccatgataattgcttttacttcggacatgattccacgtcttgtttactattggtcctttagtgtgccaccctacggcgaccatacatcctacaccatggagggttatatcaacaatacactgtcaatcttcaaggtcgccgatttcaaaaataaatcgaagggcaacccttatagtgacctcggcaaccacacaacgtgtagatatagggacttcaggtatcctcccggccacccgcaggaatacaagcataacatttactactggcatgtaatcgccgctaagctggcttttattattgtgatggagtatctggcactattgccgagactgggacacagcgggatgattctagctcattgcaacctgcgtctgcctgtggactgttgtatgtgctatcggttcgtcgatgaaatccgtctcctagagcaactaacgagcgactttatcgatagtctttactacattttttctatcagcatcatctcaatttttttctctgtcactttcttttttctactcctgtcccttggccctactccatgtttttctgtgtcaaatttccttagctag

SEQ ID NO: 54438 - DNA, 2790 bp, Artificial Sequence
  derived and/or modified sequence
atgaagaaaatgtctcgcaacgtcctgctgcagatggaagaagaagaagatgacgacgacggcgacattgtgctggagaacctggggcagactatcgttcccgacctggggtcgctggagtctcagcatgactttagaactcctgagtttgaggaatttaatggcaagcccgacagcctgttcttcaatgacggccagagacgaattgacttcgttctcgtctacgaagacgaatcacgaaaagaaaccaataagaagggcaccaatgagaagcagagaagaaagcgtcaggcgtacgaaagcaacctgatctgccacggactccagctggaggccacccgctctgttttagatgataagctcgttttcgtcaaggtgcatgccccttgggaggtgttgtgcacatacgcagagattatgcatataaagctgcccttgaagccaaacgatttgaagaaccgctcgtcggcgtttgggaccctgaattggtttaccaaggtactctccgtcgatgagtcgatcatcaagcccgagcaggaatttttcacggcccctttcgagaaaaacaggatgaacgatttctacattgtggaccgggacgcgttttttaaccccgctaccagatctcgaattgtctatttcatcttgtcaagggtgaaataccaagttataaacaacgtgtccaagtttggcatcaataggcttgtgaattctgggatctacaaggccgcatttcccttgcatgactgcaaattcaggagacaaagcgaggacccatcctgcccgaatgagagatatttgttgtatcgcgagtgggcccaccccaggtccatctacaaaaagcaaccattggatctgatccgcaaatactacggtgagaagatcggcatctactttgcctggctgggttattatacgcagatgctgctgctggctgccgttgttggcgtcgcgtgtttcttgtatggctacctcaatcaggacaactgcacctggagtaaagaggtgtgccatcccgacatcggagggaaaattatcatgtgcccccagtgcgatcgtctgtgccccttttggaaattgaacatcacctgcgagtctagcaaaaagctatgtatctttgactcattcgggacgttggtgttcgccgtttttatgggagtttgggtgaccctttttctcgaattctggaagcgtcgtcaggctgaacttgagtatgagtgggataccgtggaactccagcaggaggaacaagcgagacccgagtacgaagctcggtgtactcacgtagtgatcaacgaaattacacaagaagaggaaagaataccctttaccgcctggggcaaatgcattaggattaccctgtgcgcttcagccgtttttttttggattctgcttatcatcgcatctgttatcggaatcatcgtctacaggctcagtgtgtttatcgttttctcagcaaagctgcccaagaacattaacggcacagatcccatacagaaatacctgacgcctcagacggcgacatctatcacagctagtattatttcattcataataatcatgattttaaacacaatttatgaaaaagtggccatcatgattactaatttcgagctgccgcgaactcaaacggattatgagaattccttgactatgaagatgttccttttccaatttgtgaattactattcctcctgtttctatatcgctttctttaagggcaagttcgtggggtatcccggtgatcctgtttactggctgggtaaatatcgtaatgaggaatgcgaccccggaggttgccttctcgagttgactactcaactcactataatcatggggggtaaagcaatttggaacaatattcaagaggtcctcttaccctggatcatgaatctgattgggaggttccaccgagtgtccgggtcggagaagattaccccgagatgggagcaagattaccatcttcaaccaatgggaaaattaggccttttctacgagtatttagagatgataatacaatttgggtttgttactctctttgtggccagcttcccgctggcccctttgctggcactggtcaacaacattctggaaatccgggtggatgcttggaaactcacgactcaattcaggagacttgtgcccgaaaaggctcaagacattggggcttggcaaccaattatgcaaggcatcgcaatactagcagtggttacaaacgccatgatcatcgccttcacaagtgacatgatcccaaggctggtgtactattggtcttttagtgtgcccccatatggagaccacacaagctacacaatggaggggtatatcaacaacactttgtctatctttaaggtggccgactttaaaaataagagcaaaggaaatccctactcagacctgggcaatcataccacatgtcggtatagggatttcaggtatccccctggccatccccaggagtacaagcacaacatctattattggcacgtcatcgctgctaagctggcattcataatcgtgatggaatatctggcgctgctgccaaggttggggcactcaggaatgattctcgcgcattgtaacctgaggctacccgtggattgctgtatgtgttaccgatttgtcgatgagatccgtctgcttgagcagctgaccagcgacttcatagattccctatactacatcttctcgatatcgatcatctcaatcttttttagtgtcaccttcttttttctcctactgtccctaggccctacgccttgtttttccgtatcaaattttttgtcttag

SEQ ID NO: 54439 - DNA, 2790 bp, Artificial Sequence
  derived and/or modified sequence
atgaaaaagatgtcccggaacgtgctgttacagatggaggaagaggaagatgacgacgatggtgatattgtcctagagaacctcgggcagacaatcgttccggacttggggagtcttgaaagccagcatgactttcgcactcccgaatttgaggagttcaacggtaagcccgattcactcttttttaacgacggccaaaggcgtatcgattttgtgttagtgtatgaagacgaatcacgcaaagaaactaataaaaaggggaccaacgaaaagcagcggagaaaacggcaagcctacgagtccaatctaatttgccacgggctccagctcgaggctacccgatccgtcctggacgacaagcttgtcttcgtcaaggtacacgctccttgggaggtgctgtgcacatatgccgagattatgcacatcaaattacccctgaagcccaacgacctcaagaatagatcttcagccttcgggacacttaattggttcacaaaggtcttgtccgttgatgaatcgatcattaagcccgagcaagagttctttacggctcctttcgaaaaaaatcgcatgaacgatttctatatcgtggatagggatgcgttctttaatcctgcgacccgttccaggatcgtatacttcattctgtcacgggtgaagtaccaagtgataaacaatgtctccaaatttggaattaaccgcctggtcaactccggaatctacaaagcggcattccctctgcacgattgtaaatttaggaggcagagcgaggatccttcttgtccaaatgaacggtacttgttataccgcgaatgggctcatcccagaagtatttataagaaacagcctctcgatttgatacggaagtactacggggaaaagataggtatttacttcgcatggttaggctattatacacagatgttacttcttgccgctgttgttggcgttgcatgcttcctttatggttacctgaatcaagataattgcacttggtctaaagaagtgtgtcacccagacattggaggtaaaattataatgtgcccccagtgtgacagactctgtccgttctggaagctgaatattacgtgtgagagctcaaaaaagttatgtatctttgactcattcggcactttagtcttcgcggtgttcatgggcgtgtgggtcaccctgttcttagaattttggaagcgccgtcaagcagagctggagtacgagtgggataccgttgaattgcaacaagaggaacaggcacgcccagaatatgaggccagatgtacacatgtagtgataaatgaaatcacccaggaagaagagcggatccccttcactgcgtggggaaagtgtattcggattaccctgtgtgcttctgctgtctttttttggattctcctaatcattgcttcagtgatcggcataattgtgtaccggctgtcagtgttcattgtatttagtgccaagcttcccaaaaatatcaatggtaccgaccccatccaaaagtatcttacgccccagacagctacgagcatcaccgctagcatcatctctttcatcatcatcatgatactcaatactatttatgagaaggtcgcaataatgattactaacttcgaactgcctcgcacacaaactgactacgaaaattccctgactatgaagatgtttttgttccagtttgtaaattactatagttcatgtttttacattgccttctttaagggaaagtttgtcggatacccaggcgaccctgtttattggttggggaagtatcgtaatgaagagtgcgatcctggcggttgcctgctggagttgacaactcagctgacgattattatggggggtaaggctatctggaacaatatacaggaggtactgctgccttggattatgaatctgattggacgatttcatagggtttctggctcagagaagattactcccagatgggagcaagattatcatctgcaacctatgggcaagctgggcctgttctatgaatatctggagatgattattcagtttggcttcgtgacgctcttcgtcgctagcttccctctcgctcccctgctggcactggtcaacaatattctcgagatacgcgtagatgcttggaagctgactacccagtttaggcgtttggtacctgagaaggcccaggatatcggggcttggcagcccatcatgcagggaattgcaattctggctgttgtcactaatgcgatgatcatcgccttcacctccgacatgattccacggctggtgtactattggtcttttagcgttccgccttatggagatcacaccagctatactatggaaggctacatcaataacaccctgagtatatttaaggttgcagattttaaaaataagagtaagggtaatccctattctgacttgggcaaccatacaacgtgccggtatcgcgatttccgttaccctcctggacacccacaggaatataaacacaacatctattactggcatgtgatcgcagccaagttggctttcataatcgtgatggagtacctggctttactccccaggctaggacactccgggatgattctagcccattgcaatctgagactgcccgtggactgttgcatgtgctacagatttgtggatgagatccggctcctggagcaacttacatcagatttcatcgacagtctgtattatatattctcgatttctatcatttcaattttcttcagcgtgacatttttcttcttgctgcttagcctgggacctaccccttgcttctccgtgtcgaatttcctgagttag

SEQ ID NO: 54440 - DNA, 3558 bp, Artificial Sequence
  derived and/or modified sequence
cttctgcgcgcctcgtaaaaccggggaagttcaatcattccgcagcgagccgcggcggccgcactgggcatgctcagtctccgggctccgctcggcaggcgagaggcgtcctccggctctgggctccggtcggtgggtgcctcggctcggctttccccggcgctggctgggctcagcggcccctgagcccaagcgacacacgccccgcggtccccgatccggcccctgggagagccgcgccgttctggaacccgggagcccccaacttcgcgccaagttcggagccgccttctgagggagacatgaaaaagatgagcaggaatgttttgctacaaatggaggaggaggaggacgacgacgatggggatatcgtgttggaaaaccttggacagacaattgtccccgatttgggatcactggaaagtcagcatgattttcgaaccccggagtttgaagaatttaatggaaaacctgactccctcttttttaatgatggccagcgaagaattgactttgttctagtatatgaggatgaaagcagaaaagagaccaataaaaagggtacaaatgaaaaacaaaggaggaaaagacaagcatacgaatctaaccttatctgtcatggcctgcagttagaagcaacaagatcagtattggatgacaagcttgtatttgtaaaagtacacgcaccatgggaggtgttatgtacgtatgctgagataatgcacatcaaattgcctctgaaacccaatgatctgaaaaaccggtcctcagcctttggtacactcaactggtttaccaaagtcctcagtgtagacgaaagcatcatcaagccagagcaagagtttttcactgccccatttgagaagaaccggatgaatgatttttacatagttgatagagatgctttcttcaatccagccaccagaagccgcattgtttacttcatcctctctcgggtcaagtatcaagtgataaacaatgttagcaagtttgggatcaacagacttgtaaactctgggatctacaaggcagctttcccactccatgattgcaaattccgccgtcagtcagaggatcccagctgccctaatgaacggtaccttctgtacagagaatgggctcatcctcgaagcatatacaaaaagcagcccttggatcttatcaggaaatactatggagagaagattggaatctactttgcttggctgggctattacactcagatgcttctcctggccgcagttgtaggagtggcttgctttctctatggatatcttaatcaagataactgtacatggagcaaagaagtttgtcatcctgatattggtggcaagatcataatgtgtcctcagtgtgataggctttgtccattctggaaactcaatattacttgcgagtcctcaaagaaattgtgcatcttcgacagttttggaaccctggtctttgcagtatttatgggagtatgggttaccttgtttttggagttttggaagcgacgccaggcagaacttgagtatgaatgggatactgttgagttacagcaggaagaacaagcccgaccagaatacgaagcacgatgtactcacgtagtgataaatgagattactcaggaagaagaacgcattccctttactgcctggggaaaatgtatacggataaccctctgtgccagtgctgtctttttctggatcctattgatcatcgcttcagttattgggatcattgtctataggctctcggtgttcattgtattttctgcaaaacttcccaagaacattaatggaacagacccaatccagaaatacctgactccacagacagccacgtccatcacggcctccatcatcagctttataattatcatgattctgaacaccatatatgaaaaagtggcaattatgattactaacttcgaactcccaaggacccagactgattatgagaacagcctcaccatgaagatgttcttattccagtttgtcaactactactcttcatgcttctacatagcattctttaagggcaaatttgtaggctatccaggagacccagtttattggttgggaaaatacagaaatgaagagtgtgacccaggtggctgtcttcttgaactgacaactcagctgacaataatcatgggaggaaaagcaatctggaataacatacaagaagtattattgccctggatcatgaatctaattgggcgatttcacagagtttctggatcagaaaagataaccccacgatgggaacaggactaccatctgcagcctatgggcaaactgggattattttatgaatatcttgaaatgattattcagtttgggttcgtcaccttatttgtggcctcttttccactggcccctctgttggctctcgtgaacaatatattggaaataagagtggacgcatggaaactgaccacccagtttagacgcctggtaccagagaaagcccaagacattggagcatggcagcccatcatgcaaggaatagcaattctggctgtggtgaccaatgccatgatcatagctttcacgtcggacatgatcccccgcctagtgtactactggtccttctccgtccctccctacggggaccacacttcctacaccatggaagggtacatcaacaacactctctccatcttcaaagtcgcagacttcaaaaacaaaagcaagggaaacccgtactctgacctgggtaaccataccacatgcaggtatcgtgatttccgatacccacctggacacccccaggagtataaacacaacatctactattggcatgtgattgcagccaagctggcttttatcattgtcatggagtatctcgctttgttgcccaggctgggacacagtggcatgatcttggctcactgcaacctccgcctcccagttgactgctgtatgtgttataggtttgtcgatgaaattagacttttggaacaactaacttctgactttattgactccctctattatatattttctatttcaataatatctattttcttttctgttactttctttttccttctactttctttggggccaactccgtgtttttctgtatcgaatttcttaagttagatttattcaataattcattcaacaaatatttgtgtgtctattatgtggccagcattgtttcatgtgctcaagatagagtagcattgtttggctcattaatattccaatactggcatttaagaccattaattttcctctaaatcgtatttgagctgcaacccacaagcttttatatgtatagttttttgttgttgctattattaaaagtattttagatcctcccttgttttgcttttcaatctgaaatgccttcatgccattttaatttttaaaaggtaatttaattgagcctaatttctttttcttttttcttttttttgagacagagtcttactctgtcacccaggctggagtgcagtggcgtgatctcagctcaatgcaagctctgcctcccaggttcacgccattctcctgtctcagcctcccaagtagctgggactacaggcgcccaccaccatgcctggct

SEQ ID NO: 54441 - DNA, 3448 bp, Artificial Sequence
  derived and/or modified sequence
tcagtctccgggctccgctcggcaggcgagaggcgtcctccggctctgggctccggtcggtgggtgcctcggctcggctttccccggcgctggctgggctcagcggcccctgagcccaagcgacacacgccccgcggtccccgatccgcccccaacttcgcgccaagttcggagccgccttctgagggagacatgaaaaagatgagcaggaatgttttgctacaaatggaggaggaggaggacgacgacgatggggatatcgtgttggaaaaccttggacagacaattgtccccgatttgggatcactggaaagtcagcatgattttcgaaccccggagtttgaagaatttaatggaaaacctgactccctcttttttaatgatggccagcgaagaattgactttgttctagtatatgaggatgaaagcagaaaagagaccaataaaaagggtacaaatgaaaaacaaaggaggaaaagacaagcatacgaatctaaccttatctgtcatggcctgcagttagaagcaacaagatcagtattggatgacaagcttgtatttgtaaaagtacacgcaccatgggaggtgttatgtacgtatgctgagataatgcacatcaaattgcctctgaaacccaatgatctgaaaaaccggtcctcagcctttggtacactcaactggtttaccaaagtcctcagtgtagacgaaagcatcatcaagccagagcaagagtttttcactgccccatttgagaagaaccggatgaatgatttttacatagttgatagagatgctttcttcaatccagccaccagaagccgcattgtttacttcatcctctctcgggtcaagtatcaagtgataaacaatgttagcaagtttgggatcaacagacttgtaaactctgggatctacaaggcagctttcccactccatgattgcaaattccgccgtcagtcagaggatcccagctgccctaatgaacggtaccttctgtacagagaatgggctcatcctcgaagcatatacaaaaagcagcccttggatcttatcaggaaatactatggagagaagattggaatctactttgcttggctgggctattacactcagatgcttctcctggccgcagttgtaggagtggcttgctttctctatggatatcttaatcaagataactgtacatggagcaaagaagtttgtcatcctgatattggtggcaagatcataatgtgtcctcagtgtgataggctttgtccattctggaaactcaatattacttgcgagtcctcaaagaaattgtgcatcttcgacagttttggaaccctggtctttgcagtatttatgggagtatgggttaccttgtttttggagttttggaagcgacgccaggcagaacttgagtatgaatgggatactgttgagttacagcaggaagaacaagcccgaccagaatacgaagcacgatgtactcacgtagtgataaatgagattactcaggaagaagaacgcattccctttactgcctggggaaaatgtatacggataaccctctgtgccagtgctgtctttttctggatcctattgatcatcgcttcagttattgggatcattgtctataggctctcggtgttcattgtattttctgcaaaacttcccaagaacattaatggaacagacccaatccagaaatacctgactccacagacagccacgtccatcacggcctccatcatcagctttataattatcatgattctgaacaccatatatgaaaaagtggcaattatgattactaacttcgaactcccaaggacccagactgattatgagaacagcctcaccatgaagatgttcttattccagtttgtcaactactactcttcatgcttctacatagcattctttaagggcaaatttgtaggctatccaggagacccagtttattggttgggaaaatacagaaatgaagagtgtgacccaggtggctgtcttcttgaactgacaactcagctgacaataatcatgggaggaaaagcaatctggaataacatacaagaagtattattgccctggatcatgaatctaattgggcgatttcacagagtttctggatcagaaaagataaccccacgatgggaacaggactaccatctgcagcctatgggcaaactgggattattttatgaatatcttgaaatgattattcagtttgggttcgtcaccttatttgtggcctcttttccactggcccctctgttggctctcgtgaacaatatattggaaataagagtggacgcatggaaactgaccacccagtttagacgcctggtaccagagaaagcccaagacattggagcatggcagcccatcatgcaaggaatagcaattctggctgtggtgaccaatgccatgatcatagctttcacgtcggacatgatcccccgcctagtgtactactggtccttctccgtccctccctacggggaccacacttcctacaccatggaagggtacatcaacaacactctctccatcttcaaagtcgcagacttcaaaaacaaaagcaagggaaacccgtactctgacctgggtaaccataccacatgcaggtatcgtgatttccgatacccacctggacacccccaggagtataaacacaacatctactattggcatgtgattgcagccaagctggcttttatcattgtcatggagtatctcgctttgttgcccaggctgggacacagtggcatgatcttggctcactgcaacctccgcctcccagttgactgctgtatgtgttataggtttgtcgatgaaattagacttttggaacaactaacttctgactttattgactccctctattatatattttctatttcaataatatctattttcttttctgttactttctttttccttctactttctttggggccaactccgtgtttttctgtatcgaatttcttaagttagatttattcaataattcattcaacaaatatttgtgtgtctattatgtggccagcattgtttcatgtgctcaagatagagtagcattgtttggctcattaatattccaatactggcatttaagaccattaattttcctctaaatcgtatttgagctgcaacccacaagcttttatatgtatagttttttgttgttgctattattaaaagtattttagatcctcccttgttttgcttttcaatctgaaatgccttcatgccattttaatttttaaaaggtaatttaattgagcctaatttctttttcttttttcttttttttgagacagagtcttactctgtcacccaggctggagtgcagtggcgtgatctcagctcaatgcaagctctgcctcccaggttcacgccattctcctgtctcagcctcccaagtagctgggactacaggcgcccaccaccatgcctggct

SEQ ID NO: 54442 - DNA, 2790 bp, Artificial Sequence
  derived and/or modified sequence
atgaagaagatgagcagaaacgtgctgctgcagatggaggaggaggaggacgacgacgacggcgacatcgtgctggagaacctgggccagaccatcgtgcccgacctgggcagcctggagagccagcacgacttcagaacccccgagttcgaggagttcaacggcaagcccgacagcctgttcttcaacgacggccagagaagaatcgacttcgtgctggtgtacgaggacgagagcagaaaggagaccaacaagaagggcaccaacgagaagcagagaagaaagagacaggcctacgagagcaacctgatctgccacggcctgcagctggaggccaccagaagcgtgctggacgacaagctggtgttcgtgaaggtgcacgccccctgggaggtgctgtgcacctacgccgagatcatgcacatcaagctgcccctgaagcccaacgacctgaagaacagaagcagcgccttcggcaccctgaactggttcaccaaggtgctgagcgtggacgagagcatcatcaagcccgagcaggagttcttcaccgcccccttcgagaagaacagaatgaacgacttctacatcgtggacagagacgccttcttcaaccccgccaccagaagcagaatcgtgtacttcatcctgagcagagtgaagtaccaggtgatcaacaacgtgagcaagttcggcatcaacagactggtgaacagcggcatctacaaggccgccttccccctgcacgactgcaagttcagaagacagagcgaggaccccagctgccccaacgagagatacctgctgtacagagagtgggcccaccccagaagcatctacaagaagcagcccctggacctgatcagaaagtactacggcgagaagatcggcatctacttcgcctggctgggctactacacccagatgctgctgctggccgccgtggtgggcgtggcctgcttcctgtacggctacctgaaccaggacaactgcacctggagcaaggaggtgtgccaccccgacatcggcggcaagatcatcatgtgcccccagtgcgacagactgtgccccttctggaagctgaacatcacctgcgagagcagcaagaagctgtgcatcttcgacagcttcggcaccctggtgttcgccgtgttcatgggcgtgtgggtgaccctgttcctggagttctggaagagaagacaggccgagctggagtacgagtgggacaccgtggagctgcagcaggaggagcaggccagacccgagtacgaggccagatgcacccacgtggtgatcaacgagatcacccaggaggaggagagaatccccttcaccgcctggggcaagtgcatcagaatcaccctgtgcgccagcgccgtgttcttctggatcctgctgatcatcgccagcgtgatcggcatcatcgtgtacagactgagcgtgttcatcgtgttcagcgccaagctgcccaagaacatcaacggcaccgaccccatccagaagtacctgaccccccagaccgccaccagcatcaccgccagcatcatcagcttcatcatcatcatgatcctgaacaccatctacgagaaggtggccatcatgatcaccaacttcgagctgcccagaacccagaccgactacgagaacagcctgaccatgaagatgttcctgttccagttcgtgaactactacagcagctgcttctacatcgccttcttcaagggcaagttcgtgggctaccccggcgaccccgtgtactggctgggcaagtacagaaacgaggagtgcgaccccggcggctgcctgctggagctgaccacccagctgaccatcatcatgggcggcaaggccatctggaacaacatccaggaggtgctgctgccctggatcatgaacctgatcggcagattccacagagtgagcggcagcgagaagatcacccccagatgggagcaggactaccacctgcagcccatgggcaagctgggcctgttctacgagtacctggagatgatcatccagttcggcttcgtgaccctgttcgtggccagcttccccctggcccccctgctggccctggtgaacaacatcctggagatcagagtggacgcctggaagctgaccacccagttcagaagactggtgcccgagaaggcccaggacatcggcgcctggcagcccatcatgcagggcatcgccatcctggccgtggtgaccaacgccatgatcatcgccttcaccagcgacatgatccccagactggtgtactactggagcttcagcgtgcccccctacggcgaccacaccagctacaccatggagggctacatcaacaacaccctgagcatcttcaaggtggccgacttcaagaacaagagcaagggcaacccctacagcgacctgggcaaccacaccacctgcagatacagagacttcagatacccccccggccacccccaggagtacaagcacaacatctactactggcacgtgatcgccgccaagctggccttcatcatcgtgatggagtacctggccctgctgcccagactgggccacagcggcatgatcctggcccactgcaacctgagactgcccgtggactgctgcatgtgctacagattcgtggacgagatcagactgctggagcagctgaccagcgacttcatcgacagcctgtactacatcttcagcatcagcatcatcagcatcttcttcagcgtgaccttcttcttcctgctgctgagcctgggccccaccccctgcttcagcgtgagcaacttcctgagctag

SEQ ID NO: 54443 - protein, 440 aa, Artificial Sequence
  derived and/or modified sequence
MGSRGQGSHSKKTRSMPVILSPQRTGSGATGGPAARAYSVAEAVKQFRAGPAGTGAGCSLQGCWAAPRPFEHRTNKLRELSTLAHCSRELQTQVPDASAHSLAVTLSELHSCRDLQDECLDSRFAEGPRRLLPPYHSLINNFVKPEKLTKVETRLKEKIVAEMTDLNKHIKQAQTQRKQLLEESRELHREKLLVQAENRFFLEYLTNKTEEYTEQPEKVWNSYLQKSGEIERRRQESASRYAEQISVLKTALLQKENIQSSLKRKLQAMRDIAILKEKQEKEIQTLQEETKKVQAETASKTREVQAQLLQEKRLLEKQLSEPDRRLLGKRKRRELNMKAQALKLAAKRFIFEYSCGINRENQQFKKELLQLIEQAQKLTATQSHLENRKQQLQQEQWYLESLIQARQRLQGSHNQCLNRQDVPKTTPSLPQGTKSRINPK

SEQ ID NO: 54444 - DNA, 1323 bp, Artificial Sequence
  derived and/or modified sequence
atgggcagcagaggccagggcagccacagcaagaagaccagaagcatgcccgtgatcctgagcccccagagaaccggcagcggcgccaccggcggccccgccgccagagcctacagcgtggccgaggccgtgaagcagttcagagccggccccgccggcaccggcgccggctgcagcctgcagggctgctgggccgcccccagacccttcgagcacagaaccaacaagctgagagagctgagcaccctggcccactgcagcagagagctgcagacccaggtgcccgacgccagcgcccacagcctggccgtgaccctgagcgagctgcacagctgcagagacctgcaggacgagtgcctggacagcagattcgccgagggccccagaagactgctgcccccctaccacagcctgatcaacaacttcgtgaagcccgagaagctgaccaaggtggagaccagactgaaggagaagatcgtggccgagatgaccgacctgaacaagcacatcaagcaggcccagacccagagaaagcagctgctggaggagagcagagagctgcacagagagaagctgctggtgcaggccgagaacagattcttcctggagtacctgaccaacaagaccgaggagtacaccgagcagcccgagaaggtgtggaacagctacctgcagaagagcggcgagatcgagagaagaagacaggagagcgccagcagatacgccgagcagatcagcgtgctgaagaccgccctgctgcagaaggagaacatccagagcagcctgaagagaaagctgcaggccatgagagacatcgccatcctgaaggagaagcaggagaaggagatccagaccctgcaggaggagaccaagaaggtgcaggccgagaccgccagcaagaccagagaggtgcaggcccagctgctgcaggagaagagactgctggagaagcagctgagcgagcccgacagaagactgctgggcaagagaaagagaagagagctgaacatgaaggcccaggccctgaagctggccgccaagagattcatcttcgagtacagctgcggcatcaacagagagaaccagcagttcaagaaggagctgctgcagctgatcgagcaggcccagaagctgaccgccacccagagccacctggagaacagaaagcagcagctgcagcaggagcagtggtacctggagagcctgatccaggccagacagagactgcagggcagccacaaccagtgcctgaacagacaggacgtgcccaagaccacccccagcctgccccagggcaccaagagcagaatcaaccccaagtag

SEQ ID NO: 54445 - DNA, 2342 bp, Artificial Sequence
  derived and/or modified sequence
agagaaacttccgcaatgttctgggctgcgaacgaaaaccaccacagcgtcagaaaggagcgggtttgctgagggccccagaaggctccttccaccgtatcatagtctaataaataattttgtcaagccagagaagctaacaaaggtagagacaaggcttaaagaaaagatagtggcggaaatgacggatctgaacaagcatataaaacaagctcaaacccagcggaaacagctactggaggaatccagggagctacaccgagaaaagttacttgtccaggctgaaaacagattctttctggaatacctgactaacaaaactgaagagtacacagagcaacctgagaaggtatggaacagctatttacaaaaaagtggagagattgaacgaagaagacaagaatcagcctccagatatgcagaacaaatttcagtgcttaaaacagcgctcttgcaaaaggaaaatatccaatccagtttgaagcggaagttgcaggcaatgagggacattgctatattaaaggaaaagcaggagaaagaaatacagacattacaggaggagacaaagaaagtccaagctgagacagcttcaaagacacgggaagtacaggcccagctcctccaggagaaaagattactggagaaacaactgagcgagccagacaggaggctactgggaaagagaaaaagaagagagcttaatatgaaggcccaggccttgaagttggcagcaaagcggtttatttttgaatactcctgtggcatcaacagagagaaccagcagttcaagaaggaattactgcagctaattgagcaagcccagaaactaacggctactcaaagccacttagaaaacaggaagcagcagctgcagcaggaacagtggtatctggagtccttaatccaggcgaggcagagactgcaaggaagtcataatcagtgcctaaatagacaggatgttccaaagaccacacccagtcttccccaaggcaccaaatcaaggattaatccaaagtaacttctaaaataacactgattaaataagaactggagcaagtactcttaagtgctacattaacctggttagaaaggctgttggattccagattgctattgtaaaatctccatcatgatgtgttggagtgaaggattagatggttttatccaacagtcctactagatatttggtaaccagcttcccttaactagctttttctttaaatactcgttaataagctattccacaaacctccagttaacctaacacatgaccctaacctagccatttaccatacatcaaactagctaaaggaaaccaacctaaggaagtgaaaacagttgtgatttatttcatctagctaaattgtatttctttatagagaaagtacctttaaggatagcattccaaatagactttgaatagcgttctgccagtttatcctcattccttttgaccaacttagcagacaaaagcagtttttacaagctctttgtgagtttgtgccagtgaccaggtagctccttctagttttctcatgagtgaaaaagcattctgataacagcaagtccagtaagtgctaggcagagtgacctttcatctgatgctaagcccctacaagtttgagaaggtaagaaaagatgaaggagacatatattaggtcagctcttacttttgaaaatgttttatttgaagaaacacctgtagcattgaggtgactgaatgcctccacttatttcaggaaaacgtatccaaaaaaagttgaaatatttggacaactttttttttaagtgccatcgatttccctagcagcattctaaaagatagcaagtaaaatgatgtttgttatcctaaatgctttagttttaggtcatttattaattttcttacaggtgcactttctagtacatgaagtatcctttgtaattaatgtgtgccatatgtttattcccatttagtataactataaattatattttaaattatatatttttaggatagttatattttttttgggttctacgacattgaagttggactagtgatttatttgaatgctgaatcctagtataggggaatataatcttatattttaacaggggtcctctatgggaaaataggatgaactttgtttcccagaaattgttaagtgatgaaaaacttcaaaataattttcctgcattttctgctttatttacatgtaaagtgaattccctgaaaattggatttaaaaagcattctccttcaatgtgcctttaccttgtagctttaacaacttttctgttaaatatgtagttttttattaaacaatgttattaaataaaaacatttatccactgatttt

SEQ ID NO: 54446 - DNA, 1472 bp, Artificial Sequence
  derived and/or modified sequence
ggcgaggaagtgggggcgctgagcaagcgagaggaaggctgaagggagctaggaaaagggcgctgatctctgcagcctgggagggcttttgtctcccggaggaaggccagaagagatggggtcccgagggcagggctcacacagcaagaaaacgaggagcatgcctgtcattttgagcccacagagaacggggagcggagccactggaggaccggctgctcgggcttattcggtagccgaggcggttaaacagttcagggctggaccagccgggactggagcagggtgcagtctccagggttgctgggcagcaccgagaccctttgagcaccgaacgaataaactacgggagctttccacacttgcacattgttcccgcgagttgcagacgcaggttcctgatgctagcgctcattccttggcagtcaccctcagtgaactacacagttgccgtgaccttcaggatgaatgcttggattccaggtttgctgagggccccagaaggctccttccaccgtatcatagtctaataaataattttgtcaagccagagaagctaacaaaggtagagacaaggcttaaagaaaagatagtggcggaaatgacggatctgaacaagcatataaaacaagctcaaacccagcggaaacagctactggaggaatccagggagctacaccgagaaaagttacttgtccaggctgaaaacagattctttctggaatacctgactaacaaaactgaagagtacacagagcaacctgagaaggtatggaacagctatttacaaaaaagtggagagattgaacgaagaagacaagaatcagcctccagatatgcagaacaaatttcagtgcttaaaacagcgctcttgcaaaaggaaaatatccaatccagtttgaagcggaagttgcaggcaatgagggacattgctatattaaaggaaaagcaggagaaagaaatacagacattacaggaggagacaaagaaagtccaagctgagacagcttcaaagacacgggaagtacaggcccagctcctccaggagaaaagattactggagaaacaactgagcgagccagacaggaggctactgggaaagagaaaaagaagagagcttaatatgaaggcccaggccttgaagttggcagcaaagcggtttatttttgaatactcctgtggcatcaacagagagaaccagcagttcaagaaggaattactgcagctaattgagcaagcccagaaactaacggctactcaaagccacttagaaaacaggaagcagcagctgcagcaggaacagtggtatctggagtccttaatccaggcgaggcagagactgcaaggaagtcataatcagtgcctaaatagacaggatgttccaaagaccacacccagtcttccccaaggcaccaaatcaaggattaatccaaagtaacttctaaaataacactgattaaataagaactgga

SEQ ID NO: 54447 - DNA, 1323 bp, Artificial Sequence
  derived and/or modified sequence
atgggcagtaggggccaaggaagccattccaagaaaacacgctccatgcccgttatcctctccccccagcggacaggcagcggggcgacagggggaccagcagcccgggcctacagtgttgcggaggccgtcaagcagtttcgggctggacctgctgggacaggcgcgggatgtagcctacaaggatgctgggctgccccaaggcctttcgagcacaggaccaacaagctgagagaactaagcacgttggcgcactgcagccgagaactccagacccaagtccctgacgcatcggctcactccctggcagtaaccctttctgaactccattcttgccgggatttgcaggacgaatgtctcgatagtagatttgccgaaggaccgagaagattgcttcctccataccactcccttatcaataacttcgtcaagcccgaaaaattaacaaaagtggagacgcgcctgaaggagaaaatagtagccgaaatgacagacttaaacaaacatatcaagcaggcccagacccaaaggaaacagctcctggaggaaagtcgggagcttcacagagagaaacttttggtgcaagccgaaaatagatttttcctggagtacttaacaaataagacggaagaatatactgagcagccggagaaagtctggaacagttatctgcaaaagagcggagaaattgaacggcggaggcaagagtcagcttcccggtacgccgaacagattagtgtcctgaaaactgcactgctgcagaaggagaatatccaaagctctctcaaaagaaagctccaggcaatgcgggatatagcaattctcaaggagaaacaggaaaaagagatccagaccctgcaggaggaaaccaaaaaggtgcaggccgagactgcgagcaaaacgcgcgaagtgcaggctcaactcctgcaggagaaacgactattagagaagcagctgagtgagcctgaccgcagattactcggtaaaagaaagcggagggaactcaacatgaaagcacaagcgctcaagctggcagctaagagattcattttcgagtattcctgcggaataaatagggagaatcagcaatttaagaaagaacttttgcaactgatcgagcaggcccagaagcttacggcaacacaatcgcatctggaaaaccgcaaacagcagctccagcaggagcaatggtacctcgaatcgctgatccaggccaggcagcgcttgcagggcagccacaaccagtgtctcaacagacaagacgttccgaagactactccgtcactacctcagggtacaaagtctcgaatcaatccaaagtag

SEQ ID NO: 54448 - DNA, 1323 bp, Artificial Sequence
  derived and/or modified sequence
atgggcagccggggccagggcagccacagcaagaagaccaggtccatgcctgtgatcctgagcccccagaggactggaagtggggccaccggcggccctgctgcccgggcctacagcgtggccgaggccgtgaagcagttccgggccggccctgctggcaccggggccggctgcagcctgcagggctgctgggccgccccccggccctttgagcacaggaccaacaagctgcgggagctgagcaccctggcccactgcagccgggagctgcagacccaggtgcctgatgccagcgcccacagcctggccgtgaccctgtctgagctgcacagctgccgggacctgcaggatgagtgcctggacagcagatttgctgagggcccccggcggctgctgcccccctaccacagcctcatcaacaactttgtgaagccagagaagctgaccaaggtggagacccggctgaaggagaagatcgtggccgagatgacagacctgaacaagcacatcaagcaggcccagacccagaggaagcagctgctggaggagagccgggagctgcaccgggagaagctgctggtgcaggctgaaaatcgcttcttcctggagtacctgaccaacaagacagaggagtacacagagcagcctgagaaggtgtggaacagctacctgcagaagtctggagaaattgaaagaagacggcaggagagcgccagccgctatgcagagcagatctctgtgctgaagacagccctgctgcagaaggagaacatccagagcagcctgaagaggaagctgcaggccatgagggacatcgccatcctgaaggagaagcaggagaaggagatccagaccctgcaggaggagaccaagaaggtgcaggccgagacagccagcaagacccgggaggtgcaggcccagctgctgcaggagaagaggctgctggagaagcagctgtctgagccagaccggcggctgctgggcaagaggaagaggcgggagctgaacatgaaggcccaggccctgaagctggccgccaagcgcttcatctttgagtacagctgtggcatcaaccgggagaaccagcagttcaagaaggagctgctgcagctgattgagcaggcccagaagctgacagccacccagagccacctggagaacaggaagcagcagctgcagcaggagcagtggtacctggagagcctcatccaggcccggcagaggctgcagggcagccacaaccagtgcctgaaccggcaggatgtgcccaagaccacccccagcctgccccagggcaccaagagccgcatcaaccccaagtag

SEQ ID NO: 54449 - DNA, 1323 bp, Artificial Sequence
  derived and/or modified sequence
atgggcagccggggccagggcagccacagcaagaagacccggagcatgcccgtcatcttgagtccccagagaacaggatctggcgccaccgggggacctgcagcccgagcatacagtgtagcagaggctgttaaacagtttcgggctggaccggccggcaccggcgctgggtgttctttgcaggggtgctgggctgcccctaggcccttcgagcacaggacaaacaaattgcgcgaactatccacactggcccactgcagccgcgagctccaaacccaggttccggacgcctctgcacatagcctggccgttacacttagtgagctacacagttgccgggatctgcaggatgagtgcttggactccagattcgctgagggccccaggagattactgcctccctatcactctttaatcaataactttgttaagcccgagaaactcactaaagttgaaactcggcttaaagagaagatcgtcgccgagatgaccgatcttaataagcatatcaagcaggctcaaacccagcgcaagcaactgctggaagaaagccgtgagctccaccgcgaaaaactcctggtgcaggccgagaaccgcttttttctggagtatttgaccaacaaaaccgaggaatacacagaacagccggaaaaggtgtggaacagctaccttcaaaagtctggcgagatcgaacggcgaaggcaggagagcgcctctaggtacgcagagcagatcagcgtgttgaagacagctttactccagaaagaaaacatccagagcagcctcaagaggaagctccaggctatgcgggacatcgcgatcttaaaagaaaaacaggagaaggagattcagaccctccaggaagagaccaaaaaagtccaagcagagacagcttctaaaacaagggaagtccaagcccagctgctgcaggagaagagactgttagagaagcagttgagcgaacctgatcggcggctgctaggcaagcgcaaacgcagggagctaaacatgaaggctcaggccctcaaacttgccgcgaagagattcatctttgagtacagttgtggcatcaatcgtgaaaatcagcagttcaagaaagaactcttgcagcttatcgagcaggcccagaaattgactgccacccagagtcacctcgaaaacagaaagcagcagctccagcaagaacaatggtatcttgaatcactcattcaggcgcggcagcgcttgcaaggctcacataaccaatgcctaaacagacaggatgtgcctaagaccaccccaagcctcccacaaggcaccaaatccagaatcaatcccaagtag

SEQ ID NO: 54450 - DNA, 1323 bp, Artificial Sequence
  derived and/or modified sequence
atggggtcccgtggacagggctcacactcgaagaaaacaaggagcatgcctgtgattttatctccacagcgcaccggatcaggggctaccgggggtccagccgctagggcttactctgtggctgaagccgtcaaacagtttagggctggacctgccggaaccggcgctggatgcagcctccagggctgttgggcagcccctagaccctttgagcaccgaaccaacaaactgcgcgagttgagtactctagcacactgcagccgcgagctgcagactcaagtgccagatgcctcggctcactccctggctgtcactttgagcgagctgcattcctgtcgggacctgcaggacgaatgcctggacagccgattcgccgagggccctcgcagactgttgcccccataccatagcctgatcaataattttgtaaaacccgaaaagctaactaaagttgagactcgtctcaaggaaaagatagtcgccgagatgactgatttgaataagcatatcaaacaagcccaaacacaaaggaaacagcttctggaagaatctcgggaactacatagagagaagttgctggtgcaggccgaaaataggtttttccttgaatacttgaccaataagactgaagagtataccgagcagcctgaaaaggtctggaattcctaccttcagaaatcaggcgagatcgagcgcagaaggcaggaatctgccagccgttatgcggagcagatctctgtcctaaaaaccgccctcctgcaaaaagagaacattcaatcttcactgaaaagaaaactgcaagcaatgagggacatcgctattctgaaagagaaacaggagaaggagatacagactctacaggaggaaacaaaaaaagtgcaagcagaaacagccagtaagacccgcgaggtccaggcccagctcctccaggagaaaagactgctcgaaaaacagttgtcagaaccagatcggagacttctcggcaaacgcaagcggagggagctgaacatgaaagcacaggccctaaagctcgccgctaaacggtttatctttgaatactcttgcggcatcaacagagagaaccagcagttcaagaaggagctcctgcaactgatcgagcaggcccagaagcttaccgctactcagtcccacctcgagaatcggaaacagcagctgcagcaggaacagtggtacctggagagtctgatccaagccagacaacgactccagggatcgcacaatcaatgccttaatcggcaggacgtccctaagaccacaccgtccctgcctcagggcacgaaaagcagaatcaacccaaaatag

SEQ ID NO: 54451 - DNA, 2010 bp, Artificial Sequence
  derived and/or modified sequence
atggagaagtgcagcgtgggcggcctggagctgaccgagcagacccccgccctgctgggcaacatggccatggccaccagcctgatggacatcggcgacagcttcggccaccccgcctgccccctggtgagcagaagcagaaacagccccgtggaggacgacgacgacgacgacgacgtggtgttcatcgagagcatccagccccccagcatcagcgcccccgccatcgccgaccagagaaacttcatcttcgccagcagcaagaacgagaagccccagggcaactacagcgtgatcccccccagcagcagagacctggccagccagaagggcaacatcagcgagaccatcgtgatcgacgacgaggaggacatcgagaccaacggcggcgccgagaagaagagcagctgcttcatcgagtggggcctgcccggcaccaagaacaagaccaacgacctggacttcagcaccagcagcctgagcagaagcaagaccaagaccggcgtgagacccttcaaccccggcagaatgaacgtggccggcgacctgttccagaacggcgagttcgccacccaccacagccccgacagctggatcagccagagcgccagcttccccagcaaccagaagcagcccggcgtggacagcctgagccccgtggccctgctgagaaagcagaacttccagcccaccgcccagcagcagctgaccaagcccgccaagatcacctgcgccaactgcaagaagcccctgcagaagggccagaccgcctaccagagaaagggcagcgcccacctgttctgcagcaccacctgcctgagcagcttcagccacaagagaacccagaacaccagaagcatcatctgcaagaaggacgccagcaccaagaaggccaacgtgatcctgcccgtggagagcagcaagagcttccaggagttctacagcaccagctgcctgagcccctgcgagaacaactggaacctgaagaagggcgtgttcaacaagagcagatgcaccatctgcagcaagctggccgagatcagacacgaggtgagcgtgaacaacgtgacccacaagctgtgcagcaaccactgcttcaacaagtacagactggccaacggcctgatcatgaactgctgcgagcactgcggcgagtacatgcccagcaagagcaccggcaacaacatcctggtgatcggcggccagcagaagagattctgctgccagagctgcatcaacgagtacaagcagatgatggagaccaagagcaagaagctgaccgccagcgagaacagaaagagaaacgccttcagagaggagaacgagaagcagctgtacggcagcagcaacaccctgctgaagaagatcgagggcatccccgagaagaaggagaagaccagccagctgcagctgagcgtggagtgcggcaccgacaccctgctgatccaggagaacgtgaacctgccccccagcagcaccagcaccatcgccgacaccttccaggagcagctggaggagaagaacttcgaggacagcatcgtgcccgtggtgctgagcgccgaccccggcacctggcccagaatcctgaacatcaagcagagagacaccctggtggagaacgtgcccccccaggtgagaaacttcaacttccccaaggacaacaccggcagaaagttcagcgagacctactacaccagaatcctgcccaacggcgagaagaccaccagaagctggctgctgtacagcaccagcaaggacagcgtgttctgcctgtactgcaagctgttcggcgagggcaagaaccagctgaagaacgagaacggctgcaaggactggcagcacctgagccacatcctgagcaagcacgaggagagcgagatgcacgtgaacaacagcgtgaagtacagcaagctgaagagcgacctgaagaagaacaaggccatcgacgccgccgagcacagactgtacgagaacgagaagaacgacggcgtgctgctgctgtacacctag

SEQ ID NO: 54452 - DNA, 2010 bp, Artificial Sequence
  derived and/or modified sequence
atggaaaaatgttctgtgggagggctcgaactgacagaacagacaccagccctcctgggtaacatggcaatggccacctcgctgatggatattggtgacagtttcggacatccggcctgtccccttgtgtctagatcacgcaacagccccgttgaggacgacgatgatgatgatgatgtagtattcattgagtcaatacagcccccttctatcagtgctcccgccatcgccgaccagagaaattttattttcgctagctctaaaaacgaaaaaccacagggcaactattcagtgatccctccatcttcgcgtgacctggcatcgcaaaagggcaacatttcagagacgattgtcatagacgatgaggaggatattgaaacgaatggcggcgctgagaagaagagctcctgctttattgagtggggtctgccgggcactaagaacaaaacaaatgatcttgattttagcacctcaagtctatcccggtctaagacaaagactggggtgagacctttcaatccaggcagaatgaacgtggccggggatctgtttcaaaacggcgaattcgcaacacaccattcgcctgacagctggatctcgcaatctgcctcatttccatcaaaccaaaaacagccaggagttgattccctgtctcccgtcgcccttctacgcaaacagaactttcagccaaccgcccagcaacagcttacaaagcctgcaaagattacctgcgctaattgtaagaaaccccttcagaagggccagactgcttatcagcgtaagggcagcgctcacctgttctgttccacaacctgcttatccagcttcagccataagcggacccagaatacaaggagtataatctgcaagaaagacgccagcaccaaaaaggccaatgtgattctgccggtagagagctccaaaagctttcaggagttctattccacttcatgcctgtccccctgcgagaataattggaatctcaaaaagggcgtgtttaacaagagtcgttgcacaatctgtagtaagttagctgagattcggcatgaagtctccgtaaacaatgtaacccacaaactgtgttcaaaccactgttttaacaaatatcggctcgctaacggtctgatcatgaattgttgcgaacactgcggagagtacatgccgtctaaaagtaccggcaacaacattctggtcattggtggacagcagaagaggttctgttgtcagagctgtataaacgaatacaaacaaatgatggagactaagtccaagaaactgaccgcgtcagagaatcgtaagcgaaacgcctttcgcgaggagaacgaaaagcaattatacggcagctccaacaccctcctgaaaaagatagaaggaataccagaaaagaaggaaaaaacctctcagctgcagctctctgtggaatgtggcaccgataccttattgatccaggaaaatgtgaacctcccgcccagctctacatccaccatcgccgatacattccaggagcagctggaggagaaaaatttcgaggactccatagttcccgttgtgctgagtgcagatcctggcacttggccaaggatcctaaatatcaaacaacgtgatacattagtggagaacgtcccgcctcaggtgcggaacttcaattttcccaaggacaatacggggagaaaattctcagagacttactacactagaattctccccaacggggagaagacaaccaggtcctggctcctgtattctacatctaaggattcagtcttctgtctgtactgcaagcttttcggggaaggaaagaatcagctgaaaaatgaaaatgggtgtaaggactggcagcacttaagccacatcctgtccaaacacgaggaaagtgagatgcatgtcaacaattctgtcaaatattcaaaattaaagagcgatctgaagaagaacaaggcgattgacgccgccgaacaccggctttatgagaatgaaaagaacgacggggtgttgttactgtatacctag

SEQ ID NO: 54453 - DNA, 2010 bp, Artificial Sequence
  derived and/or modified sequence
atggagaagtgcagcgtgggcggcctggagctgacagagcagaccccagccctgctgggcaacatggccatggccaccagcctgatggacattggagacagctttggccacccagcctgccccctggtgagccgcagcaggaacagccctgtggaggatgatgatgatgatgatgatgtggtgttcatcgagagcatccagccccccagcatcagcgccccagccatcgctgaccagaggaacttcatctttgccagcagcaagaatgagaagccccagggcaactacagcgtcatcccccccagcagccgggacctggccagccagaagggcaacatcagcgagaccatcgtgattgatgatgaagaagatattgagaccaacggcggcgctgagaagaagagcagctgcttcatcgagtggggcctgcccggcaccaagaacaagaccaatgacctggacttcagcaccagcagcctgagccgcagcaagaccaagacaggagtgcggcccttcaaccctggccgcatgaatgtggccggggacctcttccagaatggagaatttgccacccaccacagcccagacagctggatcagccagagcgccagcttccccagcaaccagaagcagcccggggtggacagcctgagccctgtggccctgctgaggaagcagaacttccagcccacagcccagcagcagctgaccaagccagccaagatcacctgtgccaactgcaagaagcccctgcagaagggccagacagcctaccagaggaaaggaagtgcccacctgttctgcagcaccacctgcctgagcagcttcagccacaagaggacccagaacaccaggagcatcatctgcaagaaggatgccagcaccaagaaggccaacgtcatcctgcctgtggagagcagcaagagcttccaggagttctacagcaccagctgcctgagcccctgtgagaacaactggaacctgaagaagggcgtcttcaacaagagccgctgcaccatctgcagcaagctggccgagatcagacatgaggtgtctgtgaacaacgtgacccacaagctgtgcagcaaccactgcttcaacaagtaccgcctggccaacggcctcatcatgaactgctgtgagcactgtggggagtacatgcccagcaagagcacaggcaacaacatcctggtgattggaggccagcagaagcgcttctgctgccagagctgcatcaatgagtacaagcagatgatggagaccaagagcaagaagctgacagccagcgagaacaggaagagaaatgccttccgggaggagaatgagaagcagctgtatggcagcagcaacaccctgctgaagaagattgagggcatccctgagaagaaggagaagaccagccagctgcagctgtctgtggagtgtggcacagacaccctgctgatccaggagaatgtgaacctgccccccagcagcaccagcaccatcgctgacaccttccaggagcagctggaggagaagaactttgaggacagcatcgtgcctgtggtgctgtctgctgaccccggcacctggccccgcatcctgaacatcaagcagagggacaccctggtggagaatgtgcccccccaggtgaggaacttcaacttccccaaggacaacacaggcaggaagttcagcgagacctactacacccgcatcctgcccaacggggagaagaccaccaggtcctggctgctgtacagcaccagcaaggacagcgtcttctgcctgtactgcaagctgtttggagagggcaagaaccagctgaagaatgaaaatggctgcaaggactggcagcacctgagccacatcctgagcaagcatgaggagagcgagatgcacgtgaacaacagcgtgaagtacagcaagctgaagagtgacctgaagaagaacaaggccattgatgctgctgagcaccggctgtatgaaaatgagaagaatgatggagtgctgctgctgtacacctag

SEQ ID NO: 54454 - DNA, 2010 bp, Artificial Sequence
  derived and/or modified sequence
atggagaagtgcagcgtgggcggcctggagctgaccgagcagaccccagccctcttaggcaatatggcaatggccacgtcactaatggatataggcgactccttcgggcaccctgcctgccccctcgtctctagatcacgtaatagccctgtggaggatgacgacgatgacgacgatgtcgtgttcatcgaaagcatacaacccccatctatcagtgcccctgccattgccgatcaaaggaatttcatattcgcctcaagtaagaacgaaaagccgcaggggaattatagcgttattcctccctctagcagagatctggccagtcagaaagggaatatctctgaaaccatagtaatagacgatgaggaggatatcgagactaatgggggagccgagaagaaatccagctgtttcatagagtggggattaccaggtactaagaataagactaacgaccttgatttcagcactagctctctgagccgctcaaagactaaaactggtgtgcgccccttcaaccccggtcgtatgaacgtcgcaggtgacctgtttcagaatggtgagttcgctacacaccactctcccgatagttggataagccagtctgcgtcgtttccaagtaaccagaaacagcccggagtggactctctctccccagtagcgctgctcagaaagcagaattttcagcctacagctcagcagcagcttacgaagcccgcaaaaatcacttgcgctaattgcaagaagccgttacaaaagggacagactgcgtatcagaggaaagggtctgctcatttattttgtagcacaacatgcctgtcctccttctcccacaagcgaacgcagaatacacgctccattatatgtaagaaagatgcctctacaaagaaggcgaatgtcattctgccagtcgagtcatctaagagcttccaggagttttacagcacatcctgtctgagcccctgcgagaacaattggaacttgaaaaaaggggttttcaacaaaagcagatgcacaatctgttctaagctggcagagattcggcatgaagtctctgtcaataacgtgacgcataagctctgctcaaaccattgtttcaataagtatcggctggccaacggactaatcatgaattgttgcgagcattgcggcgaatacatgccttccaagtctactggcaacaacatcctggtcatcggcggacagcagaagcgattttgctgccaatcctgtataaacgagtataaacaaatgatggagaccaaatccaagaaacttactgcctctgaaaataggaagaggaatgcttttagggaagagaatgaaaagcaactctacgggagttcgaataccctgctcaaaaaaatcgagggtatcccggagaaaaaagaaaagacttcccagcttcagttgtccgtcgagtgcggaacagacacccttttgatccaggagaatgttaatcttcccccttcttccacctccactatcgccgatacatttcaggagcagctggaagagaagaacttcgaggacagtatcgtacctgtagtgctgagcgcagaccccggtacatggccccgcattctaaatattaagcagcgggacaccctcgtggagaatgtgcctccacaggttaggaattttaacttcccgaaagataataccggccgcaagttctcagagacctactatacccgcatcttgcccaatggagagaagaccacacggagctggttgctctattcaacatcaaaagattccgtgttctgcctgtattgtaagttgttcggtgaggggaaaaaccaactaaaaaatgagaacggctgtaaagactggcaacacctgtctcacattctctcaaaacacgaggaaagcgagatgcatgttaacaacagcgtcaagtatagtaaactgaagtccgacttgaaaaagaacaaggctatcgatgcagcagagcaccggctgtacgagaacgagaaaaacgacggcgtattactgttatatacctag

SEQ ID NO: 54455 - DNA, 2010 bp, Artificial Sequence
  derived and/or modified sequence
atggaaaaatgttcagtgggcggactggaattaaccgagcagacgccagccttgttgggcaacatggccatggccacatccctcatggacataggtgactctttcggccatcctgcctgtcctctcgtgtcccgctctcgaaattcgcctgtcgaagatgacgacgacgacgacgacgtggttttcatcgagtccatccaacctccatctatctccgcccctgccattgctgaccagagaaacttcatatttgctagttccaaaaacgagaaaccacaaggaaattattctgtgatcccaccctcttctcgcgaccttgccagtcagaaggggaacatttcagagaccatcgttatcgatgacgaagaagacatagagactaatggaggagctgaaaagaagagttcatgcttcattgagtggggtctcccaggtacgaagaacaaaaccaacgatttggatttctctacctctagcctgagtcgcagtaagactaagaccggcgtgaggcccttcaatcccggacggatgaacgtggccggtgatctgtttcagaacggcgagtttgcaacacatcatagccctgactcatggattagccagagcgcctcttttcctagcaaccagaaacaacccggagtggacagcttatcgccagtagccctgctacgaaaacaaaacttccagcccacagcacagcagcagctcactaaaccagccaaaattacatgcgcaaactgtaagaagccccttcagaaaggacagaccgcataccaaaggaagggctccgcccacctcttctgttctacgacatgtctgagttctttctctcataaacgcacccagaatacccgcagcatcatctgtaaaaaagatgcatccactaagaaggccaacgttatcctgcccgtggagtcatccaagtctttccaggaattttatagtaccagctgcctgagcccctgcgaaaataactggaacctgaagaagggggtctttaataagtcaaggtgtacgatatgctcaaaactagcagagatccggcacgaggtgtctgtcaataatgtaacccataaactgtgctctaatcactgcttcaataagtaccgccttgctaatggcctaatcatgaattgttgtgagcactgtggcgagtacatgccttctaagtcgactggaaataatatcctggtgatcgggggacagcagaagaggttctgttgccaatcttgcattaacgagtataaacagatgatggaaacgaagtctaagaaacttaccgcttctgaaaacaggaaacgcaatgccttcagggaggaaaatgaaaaacagctatacggtagtagtaacacgctgctgaagaagatcgaggggatcccagaaaagaaggagaagacctcccagctacagctgagcgtggagtgcggcactgacacactgctcattcaggaaaacgtaaacttacccccatcaagtacatctacaattgctgataccttccaggaacagctggaggagaaaaatttcgaagattccatcgtgccggtggtgctgtcagccgatcctggaacatggcccaggattctgaacattaaacagcgcgacaccctggtggaaaatgtgccccctcaagtcagaaactttaacttccccaaagacaacacaggacgaaagttctctgaaacatactacacacgtatcctgccaaacggagaaaagaccacccgctcatggctgctctattctacaagcaaagatagcgttttctgtctgtattgcaagctctttggagaaggtaaaaaccagctgaaaaacgagaacggatgcaaggactggcagcaccttagtcacattctcagcaaacacgaggaatcagagatgcacgtcaacaactcagtgaaatatagtaagctcaaaagcgatctgaagaagaataaggccattgatgctgccgagcaccgcctgtatgaaaacgaaaaaaacgatggcgtgttgctcctgtatacatag

SEQ ID NO: 54456 - protein, 2087 aa, Artificial Sequence
  derived and/or modified sequence
METESESSTLGDDSVFWLESEVIIQVTDCEEEEREEKFRKMKSSVHSEEDDFVPELHRNVHPRERPDWEETLSAMARGADVPEIPGDLTLKTCGSTASMKVKHVKKLPFTKGHFPKMAECAHFHYENVEFGSIQLSLSEEQNEVMKNGCESKELVYLVQIACQGKSWIVKRSYEDFRVLDKHLHLCIYDRRFSQLSELPRSDTLKDSPESVTQMLMAYLSRLSAIAGNKINCGPALTWMEIDNKGNHLLVHEESSINTPAVGAAHVIKRYTARAPDELTLEVGDIVSVIDMPPKVLSTWWRGKHGFQVGLFPGHCVELINQKVPQSVTNSVPKPVSKKHGKLITFLRTFMKSRPTKQKLKQRGILKERVFGCDLGEHLLNSGFEVPQVLQSCTAFIERYGIVDGIYRLSGVASNIQRLRHEFDSEHVPDLTKEPYVQDIHSVGSLCKLYFRELPNPLLTYQLYEKFSDAVSAATDEERLIKIHDVIQQLPPPHYRTLEFLMRHLSLLADYCSITNMHAKNLAIVWAPNLLRSKQIESACFSGTAAFMEVRIQSVVVEFILNHVDVLFSGRISMAMQEGAASLSRPKSLLVSSPSTKLLTLEEAQARTQAQVNSPIVTENKYIEVGEGPAALQGKFHTIIEFPLERKRPQNKMKKSPVGSWRSFFNLGKSSSVSKRKLQRNESEPSEMKAMALKGGRAEGTLRSAKSEESLTSLHAVDGDSKLFRPRRPRSSSDALSASFNGEMLGNRCNSYDNLPHDNESEEEGGLLHIPALMSPHSAEDVDLSPPDIGVASLDFDPMSFQCSPPKAESECLESGASFLDSPGYSKDKPSANKKDAETGSSQCQTPGSTASSEPVSPLQEKLSPFFTLDLSPTEDKSSKPSSFTEKVVYAFSPKIGRKLSKSPSMSISEPISVTLPPRVSEVIGTVSNTTAQNASSSTWDKCVEERDATNRSPTQIVKMKTNETVAQEAYESEVQPLDQVAAEEVELPGKEDQSVSSSQSKAVASGQTQTGAVTHDPPQDSVPVSSVSLIPPPPPPKNVARMLALALAESAQQASTQSLKRPGTSQAGYTNYGDIAVATTEDNLSSSYSAVALDKAYFQTDRPAEQFHLQNNAPGNCDHPLPETTATGDPTHSNTTESGEQHHQVDLTGNQPHQAYLSGDPEKARITSVPLDSEKSDDHVSFPEDQSGKNSMPTVSFLDQDQSPPRFYSGDQPPSYLGASVDKLHHPLEFADKSPTPPNLPSDKIYPPSGSPEENTSTATMTYMTTTPATAQMSTKEASWDVAEQPTTADFAAATLQRTHRTNRPLPPPPSQRSAEQPPVVGQVQAATNIGLNNSHKVQGVVPVPERPPEPRAMDDPASAFISDSGAAAAQCPMATAVQPGLPEKVRDGARVPLLHLRAESVPAHPCGFPAPLPPTRMMESKMIAAIHSSSADATSSSNYHSFVTASSTSVDDALPLPLPVPQPKHASQKTVYSSFARPDVTTEPFGPDNCLHFNMTPNCQYRPQSVPPHHNKLEQHQVYGARSEPPASMGLRYNTYVAPGRNASGHHSKPCSRVEYVSSLSSSVRNTCYPEDIPPYPTIRRVQSLHAPPSSMIRSVPISRTEVPPDDEPAYCPRPLYQYKPYQSSQARSDYHVTQLQPYFENGRVHYRYSPYSSSSSSYYSPDGALCDVDAYGTVQLRPLHRLPNRDFAFYNPRLQGKSLYSYAGLAPRPRANVTGYFSPNDHNVVSMPPAADVKHTYTSWDLEDMEKYRMQSIRRESRARQKVKGPVMSQYDNMTPAVQDDLGGIYVIHLRSKSDPGKTGLLSVAEGKESRHAAKAISPEGEDRFYRRHPEAEMDRAHHHGGHGSTQPEKPSLPQKQSSLRSRKLPDMGCSLPEHRAHQEASHRQFCESKNGPPYPQGAGQLDYGSKGIPDTSEPVSYHNSGVKYAASGQESLRLNHKEVRLSKEMERPWVRQPSAPEKHSRDCYKEEEHLTQSIVPPPKPERSHSLKLHHTQNVERDPSVLYQYQPHGKRQSSVTVVSQYDNLEDYHSLPQHQRGVFGGGGMGTYVPPGFPHPQSRTYATALGQGAFLPAELSLQHPETQIHAE

SEQ ID NO: 54457 - protein, 954 aa, Artificial Sequence
  derived and/or modified sequence
DYEETSKKEARGADVPEIPGDLTLKTCGSTASMKVKHVKKLPFTKGHFPKMAECAHFHYENVEFGSIQLSLSEEQNEVMKNGCESKELVYLVQIACQGKSWIVKRSYEDFRVLDKHLHLCIYDRRFSQLSELPRSDTLKDSPESVTQMLMAYLSRLSAIAGNKINCGPALTWMEIDNKGNHLLVHEESSINTPAVGAAHVIKRYTARAPDELTLEVGDIVSVIDMPPKVLSTWWRGKHGFQVGLFPGHCVELINQKVPQSVTNSVPKPVSKKHGKLITFLRTFMKSRPTKQKLKQRGILKERVFGCDLGEHLLNSGFEVPQVLQSCTAFIERYGIVDGIYRLSGVASNIQRLRHEFDSEHVPDLTKEPYVQDIHSVGSLCKLYFRELPNPLLTYQLYEKFSDAVSAATDEERLIKIHDVIQQLPPPHYRTLEFLMRHLSLLADYCSITNMHAKNLAIVWAPNLLRSKQIESACFSGTAAFMEVRIQSVVVEFILNHVDVLFSGRISMAMQEGAASLSRPKSLLVSSPSTKLLTLEEAQARTQAQVNSPIVTENKYIEVGEGPAALQGKFHTIIEFPLERKRPQNKMKKSPVGSWRSFFNLGKSSSVSKRKLQRNESEPSEMKAMALKGGRAEGTLRSAKSEESLTSLHAVDGDSKLFRPRRPRSSSDALSASFNGEMLGNRCNSYDNLPHDNESEEEGGLLHIPALMSPHSAEDVDLSPPDIGVASLDFDPMSFQCSPPKAESECLESGASFLDSPGYSKDKPSANKKDAETGSSQCQTPGSTASSEPVSPLQEKLSPFFTLDLSPTEDKSSKPSSFTEKVVYAFSPKIGRKLSKSPSMSISEPISVTLPPRVSEVIGTVSNTTAQNASSSTWDKCVEERDATNRSPTQIVKMKTNETVAQEAYESEVQPLDQVAAEEVELPGKEDQSVSSSQSKAVASGQTQTGTVCFPPFFL

SEQ ID NO: 54458 - protein, 1738 aa, Artificial Sequence
  derived and/or modified sequence
MKSRPTKQKLKQRGILKERVFGCDLGEHLLNSGFEVPQVLQSCTAFIERYGIVDGIYRLSGVASNIQRLRHEFDSEHVPDLTKEPYVQDIHSVGSLCKLYFRELPNPLLTYQLYEKFSDAVSAATDEERLIKIHDVIQQLPPPHYRTLEFLMRHLSLLADYCSITNMHAKNLAIVWAPNLLRSKQIESACFSGTAAFMEVRIQSVVVEFILNHVDVLFSGRISMAMQEGAASLSRPKSLLVSSPSTKLLTLEEAQARTQAQVNSPIVTENKYIEVGEGPAALQGKFHTIIEFPLERKRPQNKMKKSPVGSWRSFFNLGKSSSVSKRKLQRNESEPSEMKAMALKGGRAEGTLRSAKSEESLTSLHAVDGDSKLFRPRRPRSSSDALSASFNGEMLGNRCNSYDNLPHDNESEEEGGLLHIPALMSPHSAEDVDLSPPDIGVASLDFDPMSFQCSPPKAESECLESGASFLDSPGYSKDKPSANKKDAETGSSQCQTPGSTASSEPVSPLQEKLSPFFTLDLSPTEDKSSKPSSFTEKVVYAFSPKIGRKLSKSPSMSISEPISVTLPPRVSEVIGTVSNTTAQNASSSTWDKCVEERDATNRSPTQIVKMKTNETVAQEAYESEVQPLDQVAAEEVELPGKEDQSVSSSQSKAVASGQTQTGAVTHDPPQDSVPVSSVSLIPPPPPPKNVARMLALALAESAQQASTQSLKRPGTSQAGYTNYGDIAVATTEDNLSSSYSAVALDKAYFQTDRPAEQFHLQNNAPGNCDHPLPETTATGDPTHSNTTESGEQHHQVDLTGNQPHQAYLSGDPEKARITSVPLDSEKSDDHVSFPEDQSGKNSMPTVSFLDQDQSPPRFYSGDQPPSYLGASVDKLHHPLEFADKSPTPPNLPSDKIYPPSGSPEENTSTATMTYMTTTPATAQMSTKEASWDVAEQPTTADFAAATLQRTHRTNRPLPPPPSQRSAEQPPVVGQVQAATNIGLNNSHKVQGVVPVPERPPEPRAMDDPASAFISDSGAAAAQCPMATAVQPGLPEKVRDGARVPLLHLRAESVPAHPCGFPAPLPPTRMMESKMIAAIHSSSADATSSSNYHSFVTASSTSVDDALPLPLPVPQPKHASQKTVYSSFARPDVTTEPFGPDNCLHFNMTPNCQYRPQSVPPHHNKLEQHQVYGARSEPPASMGLRYNTYVAPGRNASGHHSKPCSRVEYVSSLSSSVRNTCYPEDIPPYPTIRRVQSLHAPPSSMIRSVPISRTEVPPDDEPAYCPRPLYQYKPYQSSQARSDYHVTQLQPYFENGRVHYRYSPYSSSSSSYYSPDGALCDVDAYGTVQLRPLHRLPNRDFAFYNPRLQGKSLYSYAGLAPRPRANVTGYFSPNDHNVVSMPPAADVKHTYTSWDLEDMEKYRMQSIRRESRARQKVKGPVMSQYDNMTPAVQDDLGGIYVIHLRSKSDPGKTGLLSVAEGKESRHAAKAISPEGEDRFYRRHPEAEMDRAHHHGGHGSTQPEKPSLPQKQSSLRSRKLPDMGCSLPEHRAHQEASHRQFCESKNGPPYPQGAGQLDYGSKGIPDTSEPVSYHNSGVKYAASGQESLRLNHKEVRLSKEMERPWVRQPSAPEKHSRDCYKEEEHLTQSIVPPPKPERSHSLKLHHTQNVERDPSVLYQYQPHGKRQSSVTVVSQYDNLEDYHSLPQHQRGVFGGGGMGTYVPPGFPHPQSRTYATALGQGAFLPAELSLQHPETQIHAE

SEQ ID NO: 54459 - DNA, 6264 bp, Artificial Sequence
  derived and/or modified sequence
atggagaccgagagcgagagcagcaccctgggcgacgacagcgtgttctggctggagagcgaggtgatcatccaggtgaccgactgcgaggaggaggagagagaggagaagttcagaaagatgaagagcagcgtgcacagcgaggaggacgacttcgtgcccgagctgcacagaaacgtgcaccccagagagagacccgactgggaggagaccctgagcgccatggccagaggcgccgacgtgcccgagatccccggcgacctgaccctgaagacctgcggcagcaccgccagcatgaaggtgaagcacgtgaagaagctgcccttcaccaagggccacttccccaagatggccgagtgcgcccacttccactacgagaacgtggagttcggcagcatccagctgagcctgagcgaggagcagaacgaggtgatgaagaacggctgcgagagcaaggagctggtgtacctggtgcagatcgcctgccagggcaagagctggatcgtgaagagaagctacgaggacttcagagtgctggacaagcacctgcacctgtgcatctacgacagaagattcagccagctgagcgagctgcccagaagcgacaccctgaaggacagccccgagagcgtgacccagatgctgatggcctacctgagcagactgagcgccatcgccggcaacaagatcaactgcggccccgccctgacctggatggagatcgacaacaagggcaaccacctgctggtgcacgaggagagcagcatcaacacccccgccgtgggcgccgcccacgtgatcaagagatacaccgccagagcccccgacgagctgaccctggaggtgggcgacatcgtgagcgtgatcgacatgccccccaaggtgctgagcacctggtggagaggcaagcacggcttccaggtgggcctgttccccggccactgcgtggagctgatcaaccagaaggtgccccagagcgtgaccaacagcgtgcccaagcccgtgagcaagaagcacggcaagctgatcaccttcctgagaaccttcatgaagagcagacccaccaagcagaagctgaagcagagaggcatcctgaaggagagagtgttcggctgcgacctgggcgagcacctgctgaacagcggcttcgaggtgccccaggtgctgcagagctgcaccgccttcatcgagagatacggcatcgtggacggcatctacagactgagcggcgtggccagcaacatccagagactgagacacgagttcgacagcgagcacgtgcccgacctgaccaaggagccctacgtgcaggacatccacagcgtgggcagcctgtgcaagctgtacttcagagagctgcccaaccccctgctgacctaccagctgtacgagaagttcagcgacgccgtgagcgccgccaccgacgaggagagactgatcaagatccacgacgtgatccagcagctgccccccccccactacagaaccctggagttcctgatgagacacctgagcctgctggccgactactgcagcatcaccaacatgcacgccaagaacctggccatcgtgtgggcccccaacctgctgagaagcaagcagatcgagagcgcctgcttcagcggcaccgccgccttcatggaggtgagaatccagagcgtggtggtggagttcatcctgaaccacgtggacgtgctgttcagcggcagaatcagcatggccatgcaggagggcgccgccagcctgagcagacccaagagcctgctggtgagcagccccagcaccaagctgctgaccctggaggaggcccaggccagaacccaggcccaggtgaacagccccatcgtgaccgagaacaagtacatcgaggtgggcgagggccccgccgccctgcagggcaagttccacaccatcatcgagttccccctggagagaaagagaccccagaacaagatgaagaagagccccgtgggcagctggagaagcttcttcaacctgggcaagagcagcagcgtgagcaagagaaagctgcagagaaacgagagcgagcccagcgagatgaaggccatggccctgaagggcggcagagccgagggcaccctgagaagcgccaagagcgaggagagcctgaccagcctgcacgccgtggacggcgacagcaagctgttcagacccagaagacccagaagcagcagcgacgccctgagcgccagcttcaacggcgagatgctgggcaacagatgcaacagctacgacaacctgccccacgacaacgagagcgaggaggagggcggcctgctgcacatccccgccctgatgagcccccacagcgccgaggacgtggacctgagcccccccgacatcggcgtggccagcctggacttcgaccccatgagcttccagtgcagcccccccaaggccgagagcgagtgcctggagagcggcgccagcttcctggacagccccggctacagcaaggacaagcccagcgccaacaagaaggacgccgagaccggcagcagccagtgccagacccccggcagcaccgccagcagcgagcccgtgagccccctgcaggagaagctgagccccttcttcaccctggacctgagccccaccgaggacaagagcagcaagcccagcagcttcaccgagaaggtggtgtacgccttcagccccaagatcggcagaaagctgagcaagagccccagcatgagcatcagcgagcccatcagcgtgaccctgccccccagagtgagcgaggtgatcggcaccgtgagcaacaccaccgcccagaacgccagcagcagcacctgggacaagtgcgtggaggagagagacgccaccaacagaagccccacccagatcgtgaagatgaagaccaacgagaccgtggcccaggaggcctacgagagcgaggtgcagcccctggaccaggtggccgccgaggaggtggagctgcccggcaaggaggaccagagcgtgagcagcagccagagcaaggccgtggccagcggccagacccagaccggcgccgtgacccacgaccccccccaggacagcgtgcccgtgagcagcgtgagcctgatcccccccccccccccccccaagaacgtggccagaatgctggccctggccctggccgagagcgcccagcaggccagcacccagagcctgaagagacccggcaccagccaggccggctacaccaactacggcgacatcgccgtggccaccaccgaggacaacctgagcagcagctacagcgccgtggccctggacaaggcctacttccagaccgacagacccgccgagcagttccacctgcagaacaacgcccccggcaactgcgaccaccccctgcccgagaccaccgccaccggcgaccccacccacagcaacaccaccgagagcggcgagcagcaccaccaggtggacctgaccggcaaccagccccaccaggcctacctgagcggcgaccccgagaaggccagaatcaccagcgtgcccctggacagcgagaagagcgacgaccacgtgagcttccccgaggaccagagcggcaagaacagcatgcccaccgtgagcttcctggaccaggaccagagcccccccagattctacagcggcgaccagccccccagctacctgggcgccagcgtggacaagctgcaccaccccctggagttcgccgacaagagccccaccccccccaacctgcccagcgacaagatctacccccccagcggcagccccgaggagaacaccagcaccgccaccatgacctacatgaccaccacccccgccaccgcccagatgagcaccaaggaggccagctgggacgtggccgagcagcccaccaccgccgacttcgccgccgccaccctgcagagaacccacagaaccaacagacccctgccccccccccccagccagagaagcgccgagcagccccccgtggtgggccaggtgcaggccgccaccaacatcggcctgaacaacagccacaaggtgcagggcgtggtgcccgtgcccgagagaccccccgagcccagagccatggacgaccccgccagcgccttcatcagcgacagcggcgccgccgccgcccagtgccccatggccaccgccgtgcagcccggcctgcccgagaaggtgagagacggcgccagagtgcccctgctgcacctgagagccgagagcgtgcccgcccacccctgcggcttccccgcccccctgccccccaccagaatgatggagagcaagatgatcgccgccatccacagcagcagcgccgacgccaccagcagcagcaactaccacagcttcgtgaccgccagcagcaccagcgtggacgacgccctgcccctgcccctgcccgtgccccagcccaagcacgccagccagaagaccgtgtacagcagcttcgccagacccgacgtgaccaccgagcccttcggccccgacaactgcctgcacttcaacatgacccccaactgccagtacagaccccagagcgtgcccccccaccacaacaagctggagcagcaccaggtgtacggcgccagaagcgagccccccgccagcatgggcctgagatacaacacctacgtggcccccggcagaaacgccagcggccaccacagcaagccctgcagcagagtggagtacgtgagcagcctgagcagcagcgtgagaaacacctgctaccccgaggacatccccccctaccccaccatcagaagagtgcagagcctgcacgccccccccagcagcatgatcagaagcgtgcccatcagcagaaccgaggtgccccccgacgacgagcccgcctactgccccagacccctgtaccagtacaagccctaccagagcagccaggccagaagcgactaccacgtgacccagctgcagccctacttcgagaacggcagagtgcactacagatacagcccctacagcagcagcagcagcagctactacagccccgacggcgccctgtgcgacgtggacgcctacggcaccgtgcagctgagacccctgcacagactgcccaacagagacttcgccttctacaaccccagactgcagggcaagagcctgtacagctacgccggcctggcccccagacccagagccaacgtgaccggctacttcagccccaacgaccacaacgtggtgagcatgccccccgccgccgacgtgaagcacacctacaccagctgggacctggaggacatggagaagtacagaatgcagagcatcagaagagagagcagagccagacagaaggtgaagggccccgtgatgagccagtacgacaacatgacccccgccgtgcaggacgacctgggcggcatctacgtgatccacctgagaagcaagagcgaccccggcaagaccggcctgctgagcgtggccgagggcaaggagagcagacacgccgccaaggccatcagccccgagggcgaggacagattctacagaagacaccccgaggccgagatggacagagcccaccaccacggcggccacggcagcacccagcccgagaagcccagcctgccccagaagcagagcagcctgagaagcagaaagctgcccgacatgggctgcagcctgcccgagcacagagcccaccaggaggccagccacagacagttctgcgagagcaagaacggccccccctacccccagggcgccggccagctggactacggcagcaagggcatccccgacaccagcgagcccgtgagctaccacaacagcggcgtgaagtacgccgccagcggccaggagagcctgagactgaaccacaaggaggtgagactgagcaaggagatggagagaccctgggtgagacagcccagcgcccccgagaagcacagcagagactgctacaaggaggaggagcacctgacccagagcatcgtgcccccccccaagcccgagagaagccacagcctgaagctgcaccacacccagaacgtggagagagaccccagcgtgctgtaccagtaccagccccacggcaagagacagagcagcgtgaccgtggtgagccagtacgacaacctggaggactaccacagcctgccccagcaccagagaggcgtgttcggcggcggcggcatgggcacctacgtgccccccggcttcccccacccccagagcagaacctacgccaccgccctgggccagggcgccttcctgcccgccgagctgagcctgcagcaccccgagacccagatccacgccgagtag

SEQ ID NO: 54460 - DNA, 2865 bp, Artificial Sequence
  derived and/or modified sequence
gactacgaggagaccagcaagaaggaggccagaggcgccgacgtgcccgagatccccggcgacctgaccctgaagacctgcggcagcaccgccagcatgaaggtgaagcacgtgaagaagctgcccttcaccaagggccacttccccaagatggccgagtgcgcccacttccactacgagaacgtggagttcggcagcatccagctgagcctgagcgaggagcagaacgaggtgatgaagaacggctgcgagagcaaggagctggtgtacctggtgcagatcgcctgccagggcaagagctggatcgtgaagagaagctacgaggacttcagagtgctggacaagcacctgcacctgtgcatctacgacagaagattcagccagctgagcgagctgcccagaagcgacaccctgaaggacagccccgagagcgtgacccagatgctgatggcctacctgagcagactgagcgccatcgccggcaacaagatcaactgcggccccgccctgacctggatggagatcgacaacaagggcaaccacctgctggtgcacgaggagagcagcatcaacacccccgccgtgggcgccgcccacgtgatcaagagatacaccgccagagcccccgacgagctgaccctggaggtgggcgacatcgtgagcgtgatcgacatgccccccaaggtgctgagcacctggtggagaggcaagcacggcttccaggtgggcctgttccccggccactgcgtggagctgatcaaccagaaggtgccccagagcgtgaccaacagcgtgcccaagcccgtgagcaagaagcacggcaagctgatcaccttcctgagaaccttcatgaagagcagacccaccaagcagaagctgaagcagagaggcatcctgaaggagagagtgttcggctgcgacctgggcgagcacctgctgaacagcggcttcgaggtgccccaggtgctgcagagctgcaccgccttcatcgagagatacggcatcgtggacggcatctacagactgagcggcgtggccagcaacatccagagactgagacacgagttcgacagcgagcacgtgcccgacctgaccaaggagccctacgtgcaggacatccacagcgtgggcagcctgtgcaagctgtacttcagagagctgcccaaccccctgctgacctaccagctgtacgagaagttcagcgacgccgtgagcgccgccaccgacgaggagagactgatcaagatccacgacgtgatccagcagctgccccccccccactacagaaccctggagttcctgatgagacacctgagcctgctggccgactactgcagcatcaccaacatgcacgccaagaacctggccatcgtgtgggcccccaacctgctgagaagcaagcagatcgagagcgcctgcttcagcggcaccgccgccttcatggaggtgagaatccagagcgtggtggtggagttcatcctgaaccacgtggacgtgctgttcagcggcagaatcagcatggccatgcaggagggcgccgccagcctgagcagacccaagagcctgctggtgagcagccccagcaccaagctgctgaccctggaggaggcccaggccagaacccaggcccaggtgaacagccccatcgtgaccgagaacaagtacatcgaggtgggcgagggccccgccgccctgcagggcaagttccacaccatcatcgagttccccctggagagaaagagaccccagaacaagatgaagaagagccccgtgggcagctggagaagcttcttcaacctgggcaagagcagcagcgtgagcaagagaaagctgcagagaaacgagagcgagcccagcgagatgaaggccatggccctgaagggcggcagagccgagggcaccctgagaagcgccaagagcgaggagagcctgaccagcctgcacgccgtggacggcgacagcaagctgttcagacccagaagacccagaagcagcagcgacgccctgagcgccagcttcaacggcgagatgctgggcaacagatgcaacagctacgacaacctgccccacgacaacgagagcgaggaggagggcggcctgctgcacatccccgccctgatgagcccccacagcgccgaggacgtggacctgagcccccccgacatcggcgtggccagcctggacttcgaccccatgagcttccagtgcagcccccccaaggccgagagcgagtgcctggagagcggcgccagcttcctggacagccccggctacagcaaggacaagcccagcgccaacaagaaggacgccgagaccggcagcagccagtgccagacccccggcagcaccgccagcagcgagcccgtgagccccctgcaggagaagctgagccccttcttcaccctggacctgagccccaccgaggacaagagcagcaagcccagcagcttcaccgagaaggtggtgtacgccttcagccccaagatcggcagaaagctgagcaagagccccagcatgagcatcagcgagcccatcagcgtgaccctgccccccagagtgagcgaggtgatcggcaccgtgagcaacaccaccgcccagaacgccagcagcagcacctgggacaagtgcgtggaggagagagacgccaccaacagaagccccacccagatcgtgaagatgaagaccaacgagaccgtggcccaggaggcctacgagagcgaggtgcagcccctggaccaggtggccgccgaggaggtggagctgcccggcaaggaggaccagagcgtgagcagcagccagagcaaggccgtggccagcggccagacccagaccggcaccgtgtgcttcccccccttcttcctgtag

SEQ ID NO: 54461 - DNA, 6264 bp, Artificial Sequence
  derived and/or modified sequence
atggagacagaaagtgaaagcagcaccctgggtgacgactccgtcttctggctggaaagcgaagtaatcattcaggtgaccgactgtgaggaggaggagagggaggagaagttccgcaagatgaaaagttccgtgcacagcgaagaagacgatttcgtgcccgagttacaccgaaatgtgcacccaagagagcggccggactgggaagagactctttctgccatggcaagaggcgccgacgtaccggaaatccccggcgacctcaccctgaagacttgcggcagcactgctagcatgaaagtgaagcacgtgaaaaaactacccttcacaaaggggcacttccccaagatggccgaatgcgcccacttccactacgaaaacgtagagtttgggagcatccagttgagcctcagtgaggagcagaatgaggtgatgaagaatggatgcgaatccaaggaactggtctaccttgtgcagatcgcctgtcaggggaaatcgtggattgtcaagagaagctacgaagatttccgcgtgctcgataaacacctgcacctttgtatatacgaccggcgattctcgcagctctctgaattgccccgctcggacacactcaaggattcccccgaatcagtcactcagatgcttatggcttacttaagcagactgtcggccatcgccggtaacaagatcaattgtggaccagctctcacatggatggagattgacaacaaaggaaaccacttgctcgtccacgaagaatctagcatcaacacaccagcagttggggccgcccatgtgatcaaaaggtacacagcacgtgccccagacgagctaacattagaggtcggagatattgttagcgtgatagatatgccaccgaaagtgttatctacttggtggagggggaaacatggatttcaggtcggtctgttcccggggcattgcgtggaattgattaaccaaaaggtgcctcagtctgtaaccaacagcgtgcccaagccggtctctaagaaacacgggaagctgattacctttcttcgaactttcatgaaaagccgaccaaccaagcaaaagctcaagcaacgggggattctgaaggaacgggtttttgggtgtgatcttggagaacatctgctgaattcaggtttcgaagtgccccaggtcctgcagtcctgtacggcattcatagaaagatatggtattgttgatgggatctatcggctgagtggggtggcaagtaatatccaaaggttacggcacgaattcgacagtgaacacgtccccgaccttacgaaagagccatacgttcaggacatacacagcgtgggttccttgtgcaagctatattttagagaactacctaatcccctcctgacataccagctatacgagaagttcagcgatgccgtgtcggccgcgactgacgaagaacgtctcattaagatccacgatgtgatacaacagcttccgcctccgcactacagaactttagaatttctgatgaggcatcttagtctgcttgcagactactgtagcattaccaatatgcacgccaagaatttggcgatcgtatgggcaccaaacttactgcggagcaagcagatcgagagtgcctgtttcagtggcactgcggcatttatggaggtgaggatccagtcagtcgtggtggaattcatcctcaaccatgtagacgtgctgttctctggaaggatttcaatggcgatgcaggagggcgccgcgagcctgtccagacctaaaagccttctcgtgtcatccccttcaacgaagctgctgaccttagaagaggcccaggctaggacacaagcacaggtcaattccccaatcgtgacggaaaacaagtacatcgaggtgggggagggacccgccgctctccaggggaaattccacaccatcattgaattccctctggagcggaaacgcccacaaaacaagatgaaaaaatctccagtggggtcttggaggtcgttctttaaccttggcaaatcttctagcgtgtccaaaaggaaattgcaacggaacgaatccgagccctccgaaatgaaggcgatggcactcaaaggaggccgggctgaggggacactgagatctgcgaagtccgaagagtccttgacgtccctgcacgcagtcgacggcgatagtaagctcttcaggccaagacgcccgaggtcgagctctgatgccttgagcgcctctttcaacggtgaaatgctcgggaatcggtgtaacagctatgataatttaccacatgataatgagtccgaggaggagggcggcctgctgcacattcctgcgctgatgtcaccgcactccgccgaagacgtagacttgtcaccacccgatattggggtggccagcctggacttcgaccccatgtccttccagtgttcacctcccaaagcagagtctgaatgcctggaatccggtgcaagttttcttgatagccccggatatagcaaagataaacctagcgctaataaaaaagacgcagagaccggttcttcacaatgtcaaacacccgggtctactgcaagctccgagccggtgtctcccctgcaggaaaaactttcccctttctttactttggacctgtctcccacagaagataaaagctcaaaaccctctagttttaccgaaaaagtggtgtatgctttcagcccaaagataggccgcaagctctccaagtcacctagcatgtcaatctccgaaccaatatccgtgactctcccacccagagtgtcagaggttatcgggaccgtcagcaataccacagcccagaacgcatctagcagcacttgggataagtgcgtcgaggagagggacgctacaaaccgcagccctacccaaattgtcaaaatgaaaactaacgagacagtcgcccaggaagcctacgaatctgaggtccagccccttgaccaagttgctgctgaggaggtggaactccccggcaaggaggatcagtctgtctctagtagccagagtaaggcagtggcttcaggccaaacccagactggcgctgtcacgcacgatccacctcaggacagcgtgcctgtgagctcagtctccctgatcccaccccctccgccacctaaaaacgtcgcccggatgttggccctggccctggccgaatccgctcaacaggcctctacccagtcgcttaagagacctggaacatcacaagctggatacactaactacggtgacattgctgtggccactacagaagataatctgtccagcagttacagcgcagttgcccttgataaggcctacttccagaccgacaggcctgccgagcagtttcacctgcaaaataatgccccaggtaattgcgatcaccctctccctgaaacaaccgcaacaggggatccaactcacagcaatacaaccgagagtggagagcaacatcaccaagtagatctcacagggaaccagcctcatcaggcctacctgagcggcgatccagaaaaggcacggattactagcgtccctctggattctgagaagtctgacgatcacgtttcttttcccgaggaccagagtggcaaaaactccatgcccactgtttcattcctagaccaggaccaaagccctccccgattctactccggggatcagcccccctcctacctgggggcatctgtggataagctgcatcacccactggaatttgctgacaagtctcccacaccaccaaatctcccctcggataagatttatcccccaagtggttctccagaggaaaacacttccacggctaccatgacatacatgaccactacaccagctacggcgcagatgagcactaaagaggccagttgggacgtagctgagcaacctaccacagccgatttcgccgctgccacgcttcaacgcacacaccgaacgaatcggcccctgcctccgcccccatcacaaaggagcgctgagcagccacctgtggttgggcaggttcaagcggcaacgaatatcggtctgaacaactcacacaaggtgcagggcgtggtcccagtgcccgaaagacccccagagccccgcgccatggacgatccagccagcgctttcattagcgacagtggagccgccgccgcacaatgtccaatggccaccgcagtacagcccggtttgcctgagaaagtgagagacggcgcgcgcgtacctctgcttcaccttagggccgagtctgtgcctgcacacccctgcggattccccgctccactgccccccacccgaatgatggaatccaagatgatcgccgctatccattctagctccgcggatgcaactagcagctcaaactaccactccttcgttaccgccagctccaccagcgtcgatgatgcgctccccctgcccctgcctgtgccccagccaaaacacgcttcccaaaaaactgtgtatagcagctttgcccggccggatgttaccactgaaccatttgggcccgacaactgtttgcacttcaacatgacaccgaactgccaataccggccacagagcgttcctcctcaccacaataaactcgagcagcaccaagtctatggggcccgtagtgagccaccggcttctatggggttgcgatacaacacctatgtagcccccggacggaacgctagcgggcaccactctaagccttgtagtagggtcgagtacgtgagcagcctctcttcttcagtgaggaacacctgctatcctgaagatataccaccctaccctacgatccgacgcgtacagtctctgcatgcacctccctcctctatgatcagatcagtgcctatctctcgaaccgaggtgccccccgacgatgaacccgcatactgcccacgtcccctatatcagtacaagccctaccagtccagtcaggcacgttcggactaccacgtcacacagctacaaccctactttgagaatggccgcgtacattatcggtattctccctacagcagctcttctagttcctactattcacccgacggagcactgtgcgatgttgacgcatacgggaccgtgcagttaaggcccctgcatcgattaccgaatcgggacttcgccttctataacccccggttacaagggaaaagcctgtactcctacgcaggactagcgcctcggccacgtgctaatgtgaccgggtacttctcaccaaacgaccacaatgtggtgagtatgcccccagccgccgacgtgaaacatacatacacttcttgggacctggaagatatggaaaaatatcggatgcagagcattaggagggagagtagggcccgccaaaaggtcaaaggccctgtcatgagtcagtacgacaacatgactcccgcggtgcaagacgacctggggggtatctacgtgatccacctgcgtagcaaaagtgaccccggcaaaacaggcttgttgtccgttgccgagggaaaggagtcccgccatgccgcaaaggcaatttcgcccgagggcgaggatcgcttttataggcgacacccagaggccgaaatggaccgggcacatcaccatggggggcacggctccacacagcctgagaaacccagcctgccacaaaagcagtcaagcttacgatccagaaaactacccgacatggggtgctccctccctgagcatcgagcccatcaagaagccagccatagacaattctgcgaaagtaaaaatgggcctccttatccacagggggccgggcaacttgattatgggagtaagggtatcccggacacctctgagccggtgtcatatcacaactccggagtcaaatatgcggcctccggacaggagagcctaagattgaatcacaaggaagtccgactgtctaaggaaatggaacgcccctgggtgagacaacccagcgcacctgagaaacacagcagggattgttataaagaggaagaacatctaactcagtctattgtgccccccccaaaacctgagcgaagtcacagtctgaagctccaccacacccagaacgttgaaagagatccgtcggtgctgtatcagtatcaaccacacggtaagaggcagtctagcgttaccgtggtgtcacaatacgacaatctggaggactatcacagcttgccccagcaccagcgaggagttttcggtggcggcgggatggggacctacgttcctccaggtttccctcaccctcagtccaggacatatgctacagcactgggtcagggcgcctttctgccagccgaactctcgcttcagcaccctgaaacacagatccacgccgaatag

SEQ ID NO: 54462 - DNA, 2865 bp, Artificial Sequence
  derived and/or modified sequence
gactacgaggagaccagcaaaaaggaagcacgcggtgcagacgtgccggagatcccaggtgaccttaccctcaagacctgtggcagtacagcctccatgaaagtgaagcacgtaaaaaaactcccatttactaagggccactttcctaaaatggcagagtgtgcccatttccattacgagaatgtggagttcggctctatccaattgagcctctccgaggaacagaacgaggtcatgaagaatggatgcgagagtaaagagctggtgtatctggtccaaatcgcatgtcagggtaagagctggattgtcaaaagaagctatgaggactttagagtgctggacaagcatctccacctgtgtatctatgaccggcgattttcccagctctccgagttgccaaggtccgacacactgaaggatagcccagagagcgtgactcagatgctaatggcctacctgtctaggctcagtgcgatcgcaggtaacaaaatcaactgcggcccggcactgacctggatggagattgataataagggtaaccacctgctggttcacgaagaaagttcaatcaacactccggccgtgggggccgcacatgtgattaaacggtacactgcacgtgctccggacgaattgacccttgaagtaggagatattgtatctgtgatagacatgcccccgaaggttctgtcaacatggtggcgaggcaaacacgggttccaggtgggactgtttcctggtcactgtgtagagctgatcaatcagaaggtccctcaatccgtcaccaacagtgtgccaaaaccggtgtccaagaaacatggaaagttgataacatttttgagaactttcatgaagtctcgtccaaccaagcaaaaactcaagcagcgaggtattctgaaagaacgagttttcggttgcgatcttggggaacatctgctcaatagtggatttgaggtgccacaggtactccagagctgtaccgcttttatcgagcgatatggaattgtcgatgggatatacagactgtcaggggtggcctccaacatccagcgactacgccacgagttcgacagcgagcatgttcccgacctgaccaaagagccatacgtgcaagatattcatagcgtaggatccctttgcaagctctatttcagggaactccccaatcccctgctgacatatcaactgtacgagaagttcagtgatgcggtgtccgctgccaccgacgaggagcgcttaattaagatccatgatgtgatccagcagctgccccccccccattacaggactctagagttccttatgagacacctcagtctcctcgcagactactgttcaatcacaaatatgcatgcgaaaaacttggctatcgtgtgggcaccaaacctgcttaggtccaagcagatcgagtccgcctgctttagcggaacagcagcttttatggaggttcggatacaatccgtggtagtggaattcatactgaaccacgtggatgtgcttttttccggccgcatatctatggccatgcaggagggcgccgcttcattgtcaaggccaaaatccctcttagtgagcagcccctccaccaagctccttacactcgaagaagcacaggcccgaacacaggctcaggtgaatagtcccatagtcaccgagaacaaatacatcgaggtcggtgaggggccggctgcactccagggaaaattccataccatcattgaatttccgctggagaggaaacgtcctcagaataagatgaaaaagtcccccgtcggcagctggagatctttcttcaacctaggaaaaagcagctcggtctccaaacgcaagcttcagcgcaatgagagcgaaccctctgaaatgaaagccatggcactcaaaggcggcagagccgaggggacgttaagaagcgctaagtccgaagaatccctaaccagcctacatgccgtggatggagacagcaaattattccgccctagacgtccccggtctagctcagacgctttatctgcatcatttaacggcgaaatgctcggaaatagatgcaattcctatgataatctcccacacgataacgagagcgaggaggaaggggggttgttacacatccctgcactgatgtcgcctcactctgctgaagacgttgacttaagtcccccggacattggagtcgccagtctagatttcgatccgatgtccttccagtgtagccctccgaaggcagagagtgagtgcctggagagtggggcgagctttttggatagtcctgggtactctaaagataagcccagcgccaataagaaggacgccgaaaccggctcctctcagtgtcagacccctggctccacagccagttcagaaccagtgagccctttacaagagaaattgtccccgttttttaccctggacctgtcacccaccgaggataagtcttcaaagccatcatctttcaccgaaaaggtagtgtacgccttctctcccaagatcggcagaaaactctccaagagccccagcatgtcaatatctgagcctatcagtgttacactgcccccccgggtgagcgaggtgatcggaacagttagcaatactactgctcagaacgcctcatctagcacatgggataaatgcgtagaagagcgcgatgccacaaataggtcaccaactcagatcgttaagatgaagaccaacgaaactgtggcccaggaggcctatgagtcagaagtgcagccgttggatcaggtggcggcagaggaagttgagctgcccgggaaggaggaccaaagcgtgagttcatctcagtccaaagccgtcgccagtggccagacccaaacaggaaccgtgtgcttccccccgttcttcttgtag

SEQ ID NO: 54463 - DNA, 6264 bp, Artificial Sequence
  derived and/or modified sequence
atggagacagaaagtgagagcagcaccctgggagatgacagcgtcttctggctggagagcgaggtgatcatccaggtgacagactgtgaggaggaggagcgggaggagaagttcaggaagatgaagagctctgtgcacagtgaagaagatgactttgtgcctgagctgcacagaaatgtgcacccccgggagaggccagactgggaggagaccctgagcgccatggcccggggagcagatgtgcctgagatccctggggacctgaccctgaagacctgtggcagcacagcctccatgaaggtgaagcacgtgaagaagctgcccttcaccaagggccacttccccaagatggctgaatgtgcccacttccactatgaaaatgtggagtttggcagcatccagctgagcctgtctgaggagcagaatgaggtgatgaagaatggctgtgagagcaaggagctggtgtacctggtgcagatcgcctgccagggcaagtcctggatcgtgaagaggagctatgaggacttccgggtgctggacaagcacctgcacctgtgcatctatgaccggcgcttcagccagctgtctgagctgcccaggagtgacaccctgaaggacagccctgagagcgtgacccagatgctgatggcctacctgagccggctgagcgccatcgccggcaacaagatcaactgtggccctgccctgacctggatggagattgacaacaagggcaaccacctgctggtgcatgaggagagcagcatcaacaccccagctgtgggcgccgcccacgtgatcaagcgctacacagcccgggccccagatgagctgaccctggaggtgggggacatcgtgtctgtgattgacatgccacccaaggtgctgagcacctggtggaggggcaagcacggcttccaggtgggcctcttccctggccactgtgtggagctgatcaaccagaaggtgccccagagcgtgaccaacagcgtgcccaagcctgtgtccaagaagcacggcaagctgatcaccttcctgcggaccttcatgaagagccggcccaccaagcagaagctgaagcagaggggcatcctgaaggagcgggtgtttggctgtgacctgggggagcacctgctgaacagcggctttgaggtgccccaggtgctgcagagctgcacagccttcatcgagagatatggaattgtggatggcatctaccgcctgtctggagtggccagcaacatccagaggctgcggcatgaatttgacagcgagcacgtgcctgacctgaccaaggagccctacgtgcaggacatccacagcgtgggcagcctgtgcaagctgtacttccgggagctgcccaaccccctgctgacctaccagctgtatgagaagttcagtgatgctgtgtctgctgccacagatgaggagcggctcatcaagatccatgatgtgatccagcagctgcccccaccccactaccgcaccctggagttcctgatgaggcacctgagcctgctggccgactactgcagcatcaccaacatgcacgccaagaacctggccatcgtgtgggcccccaacctgctgcggagcaagcagattgaaagtgcctgcttctctggaacagctgccttcatggaggtgcgcatccagagcgtggtggtggagttcatcctgaaccacgtggatgtgctcttcagcggccgcatctccatggccatgcaggagggcgccgccagcctgagccggcccaagagcctgctggtgagcagccccagcaccaagctgctgaccctggaggaggcccaggcccggacccaggcccaggtgaacagccccatcgtgacagagaacaagtacatcgaggtgggggagggccctgctgccctgcagggcaagttccacaccatcatcgagttccccctggagaggaagaggccccagaacaagatgaagaagagccctgtgggctcctggaggagcttcttcaacctgggcaagagcagctctgtgtccaagaggaagctgcagagaaatgaaagtgagcccagcgagatgaaggccatggccctgaagggcggccgggcagagggcaccctgcggagcgccaagtctgaggagagcctgaccagcctgcatgctgtggatggagacagcaagctgttccggccccggcggcccaggagcagcagtgatgccctgagcgccagcttcaacggggagatgctgggcaaccgctgcaacagctatgacaacctgccccatgacaatgaaagtgaggaggagggcggcctgctgcacatcccagccctgatgagcccccacagcgcagaagatgtggacctgagccccccagacatcggcgtggccagcctggactttgaccccatgtccttccagtgcagcccccccaaggccgagagcgagtgcctggagagcggggccagcttcctggacagccctggctacagcaaggacaagcccagcgccaacaagaaggatgctgagaccggcagcagccagtgccagaccccaggcagcacagccagcagcgagcctgtgagccccctgcaggagaagctgagccccttcttcaccctggacctgagccccacagaggacaagagcagcaagcccagcagcttcacagagaaggtggtgtatgccttcagccccaagattggaaggaagctgagcaagagccccagcatgagcatcagcgagcccatctctgtgaccctgcccccccgggtgtctgaggtgattggaacagtgagcaacaccacagcccagaatgccagcagcagcacctgggacaagtgtgtggaggagagagatgccaccaacagaagccccacccagatcgtgaagatgaagaccaatgagaccgtggcccaggaggcctatgagagcgaggtgcagcccctggaccaggtggccgctgaggaggtggagctgcccgggaaggaggaccagagcgtgagcagcagccagagcaaggctgtggccagcggccagacccagacaggagctgtgacccatgaccccccccaggacagcgtgcctgtgtcctctgtgtccctcatccccccacctcctccacccaagaatgtggccaggatgctggccctggccctggccgagagcgcccagcaggccagcacccagagcctgaagaggcctggcaccagccaggccggctacaccaactacggggacattgctgtggccaccacagaggacaacctgagcagcagctacagcgctgtggccctggacaaggcctacttccagacagacaggcctgctgagcagttccacctgcagaacaatgcccctggcaactgtgaccaccccctgcctgagaccacagccactggagaccccacccacagcaacaccacagagagcggggagcagcaccaccaggtggacctgaccggcaaccagccccaccaggcctacctgagcggggaccctgagaaggcccgcatcacctctgtgcccctggacagcgagaagagtgatgaccacgtgtccttccctgaggaccagagcggcaagaacagcatgcccaccgtgtccttcctggaccaggaccagagccccccacgcttctacagcggggaccagcccccatcctacctgggcgcctctgtggacaagctgcaccaccccctggagtttgctgacaagagccccaccccacccaacctgcccagcgacaagatctacccaccttctggcagccctgaggagaacaccagcacagccaccatgacctacatgaccaccaccccagccacagcccagatgagcaccaaggaggcctcctgggatgtggccgagcagcccaccacagctgactttgctgctgccaccctgcagaggacccacaggaccaaccggcccctgcccccaccacccagccagaggtctgctgagcagccccctgtggtgggccaggtgcaggccgccaccaacatcggcctgaacaacagccacaaggtgcagggcgtggtgcctgtgcctgagcggcccccagagccccgggccatggatgatcctgccagcgccttcatcagtgacagcggggctgctgctgcccagtgccccatggccacagctgtgcagcccggcctgcctgagaaggtgagagatggagcccgggtgcccctgctgcacctgcgggcagagagcgtgcctgcccacccctgtggcttccctgcccccctgccccccaccaggatgatggagagcaagatgattgctgccatccacagcagcagcgcagatgccaccagcagcagcaactaccacagctttgtgacagccagcagcacctctgtggatgatgccctgcccctgcccctgcctgtgccccagcccaagcacgccagccagaagacagtgtacagcagctttgcccggccagatgtgaccacagagcccttcggccctgacaactgcctgcacttcaacatgacccccaactgccagtaccggccccagagcgtgcccccccaccacaacaagctggagcagcaccaggtgtatggagcccggtctgagcccccagcctccatgggcctgcgctacaacacctacgtggcccctggaagaaatgccagcggccaccacagcaagccctgcagccgggtggagtatgtgagcagcctgagcagctctgtgaggaacacctgctacccagaggacatccccccctaccccaccatcagaagagtgcagagcctgcacgccccacccagctccatgatccgctctgtgcccatcagcaggacagaggtgcccccagatgatgagcccgcctactgcccccggcccctgtaccagtacaagccctaccagagcagccaggcccggagtgactaccacgtgacccagctgcagccctactttgaaaatggccgggtgcactaccgctacagcccctacagcagcagcagcagcagctactacagcccagatggagccctgtgtgatgtggatgcctatggaacagtgcagctgcggcccctgcaccggctgcccaacagagactttgccttctacaacccccggctgcagggcaagagcctgtacagctatgccggcctggccccccggccccgggccaacgtgacaggctacttcagccccaatgaccacaacgtggtgtccatgcccccagctgctgatgtgaagcacacctacacctcctgggacctggaggacatggagaagtacaggatgcagagcatccggcgggagagccgggcccggcagaaggtgaagggccctgtgatgagccagtatgacaacatgaccccagctgtgcaggatgacctgggcggcatctacgtgatccacctgcggagcaagagtgaccccgggaagacaggcctgctgtctgtggccgagggcaaggagagcagacatgctgccaaggccatcagccctgagggggaggaccgcttctacagaagacaccctgaggccgagatggaccgggcccaccaccacggcggccacggcagcacccagcctgagaagcccagcctgccccagaagcagagcagcctgcggagcaggaagctgcctgacatgggctgcagcctgcctgagcaccgggcccaccaggaggccagccaccggcagttctgtgagagcaagaatggaccaccctacccccagggcgccggccagctggactatggcagcaagggcatcccagacaccagcgagcctgtgtcctaccacaacagcggcgtgaagtatgctgccagcggccaggagagcctgcggctgaaccacaaggaggtgcggctgagcaaggagatggagcggccctgggtgcggcagcccagcgcccctgagaagcacagccgggactgctacaaggaggaggagcacctgacccagagcatcgtgcccccacccaagccagagaggagccacagcctgaagctgcaccacacccagaatgtggagcgggaccccagcgtgctgtaccagtaccagccccacggcaagaggcagagctctgtgacagtggtgtcccagtatgacaacctggaggactaccacagcctgccccagcaccagaggggcgtgtttggaggcggcggcatgggcacctacgtgcccccaggcttcccccacccccagagcaggacctacgccacagccctgggccagggcgccttcctgcctgctgagctgagcctgcagcaccctgagacccagatccacgccgagtag

SEQ ID NO: 54464 - DNA, 2865 bp, Artificial Sequence
  derived and/or modified sequence
gactatgaggagaccagcaagaaggaggcccggggagcagatgtgcctgagatccctggggacctgaccctgaagacctgtggcagcacagcctccatgaaggtgaagcacgtgaagaagctgcccttcaccaagggccacttccccaagatggctgaatgtgcccacttccactatgaaaatgtggagtttggcagcatccagctgagcctgtctgaggagcagaatgaggtgatgaagaatggctgtgagagcaaggagctggtgtacctggtgcagatcgcctgccagggcaagtcctggatcgtgaagaggagctatgaggacttccgggtgctggacaagcacctgcacctgtgcatctatgaccggcgcttcagccagctgtctgagctgcccaggagtgacaccctgaaggacagccctgagagcgtgacccagatgctgatggcctacctgagccggctgagcgccatcgccggcaacaagatcaactgtggccctgccctgacctggatggagattgacaacaagggcaaccacctgctggtgcatgaggagagcagcatcaacaccccagctgtgggcgccgcccacgtgatcaagcgctacacagcccgggccccagatgagctgaccctggaggtgggggacatcgtgtctgtgattgacatgccacccaaggtgctgagcacctggtggaggggcaagcacggcttccaggtgggcctcttccctggccactgtgtggagctgatcaaccagaaggtgccccagagcgtgaccaacagcgtgcccaagcctgtgtccaagaagcacggcaagctgatcaccttcctgcggaccttcatgaagagccggcccaccaagcagaagctgaagcagaggggcatcctgaaggagcgggtgtttggctgtgacctgggggagcacctgctgaacagcggctttgaggtgccccaggtgctgcagagctgcacagccttcatcgagagatatggaattgtggatggcatctaccgcctgtctggagtggccagcaacatccagaggctgcggcatgaatttgacagcgagcacgtgcctgacctgaccaaggagccctacgtgcaggacatccacagcgtgggcagcctgtgcaagctgtacttccgggagctgcccaaccccctgctgacctaccagctgtatgagaagttcagtgatgctgtgtctgctgccacagatgaggagcggctcatcaagatccatgatgtgatccagcagctgcccccaccccactaccgcaccctggagttcctgatgaggcacctgagcctgctggccgactactgcagcatcaccaacatgcacgccaagaacctggccatcgtgtgggcccccaacctgctgcggagcaagcagattgaaagtgcctgcttctctggaacagctgccttcatggaggtgcgcatccagagcgtggtggtggagttcatcctgaaccacgtggatgtgctcttcagcggccgcatctccatggccatgcaggagggcgccgccagcctgagccggcccaagagcctgctggtgagcagccccagcaccaagctgctgaccctggaggaggcccaggcccggacccaggcccaggtgaacagccccatcgtgacagagaacaagtacatcgaggtgggggagggccctgctgccctgcagggcaagttccacaccatcatcgagttccccctggagaggaagaggccccagaacaagatgaagaagagccctgtgggctcctggaggagcttcttcaacctgggcaagagcagctctgtgtccaagaggaagctgcagagaaatgaaagtgagcccagcgagatgaaggccatggccctgaagggcggccgggcagagggcaccctgcggagcgccaagtctgaggagagcctgaccagcctgcatgctgtggatggagacagcaagctgttccggccccggcggcccaggagcagcagtgatgccctgagcgccagcttcaacggggagatgctgggcaaccgctgcaacagctatgacaacctgccccatgacaatgaaagtgaggaggagggcggcctgctgcacatcccagccctgatgagcccccacagcgcagaagatgtggacctgagccccccagacatcggcgtggccagcctggactttgaccccatgtccttccagtgcagcccccccaaggccgagagcgagtgcctggagagcggggccagcttcctggacagccctggctacagcaaggacaagcccagcgccaacaagaaggatgctgagaccggcagcagccagtgccagaccccaggcagcacagccagcagcgagcctgtgagccccctgcaggagaagctgagccccttcttcaccctggacctgagccccacagaggacaagagcagcaagcccagcagcttcacagagaaggtggtgtatgccttcagccccaagattggaaggaagctgagcaagagccccagcatgagcatcagcgagcccatctctgtgaccctgcccccccgggtgtctgaggtgattggaacagtgagcaacaccacagcccagaatgccagcagcagcacctgggacaagtgtgtggaggagagagatgccaccaacagaagccccacccagatcgtgaagatgaagaccaatgagaccgtggcccaggaggcctatgagagcgaggtgcagcccctggaccaggtggccgctgaggaggtggagctgcccgggaaggaggaccagagcgtgagcagcagccagagcaaggctgtggccagcggccagacccagacaggcaccgtgtgcttcccccccttcttcctgtag

SEQ ID NO: 54465 - DNA, 6264 bp, Artificial Sequence
  derived and/or modified sequence
atggagaccgagagcgagagcagcaccctgggcgacgacagcgtgttctggttggagtccgaggtgattatacaggtgactgattgcgaggaagaggaaagggaagagaaattccggaagatgaagagcagtgtgcacagcgaggaagacgacttcgtgcccgagctccatagaaacgtacacccccgagaaagacctgactgggaggagaccttaagcgctatggcccgtggcgcagacgtgcctgaaatacccggcgatctgacgctgaagacctgtggctcaacagccagcatgaaggtgaagcatgtgaagaagctgccatttaccaagggccacttcccaaaaatggctgagtgcgcccattttcattacgaaaatgtggagtttggatcaattcagctttccctttcagaagaacagaatgaggtgatgaagaacggatgcgaaagtaaggagttagtctatttagtgcagatcgcctgccagggaaagtcatggattgtgaaacgttcatacgaggatttccgggtgctagataagcatctgcacctgtgtatctatgaccgccggttctctcagttatcagagctgcctcggtctgacaccctgaaagactcccccgaatcagttactcagatgctcatggcctacttatcccgcctgagcgcaattgccggcaataagatcaattgcggtcctgcactcacctggatggagatcgataataaaggtaatcacctacttgtacatgaggaatcatccattaacacacctgcagtcggcgccgcacatgtaatcaagaggtacacagctagagctccagacgagctaacactcgaagtgggcgacatcgtgtctgtcattgacatgccgcctaaagtcttgtccacgtggtggcgcggaaaacacggattccaggtgggattgttccctgggcattgcgtggaactgataaatcagaaagtccctcagtctgtaaccaactctgtccctaaaccagtatcaaagaagcacggcaagcttattacatttctgcgaactttcatgaaatcaagacctaccaaacagaagctgaagcagagggggattctgaaggaacgggtctttggatgcgacctcggcgagcaccttcttaatagcgggttcgaagtgccgcaggtgcttcaatcgtgcaccgccttcattgaacgctatgggatcgtggatggtatctatcggttgagcggagtcgccagtaatattcaacggttgaggcatgagtttgactccgaacacgtaccagacctgacgaaggagccttatgtccaggacatacactccgtcggcagcttatgtaagttgtactttcgggagctccccaatcccctgctgacataccagctctacgaaaagttttctgacgctgtttcagccgccacggacgaagaaaggctcatcaaaattcacgacgttattcagcagctgccgccgcctcattatcggactctggagtttcttatgagacacctctccttgctggcagactactgtagtattaccaatatgcacgccaaaaatcttgcaatcgtgtgggcccctaatttgctgcggagcaaacaaattgagagtgcttgcttctccggcaccgcggcctttatggaagtccggatacagagcgtggttgtagaatttattctgaaccatgtcgatgttctttttagcggccggatctccatggccatgcaagaaggtgctgccagcctatctcgccctaagtcccttttggtgtcctcaccctccacgaagcttctcacactcgaggaggcccaagccaggacacaggcacaggtcaattcacccattgtgacggagaacaagtacattgaggtgggagaaggaccagccgcactgcagggcaagttccacactattattgagtttccattagaaagaaagaggcctcaaaacaaaatgaagaaatctcctgtaggcagttggcggagtttctttaacctgggaaagagtagcagtgtctctaaacggaaattacagaggaatgaatccgaaccttcagagatgaaagcaatggccttgaaaggtgggagggccgaagggacgctgaggagtgccaaaagcgaagaatcactcactagcctccacgccgtcgacggcgacagtaagctgttcagacctagaagacctagatctagtagcgatgctctgtcagctagcttcaacggggaaatgctcggaaaccggtgcaacagttatgataatctccctcatgataatgaatctgaggaggaagggggactcctgcatattccagctctgatgtcaccacactctgcagaggacgttgacctgagtcctcctgacattggagtcgcctcattagatttcgaccctatgtccttccaatgcagcccccctaaagcagaatctgaatgtctcgaatcaggtgcctccttcttagactctccaggttattccaaagacaaaccttctgccaataagaaagatgcagaaacaggatccagccagtgtcagactccagggagcactgctagtagtgagcctgtgtccccactccaggagaaactctcaccttttttcacactggacctgtcgcctaccgaggacaaaagctcaaaacctagcagctttactgaaaaggtagtgtacgcattctcaccaaaaattgggagaaaactgtccaaatcccctagcatgtccatctccgaacctataagcgtgaccttgccacctagagtcagcgaggtgattggaaccgtaagcaatactaccgctcagaatgcgagctccagcacgtgggacaaatgcgtggaggaaagagacgccaccaatcgcagcccaacccagattgtaaaaatgaagactaacgaaaccgtggctcaggaggcctacgaatctgaggtccagccattggatcaggtggcagccgaggaagtggagctccccgggaaagaggatcagagcgtaagctcctcacagagcaaggccgtggcttccgggcagactcagaccggagccgtgacgcacgacccaccccaggactctgtgccagtgtcgagcgtgagtctgattccaccaccccctccacccaaaaacgttgcgaggatgcttgctctcgctttggcagaaagcgcccagcaggccagtactcagtctctcaagagaccaggtacatcacaggcaggatacaccaattatggcgatatcgccgtcgcaaccacagaggacaacttatccagctcttattctgcagtcgccctagataaggcttacttccagacagaccggccggccgagcagtttcatttacagaacaacgctcctggaaactgtgaccatccactcccagagacgaccgcgacaggagaccctacacattcgaatacgacagaatctggtgagcagcaccatcaagtagacttgacaggtaaccagccccaccaagcctatctttctggcgacccagagaaggccaggataacctccgtgcccctcgatagtgagaagtcagatgaccacgtctctttccctgaagatcaatcaggcaagaacagtatgccgaccgtgagttttctcgaccaagatcaaagtcctccccggttctacagcggcgaccagcctcctagctatttaggtgcttcagtggacaagctgcaccatccactggagtttgccgataagagcccgactccccccaatctcccgagcgataagatctaccccccatccggatcacccgaggagaacactagtactgccaccatgacttatatgacaactaccccagccaccgcccagatgtccacaaaggaggctagctgggacgtcgcggagcagccaacaacagccgacttcgccgctgctacgctccaaaggacgcaccgcactaataggccactaccgccccctcccagccagaggagtgcagagcagccaccggtcgtgggacaggtgcaggccgcgactaacatcggcctgaataactcccataaggttcagggggtggtgcctgtccccgagaggccaccagagccccgcgccatggacgaccctgcctccgctttcatctccgactcaggtgccgctgcggcgcagtgccccatggcaactgctgttcagccagggctccccgaaaaagtgcgcgatggtgctcgcgttccactgcttcatctgagagcagagagtgtaccagctcacccttgtggctttcccgccccactcccgcccaccagaatgatggagagtaaaatgattgcagcaatccactcttcatcagccgatgctacctcttccagcaactatcacagtttcgttaccgcctctagcacgtccgttgacgatgccctgcctctgcccctacctgttccccagccgaagcatgcctcacaaaagaccgtctatagttcattcgctcggcctgacgttactaccgaacctttcggccccgataactgcttacattttaatatgacacctaactgccaatacaggccgcagagtgtgccaccgcaccataataaactggagcagcatcaggtatacggcgcccgaagtgaaccacctgccagcatgggcctgcggtacaatacctacgtggcaccaggaagaaacgccagtggccaccacagcaaaccttgttctagagtagagtacgtttcttccctttcttcctctgttcggaacacgtgctatcctgaagacatccccccttaccctactatacgccgcgtccagagtctgcacgcgcctccctcaagcatgattagatcagtccccatcagccgtacagaggtgcccccggacgatgaacctgcttactgtccacgcccgctttaccagtataaaccatatcaatcatcacaggccaggtctgactaccacgtgacccaacttcagccctattttgaaaacggtcgcgttcactatcgctactccccttatagctccagtagcagctcttactactctcccgacggcgctctctgcgatgtggatgcctacggaacagtgcagctgagacctctgcataggttgcccaaccgggattttgccttttataatccgcggctgcaggggaagtcgttgtactcctatgctgggcttgctccccggcctcgggctaatgtgaccggctacttctctccaaatgatcataacgttgtttcgatgcctcctgcagccgatgttaagcacacctatacctcttgggacctggaagacatggagaagtacagaatgcaatctatcaggagggaatcaagggctcgccagaaagtcaagggacccgtgatgtctcagtacgataatatgacccccgcagtgcaggacgatttgggcggtatctatgtgatccacctcaggtccaaatcagacccggggaaaaccggcttgctgagcgtggccgaaggtaaagagagcaggcacgccgcaaaggctattagtccagaaggcgaggatagattctaccgtagacaccccgaagccgaaatggacagagcacaccatcacgggggtcacggatcaacccagccagagaaacctagcttgccacaaaagcaatccagcttacggtctcgaaagctccccgacatgggctgctccctgcccgagcaccgggctcaccaggaagcctctcaccggcagttctgtgagagcaagaacggaccaccttatccccagggtgccggtcagctggactatggaagtaaagggatccctgacacatctgagccagtgagctaccataactcaggagtgaagtatgccgcttccggccaggagtccctgcgcttgaatcacaaagaagtgcgcctctctaaagagatggaacgaccctgggtgagacaacctagcgccccagaaaagcacagcagagattgctataaagaggaagaacacctaacccagtcgatcgttccgcctccgaagcctgaaagaagtcactctcttaagctgcaccacactcagaacgttgaacgggacccttccgtgttgtaccagtaccagccacacgggaagcggcagtccagcgtcacggtggtctcccagtatgataatctggaggactaccacagcctgccccagcatcaacgcggtgtgtttggcggtggtggtatgggtacatacgtcccacctggattcccacatccgcagtctagaacatacgcgacagcccttggtcagggcgcgtttctccctgccgagctctctcttcagcacccagagactcagattcacgccgagtag

SEQ ID NO: 54466 - DNA, 2865 bp, Artificial Sequence
  derived and/or modified sequence
gactacgaggagaccagcaagaaggaggcccggggcgccgacgtgcctgagatccccggcgacctcaccctgaagacgtgtggttctacagcctcaatgaaagttaaacacgtaaagaaactccctttcacgaaaggacacttccccaagatggctgagtgtgcgcactttcattacgaaaatgtggagttcggcagcatccaactgtctctgtctgaggagcagaatgaagtcatgaaaaacggttgcgagagcaaggaactggtttatctagtgcagatcgcctgtcagggcaagagctggatagttaagcggagctacgaggatttccgggtgctggataagcacctgcacctgtgcatatacgatcggcggttctcacagctgagtgaattgccccgctctgacactttgaaggatagtcctgagagcgtgacccagatgttgatggcctatctgagtcgcctatcagcaatagctgggaataagattaactgtgggcctgcactgacatggatggagatcgacaataagggtaaccacttgctcgtgcacgaggagagttccatcaataccccagctgtgggggctgcccacgtgataaagaggtacaccgccagggcacccgatgagctaacactcgaggtaggtgacattgtttccgttattgatatgccgcctaaagttctttcaacatggtggagagggaaacatgggttccaagtgggactcttccctggccattgtgttgagctgattaaccagaaagtcccccagtccgtgacgaatagcgtgcccaaacctgtgagcaaaaaacacggtaagctgatcacctttttacggaccttcatgaagtccagacccacaaagcagaaattgaagcaacgggggatcctcaaggaaagagtgttcggctgcgacctcggcgagcacctattgaattccgggttcgaggtgcctcaagtgcttcagtcttgtactgcctttatcgagcgttacggaattgttgatggaatttacaggctgtccggcgttgcatccaatatccaacgccttcgacatgaattcgatagcgagcacgtccctgatctgactaaggaaccatacgttcaagatattcactccgtgggctccttgtgtaaattatatttccgcgagctgcctaaccccctgttaacataccagctgtatgaaaagttctcagatgccgtcagtgccgcaacagatgaggagagactgatcaaaatccacgacgtcattcagcaattgcctccacctcattatcggacactcgagtttctgatgcggcatctgtctctccttgctgactattgctcgatcactaatatgcacgcaaaaaatttggcgatcgtatgggccccaaatcttttgcgctcaaagcagatcgaatctgcctgttttagcgggacagctgcctttatggaagtgcgaatccagtctgttgttgttgagttcatcctgaatcacgtcgacgttttgttctctggcaggatctcaatggccatgcaggagggtgccgcgtccttgagtcgccctaaaagcctgttggtatcctcaccttctacaaaactactcaccttggaagaagctcaagcccggacacaggctcaggtgaatagccccatcgtgacggagaacaaatatattgaagtaggagaagggcctgctgccctacaggggaagtttcatactatcattgaatttcctctagaacgcaagcgccctcagaacaaaatgaaaaaatccccagtcggatcatggagatctttttttaacttgggtaaatcatcctccgtgagtaagcggaaactgcagagaaacgaatccgaaccatctgagatgaaggccatggctctcaagggcggcagggcagagggtaccctgaggtccgcgaagtcagaggagagtctgacttcactccacgcagtggacggagatagcaagttgttccgtcccagaaggcctcgcagcagctccgatgctctgtctgcttcgtttaacggtgaaatgctaggcaacagatgcaacagctacgacaacctgccccatgataatgagtccgaagaggagggtggcttgctccatattcccgcattaatgagcccgcacagtgcagaggacgtagaccttagtccacccgacatcggtgttgcttcattagacttcgatccgatgagctttcagtgctcaccaccaaaggctgagtccgagtgtttggagtccggcgcctccttcctggactcacccggttattctaaggataagccaagcgccaacaagaaggacgccgagacagggtcgagccagtgccagactcctggttctaccgcctccagcgaaccagtgagccccctacaagagaagttgagcccctttttcactctcgacctctcaccgaccgaggacaaaagttccaagccaagtagtttcaccgagaaagtcgtctatgctttttccccaaaaattggacggaagctgtccaagtccccgtcaatgtccataagtgaaccaatcagtgttaccctgccgcccagagtgagtgaagtgattggtaccgtttcgaacacaacagcacagaacgctagcagttccacatgggacaaatgcgttgaagagcgagacgccactaatcgctccccaacacagatagtcaagatgaaaactaacgagaccgtggcccaggaagcctacgagtctgaggttcagcccttggaccaggtcgcagccgaggaagtcgagctccccggcaaggaagatcagtccgtgtcctcttcccagtcaaaggccgtggcctccggacagacacagaccggcacagtgtgttttcctcccttctttctctag

SEQ ID NO: 54467 - DNA, 6264 bp, Artificial Sequence
  derived and/or modified sequence
atggagaccgagtccgagtcgagcaccctgggcgacgatagcgtattttggctggaatctgaagtgattatccaggtgaccgactgcgaggaagaagagagggaagaaaaattccgaaaaatgaagtcttctgtacatagcgaggaagatgattttgttccggaattgcacaggaacgtccaccctagggagaggcccgattgggaggagacactctctgccatggctaggggggctgacgtccccgagattccaggagatctgaccctcaagacttgtgggtccaccgcctccatgaaggtgaagcacgtaaagaagttgccattcaccaagggacactttccgaaaatggccgagtgtgcgcacttccactacgagaatgttgaattcggatcaatccagctctccctgagtgaagagcagaatgaagtgatgaagaacggttgcgaatctaaagaattggtatatctggtgcagatcgcttgtcaaggaaagtcctggattgtgaagagaagttacgaggattttcgcgtattggacaaacacctccacctctgtatttacgacagacggtttagccagctgtccgaactgccacggtcagataccctaaaagattcccccgaatcggtcactcaaatgctgatggcttatttatctcggttgtcagcaatcgccggaaacaaaatcaactgcggaccagcactgacatggatggaaattgataataaaggcaaccatcttctggtccacgaggagtcatccatcaatacaccagccgtgggggcagcccatgtgatcaagcggtacaccgcacgggcaccagacgagctgacacttgaggtgggcgacatcgtgtccgtcattgacatgcccccaaaggtgttgtcgacctggtggcgcggtaagcacgggtttcaggtgggactttttcccggtcactgcgtggagttgattaatcaaaaagtcccacagtcagtcaccaattctgtgcccaagccggtaagcaaaaagcacggaaagttgataaccttcctgcgcacttttatgaaaagccggcctacaaaacagaaactgaagcaacgaggaattttaaaagaaagggtgtttggctgcgacttaggagagcacctgttaaattccggtttcgaggtgcctcaggtgctgcagtcctgtaccgctttcatcgaacggtatggtatagtagacggaatctatcggctgtccggagtcgcgagcaacatccagcgactgaggcacgagtttgactccgaacacgtgccggacctgaccaaggagccatatgttcaggatatccattccgtgggttctctgtgcaaactgtatttccgcgagttaccaaatccactgctgacctatcaactctacgagaagtttagcgacgcagtgtctgcggcaactgacgaagagcggctgatcaaaattcatgacgtcatacagcagttgccccctccccactaccggaccctagagtttctgatgagacacctgagcttgctggccgactactgttccattacaaacatgcacgctaagaatctcgctatagtgtgggcccctaacttactgaggtctaaacaaattgagtctgcatgcttctctggaactgccgcatttatggaggtcaggatacagagcgtggttgtcgagttcatcctaaaccatgtggacgtgctattcagcgggagaattagcatggccatgcaggaaggggctgcaagcctaagtagaccaaagtctctcttggtttccagcccctccacaaagttgttgactctggaggaagcccaggccaggactcaggcccaggtgaactcccctatcgtgaccgaaaacaagtatatcgaagtcggagaaggaccagccgcactacaaggtaagttccatactatcatcgaattcccactggaacggaaaagaccccaaaacaaaatgaagaagagccccgtggggtcgtggagaagcttttttaatctaggtaagtcctcctcagtgtctaagcggaaactacagaggaatgagagcgagccatctgagatgaaagcgatggcgttaaaaggaggacgagcagaaggaactcttcgctctgcgaagtcagaggagtccttgactagcctgcacgcagtcgacggggactctaagttgtttcgcccacgccgacctagaagtagcagtgatgcccttagcgcgagctttaatggcgaaatgcttgggaaccggtgtaattcttatgacaatctgccccacgataacgaatccgaggaagaaggaggcctcctccacatccccgctctgatgtccccacacagcgccgaggacgtggacctttcaccgccagacatcggggtggcgtcactggatttcgatcctatgagctttcaatgttcacctcctaaggccgagtcggagtgcctggaatccggggcaagctttctggatagcccgggttacagcaaggacaagccgtccgccaacaaaaaggacgctgaaacggggagttcacagtgccagacacctggctccacagcaagttccgagcctgtaagtcccctgcaagagaaacttagtcccttctttaccctggatttgagtcctacggaagataaatcttctaaacctagcagcttcactgaaaaagtcgtatacgcattctctcccaagatcggtcgtaaacttagtaaatccccatcgatgagcattagcgaaccgatttctgtcacactgcctcccagagtgtctgaagttatcggcacggttagcaataccaccgcccagaacgcttctagtagtacgtgggataagtgcgtggaggaacgcgatgctaccaaccgtagtcctacccagattgtcaagatgaaaacgaacgaaactgttgcgcaagaggcctacgagtctgaagtgcagccattggaccaggtggctgccgaggaagttgaactgcccggaaaagaagatcagtctgtatcctctagtcagtccaaggctgtagcgagcggccaaacccagacgggcgcagtgacacatgaccctccacaggatagcgtgcctgtctcgtccgtaagtttgatcccaccaccaccgccaccaaagaacgtcgcccgaatgttggcgctggcactagccgaaagtgctcagcaggccagcactcaaagtctcaagcggccaggtacatcccaagccggatacaccaattatggggacatcgccgtcgctacgaccgaggacaacttaagctccagttacagtgcggtggcactcgacaaggcctattttcaaactgaccgccctgcggagcagtttcacttacaaaacaatgcacccggaaactgcgaccacccgcttcccgaaacaaccgccaccggcgaccccacgcatagcaacaccactgagtccggggagcaacaccatcaggtggacctcacagggaaccagccccaccaggcctaccttagcggggaccctgaaaaggcaaggattaccagcgtgcccctggatagcgagaagtcagatgatcatgtatcattcccagaagatcagtccggcaaaaattccatgcccacagtttcattcctggatcaggatcaaagcccaccccgattttactcaggggaccagcctccaagctacttgggcgcaagcgtcgacaaactccatcaccccctggagtttgccgacaagtcccctaccccaccaaatcttccaagcgacaagatttaccctccatccggctctccagaagaaaataccagtacagcaacaatgacttacatgacaaccacaccagccacagcccagatgtccacgaaagaagcttcctgggacgtggccgagcagcctaccactgcagactttgctgccgcaacacttcagcgtacccaccggaccaacagacctttgccgcctccgccttcccagagatccgctgaacaaccgccagtcgttgggcaggtacaggccgctaccaatatcggattgaataactcacataaagtgcagggtgttgtccccgttccagagcgacccccagaacccagggccatggatgaccctgccagcgcttttatttctgattccggagctgcagccgctcaatgccctatggctacggcggttcagccgggactgccggaaaaggtgagagacggagccagggtgcctctgctccacctccgggctgagagcgtccctgcccacccctgcggattccctgcccctctgcctccaactaggatgatggagagtaagatgatcgccgcaatacactcatcatccgccgacgccaccagctcttccaactaccacagctttgtaacagcctcatctactagcgtggacgatgccctgcctctcccccttccggtcccgcagcccaaacatgcaagtcaaaaaactgtttactctagcttcgccaggcctgacgtgacaacggagccattcggcccagacaactgcctccatttcaatatgacccccaattgccagtatcgcccacagagcgttccaccccaccataacaaactggagcagcaccaagtttacggggctcgcagtgagccccctgccagcatgggactccgttacaatacttatgtggcgcctggccgaaatgcctctggccaccattctaagccgtgttcacgagtggaatatgtatcgtcactgagttcctcagtgagaaatacctgctatcctgaagacattcccccttatccaaccattcgacgcgtgcagagtctgcatgctccaccctcctcaatgatacggagcgtcccaatttcacgcacagaagtgcctcccgatgacgagcctgcttactgcccacggccattgtatcagtataagccttatcagtctagtcaggcaaggtctgactatcacgtgacacagcttcagccttacttcgaaaacgggagggtccactaccgatacagcccgtactcgtcttcgtcctcttcatattattcgccagacggggctttatgcgacgtcgatgcgtacggaaccgttcagctccgacctttgcatcgcctgcccaatcgcgatttcgcgttctacaatcccaggctgcaggggaaaagcctttactcatacgccggtttggctcctcgcccacgcgctaacgtgaccggctacttctcgcctaacgatcacaatgtagtgagtatgcccccagcagcagacgtcaagcatacctatacgtcttgggacctggaagacatggagaagtaccgtatgcagtctatccgcagggagtcacgtgcaaggcagaaggttaaaggaccggtgatgagtcagtatgataatatgacacctgcagttcaggatgaccttgggggaatctatgttatccacttgagatctaaatctgatcctggcaaaactggcctactgagtgtcgcggaaggcaaggaaagcaggcatgcagctaaggcaatctccccagagggtgaggatcgtttttaccggaggcatccggaggccgagatggatagggcccaccatcacggcggacacggatctacacaaccagagaaaccaagcttacctcagaaacagagttcgctgcggtcacggaagttgccagatatggggtgttctctccccgagcatagggcccaccaagaagcctcccaccgccagttctgtgaaagtaaaaatggacctccatacccacaaggagctggccagttggattacggcagtaaaggaataccggacacgtcagagcccgtgagctaccataacagtggagtgaagtacgctgctagcggccaagagtctctgcgcctgaatcataaggaggtaaggctgtctaaagagatggagcggccttgggtgcgacagccatccgccccagagaagcattcacgcgattgctataaagaggaggagcatttgacacagtctattgtgcctccccctaagccggagcgaagccacagcctgaaactacaccacacgcagaatgttgaacgagatccgagcgtactgtatcaataccaacctcacggcaagcgtcagtctagtgtgaccgtggtgtcccagtacgacaacttggaagactatcacagtctgccccagcatcagaggggcgtttttggagggggagggatggggacatatgtccccccaggcttccctcatccacaatctaggacttacgctacagcattaggccagggggctttcctgccggcagaactcagtctccagcatcccgagacacaaattcacgctgagtat

SEQ ID NO: 54468 - DNA, 2865 bp, Artificial Sequence
  derived and/or modified sequence
gattacgaggaaactagtaaaaaggaagcacgaggcgctgacgtgcctgagatccctggcgatctgaccctaaaaacgtgtggaagcacagctagtatgaaagtaaagcatgtcaagaaacttccttttaccaagggccactttccaaagatggccgagtgcgcacatttccactatgaaaacgtagagtttgggtcaattcagctgtccctttcagaggaacagaacgaggtaatgaagaatggctgtgagagcaaggaacttgtttacctagtccaaattgcctgtcaggggaagtcgtggatcgtaaagaggtcttacgaggactttcgcgtgctggataagcatttgcacttgtgcatttacgaccgcagattctctcagctgtcagaacttcctcgtagcgatacgctgaaagacagccctgagtctgtaacacagatgttaatggcatatctgagcagactgtcggccatcgctggaaataagatcaactgcggtccggcactgacttggatggagatcgacaacaaagggaaccaccttctcgtccacgaggaatcttctatcaatacccccgctgtgggtgctgcacatgtgattaagagatacacagcgagagcacccgatgagctgacgctagaggttggtgacatagtatcagtcatcgacatgccaccaaaggtgctttccacatggtggcgagggaagcatggattccaggtcggcctcttcccgggacactgtgtggagttgattaaccagaaagtgccccagtccgtgacaaactccgtgcccaagccagtatctaagaaacacggaaagctgattactttcctccggacctttatgaaaagcagaccaactaagcagaagctgaagcaaagagggatcctgaaggagcgcgtatttggatgtgaccttggggagcatttactgaacagcggctttgaggtaccgcaggtgttgcagtcctgcacagcgttcatagagagatatgggatcgttgatggcatatacagacttagcggggtggctagcaacattcagaggctcagacacgagtttgattccgagcacgtgccagacctcacaaaagaaccctatgtacaggatatccatagtgtaggctctctatgcaagctgtacttcagagagcttccgaacccgctccttacttatcagctgtatgagaagttttccgatgccgttagcgcagccaccgatgaggagaggctcataaagattcatgatgtcatccagcagttgccaccaccccactaccggactttagagttcctgatgagacacctgagcttactggcggattactgtagcatcaccaacatgcacgccaagaacctcgccatagtttgggcaccgaacttactgcggagcaagcagattgagtctgcctgcttctccggcactgcggcatttatggaagtgagaatccaatccgtggtcgtggagttcatacttaatcacgtcgatgttctgttctcggggaggatatcaatggccatgcaggaaggtgcagcaagtttaagcaggcctaaaagtctcttagtcagctctcccagcactaaattactgaccctcgaggaagcccaagccagaacacaggctcaagtcaattcaccaattgtgactgaaaataagtacatcgaagtaggtgaaggcccagcggcactccagggtaagtttcataccatcatcgagttccctttagagcggaaacgtcctcagaataaaatgaagaagagccctgtgggctcttggagatccttcttcaatctcgggaagagctccagcgtgtcaaagcggaaactgcagcgaaatgaatccgagccatctgagatgaaagccatggcgttgaaaggcggaagagccgagggcacactgcgctcagccaagtcagaagaaagcctcacttcccttcatgcagtggacggcgactcgaagctgtttcgaccgaggcggcctagatctagttccgacgccctgagcgccagctttaacggggagatgcttggcaatcgttgcaattcttacgacaatctgccccacgacaatgaaagcgaggaagagggcggactactgcacatccctgcattaatgtcacctcactcagcagaggatgtagatctgagtccgcctgatattggggtagcttcactcgattttgatcctatgagttttcagtgctcccctcccaaagcggaatccgagtgtctagagtccggcgcatcattcctggactctcctggatatagcaaagacaaaccttctgctaacaagaaagacgctgagactggatcttcacagtgtcagacccctggcagcacagcttcttctgaacctgttagtcccttacaggagaagctttcccccttcttcaccctcgacctgtcacctactgaggataagagttccaaaccatcctcatttacggaaaaggtcgtatatgccttttccccgaaaattggcagaaagctgagtaagtctccctccatgtccatttctgaaccaatcagcgtcactctgccccctcgagtgtctgaggtgattgggacggtgagcaataccaccgctcagaacgcctcttcctctacttgggacaaatgcgttgaagagagagacgccaccaaccgctccccgacacaaatcgtgaaaatgaaaacaaatgagacagtggcacaggaggcatacgaaagcgaagtacaaccccttgaccaggtggctgccgaagaggtggagttgccagggaaagaagatcaatctgttagttcctcacagagtaaggcagttgcgtcagggcaaactcagacagggacagtctgctttcctccattctttctctag

SEQ ID NO: 54469 - DNA, 10077 bp, Artificial Sequence
  derived and/or modified sequence
atggagactgaaagtgagagtagcactttaggggatgacagtgtcttctggttggagtctgaagttataatccaggtgactgactgtgaagaggaagaaagggaagagaagttcaggaagatgaagtcctcagtacattctgaagaagatgattttgttccagagctacatagaaatgtacaccctcgagagcggcctgattgggaagaaactcttagcgcaatggcaagaggcgcagatgttccagagattcctggagatcttactcttaagacgtgtggcagtacagccagtatgaaggttaagcatgtgaaaaagttacccttcactaaaggtcactttccgaagatggctgaatgtgcgcatttccattatgagaatgttgagttcggcagcatacagctttcactttcagaagaacagaatgaagtaatgaaaaatggctgtgaatctaaagagctggtctacctcgtgcagattgcttgtcagggaaaaagttggattgttaaaagaagttatgaagattttcgggtacttgataaacatcttcatctgtgtatttatgaccgaagattttcccagctctcagaacttccccgttctgacaccctgaaggacagtccagagtcggtcactcagatgcttatggcttacctgtcacgcctttcagctatcgctggcaacaagatcaactgtgggcccgcccttacctggatggagattgataataagggaaatcaccttttggttcatgaggagtcatccatcaacactcctgctgtcggtgctgcccatgttatcaagaggtacactgctcgggcccctgacgaactgaccttagaggtgggagacattgtttctgttattgacatgcccccgaaagtgttaagcacatggtggagaggcaagcacggattccaggtgggactcttccctggacactgtgttgagttaattaaccaaaaagttccccagtcagtgaccaactcagtgccaaaaccagtgtctaaaaagcacggcaagctcattacgttcttacgaacattcatgaagtctcgtccaacaaaacagaagctgaagcagcggggaatcttgaaagagagggtgtttggttgtgacctgggggaacaccttctaaattctggttttgaagtgccgcaggttcttcaaagctgcacagcattcattgagagatatggcatcgtggatggaatctatcgcctttctggtgttgcctccaatatccagagactacgccatgaatttgactctgagcacgtccccgacctgacgaaagaaccgtatgttcaggacatccattctgtgggttccctatgtaagctgtacttccgggaactcccaaaccctctgcttacctaccagctgtatgagaaattttctgatgcagtttcagcagcaacagatgaagaaaggctgataaaaatccacgatgtcatccagcagctccccccaccacactacagaacactggagttcctgatgagacacttgtctcttctagctgactattgttccatcacaaatatgcatgcaaaaaatctagcaattgtttgggctccaaacctgttaagatcaaaacagatagaatctgcctgcttcagtggaacagcagctttcatggaagtgaggattcagtctgtggttgttgagttcatcctgaatcacgttgatgtgctgttcagcggcagaatcagcatggccatgcaagagggggcagcttctctatcaaggcccaagtccctcctggtatcctctccatccaccaaactgctgacattggaagaggcccaggcacgaacacaagctcaggtcaattctccaattgtgacggaaaataaatatatcgaagtaggagaaggacctgctgcacttcaggggaaatttcataccataattgagttcccacttgaaagaaagaggcctcaaaataagatgaaaaagtctcctgtgggtagctggcgttcctttttcaacttggggaaatcatcatctgtttctaaacgaaagctgcagcggaatgagagtgagccttcagagatgaaagccatggctctgaaaggtggcagggcagaaggaaccctccgttcagctaaaagtgaggagtctcttacatctctccatgcagttgatggtgattctaagctcttccgacccagaagacccagatcttccagtgatgcactgtctgcctcttttaatggagaaatgctggggaaccgctgtaactcctatgataatctgcctcatgacaatgagagtgaggaggaaggagggctgcttcatatcccagcccttatgtctcctcattcagctgaggatgttgacttgagcccaccagacattggagtagccagcctggattttgatccaatgtcatttcaatgtagtcctcctaaggccgaatcagaatgtctggagagtggtgcttcctttttagattcaccaggatactccaaggataaaccaagtgccaataaaaaggatgcagaaacaggtagtagccaatgtcagactccaggaagcacagcaagctctgaacctgtctctcctcttcaggagaaactgagtccattctttaccctggacttgagcccaactgaagataaatcatctaagccatcctcctttactgaaaaggtcgtctatgctttctctccgaagataggacggaaattaagcaaatcaccttctatgagcatatctgagccaatttcagtgaccctaccaccacgggtgtcagaagtcattggtacagtctcaaataccacagctcagaatgcatcatcttcaacctgggacaaatgcgttgaagaaagggatgccacaaatagatcccccacccagatagtaaagatgaaaacaaatgagacagttgcccaagaagcatatgaatctgaagtccagcccctggaccaggtggctgctgaagaagtagaattgccagggaaagaggatcagtctgtctcaagcagtcagagtaaggctgtagcttctggacagactcagacaggagcagttacccatgacccccctcaggattccgttcctgtcagttcagtctctcttatcccaccaccaccgcctccgaaaaatgttgcccgaatgttggcgctagcattagctgagtccgcacagcaagcctcaactcagtcattgaagagaccagggacctctcaggctgggtatacaaattatggagacatagcggtggctacaactgaagataatctgtccagttcttactctgcagttgctctagataaggcctatttccaaaccgatcgaccagcagagcagttccacctccagaataatgcaccaggaaactgtgaccatcctctaccagagacaacagctactggggatcctacccattccaacacaactgaatctggggagcaacatcaccaagtagacttaacagggaatcagccacatcaagcatatttatctggggacccagaaaaggccagaattacttcagttcccttagactcagagaagtctgatgatcatgtaagtttccctgaagaccagtctgggaagaacagtatgccaactgtctccttcttggatcaggaccagtctccaccccgtttctacagtggagatcagcctccttcttatcttggtgcaagtgtggataaactccatcaccctttagaatttgcagacaaatctcccacacctcctaatttacctagcgataaaatctaccctccttctgggtcccccgaagagaataccagcacagccaccatgacttacatgacaactactccagcaacagcccaaatgagcaccaaggaagccagctgggatgtggctgaacaacccaccactgctgattttgctgctgccacacttcagcgcacgcacagaactaatcgtccccttccccctccgccttcccagagatctgcagagcagccaccagttgtggggcaggtacaagcagcaaccaatataggattaaataattcccacaaggttcaaggagtagttccagttccagagaggccacctgaacctcgagccatggatgaccctgcgtctgccttcatcagtgacagtggtgctgctgctgctcagtgtcccatggctacagctgtccagccaggcctgcctgagaaagtgcgggacggtgcccgggtcccgctgctgcacctgcgcgccgagtctgtccctgcgcatccctgtggctttcctgcaccactgccccccaccaggatgatggagagtaagatgattgctgccatacactccagcagtgcagatgccaccagcagttcaaattatcattcctttgtcactgcttcatccacctctgtggacgatgcattgcctttaccacttcctgtcccacaacctaagcatgcttctcagaaaacagtttactcctcctttgctaggcccgatgtcaccactgaaccctttggtccagataactgtttgcatttcaatatgactccaaactgccagtaccgtccccagagtgtacctccccatcacaataaattggagcagcaccaagtgtatggtgccaggtcagagccaccagcctccatgggtcttcgttataacacatatgtggccccaggaagaaacgcatctggacaccactccaagccatgcagccgggtcgagtatgtgtcttctttgagctcctctgtcaggaatacctgttaccccgaagacattccaccgtaccctaccatccggagagtgcagtctctccatgctccgccgtcttccatgattcgctctgttcccatttcacggacagaagttcccccagatgatgagccagcctactgcccaagacctctgtaccaatataagccatatcagtcctcccaggcccgctcagattatcatgtcactcagcttcagccttactttgagaatggccgggtccactacaggtatagcccatattccagttcttctagttcctattacagtccagatggggccctgtgtgatgtggatgcctatggcacagtccagttgagaccccttcaccgccttcccaatcgagactttgctttctacaatcctaggctgcaaggaaagagcttgtacagttatgctggtttggctccacgtccccgggccaacgtgactggctatttctctcccaacgaccataatgtagtcagcatgcctccggctgctgatgtgaagcacacctacacctcatgggatcttgaggacatggaaaaataccgcatgcagtccatccggagagagagccgtgctcggcagaaggtgaaagggcctgtcatgtcccaatatgataacatgaccccggcggtgcaggacgacttgggtgggatctatgtcatccatctgcgtagtaaatcagatcctgggaaaactggacttctctcagtggcagaaggaaaggagagccgccatgcagccaaggccatcagtcccgagggagaggaccgcttctataggaggcatcccgaggcagagatggacagagcccaccatcacggaggccatggtagcacgcagccggagaagccatccctgcctcagaagcagagcagcctgaggagcaggaagcttcctgacatgggctgcagtcttcctgagcacagggcacaccaagaagcaagccataggcagttctgtgagtcaaagaatgggcccccttatccccagggagctggccagttagattatgggtccaaagggattccagacacttctgagccagtcagctaccacaactctggagtaaaatatgctgcatccgggcaagaatctttaagactgaaccacaaagaggtaaggctctccaaagagatggagcgaccctgggttaggcagccttctgccccagagaaacactccagagactgctacaaggaggaagaacacctcactcagtcaatcgtcccaccccctaaaccagagaggagtcatagcctcaaactccatcatacccagaacgtggagagggaccccagtgtgctgtaccagtaccaaccacacggcaagcgccagagcagtgtgactgttgtgtcccagtatgataacctggaagattaccactccctgcctcagcaccagcgaggagtctttggagggggcggcatggggacgtatgtgccccctggctttccccatccacagagcaggacctatgctacagcgttgggtcaaggggccttcctgcccgcagagttgtccttgcagcatcctgaaacacagatccatgcagaatgagccctgcgagcaatagagttgaagcagcctctgctggacagtggactgttctatttttttcaataaccaaaaagattaaacaaaaaatactataaaacccctgaccacatttaaaaaatgataataaaagtaaacaaatcagcatctttttccccttccctgcttcattaccccctcttccatctatagactttgtcatttttgtctttagaaaagatctgaaggatggtaaagccccgtgctgaaacccagtagagaaacctgtctcaggacacacttgccatctagggctagcttgaaagagcctgaggactgcctttaactgaatttgaattcagcattgtcctttcttcttagtatttgctgcataattgagagcagttcacatcgatttcctggtaggcgtctgcattccctgttgtgttcctgcttctccttcagtagctgcacaacttgcgcagatcgacacactgttgtcacttcattctccccgtctgagaaggatcttgtgttcagttagagtcgtggaaaaatccctgatccttcaaggtcagtcagacagttggcaacattataattaaaaataagaaattaagactttaaattaaacatttggtagagtcatcataaaacaccagaccacttagactcaggctgaaccatactctttctattcttatttttcatccttgttcctcacggttcagtgaacaggctcatatcatgacagaatggacttttaaaagttagtacttaaggaaacttctttaggtggaagaaagtaaagttcttattgtcagtgaactttattagcaccagaaatctctattgatgcttttaatgcattgcctgccttcaggttttcttcttaccccacccctcaataagatttggtgaattgtaattctagtaaaacatgtcataccattggttttcctaaattatcaactttctttcattaaaaaaaaaaaaaaaaaaaaaagcccagcatggtttgactggatagacacgcataatttattatgaatataaatttccatgtttgtttctgttcctaaaccagagtacgaggtccctgggaatttaagtagctacgcattatctattattagactgcaagttcctgcaataactgcttagttcacagccccgtttcaccagtggagttctgggcagttattgctgtcctaaggcattactgtcgtttgcttactctatacttgtgtggtcacagtcttcttgtaattaccatctacaccagcatttcaggtatagctctttataactctggagacatgtaaaacatgtttaacacccacgagttttgaaagttgcattccttattagagtaggaactctctagcccaactccattctatgttctcagctccctccaccccccaaaatacatcagactagcaaggcagtcctatgtttacaaaacgagtttagattgtcatttcattccataactcttaataatactcaagttttatacattcacgtattttaaatgctcggtctgtagaagacactaggagaattgcattccaattactggatggttgctgctctggctttttagaacttgaaattaatttttatttagagcaaaggaggaaatcttttaagaggctaaaatcatgctgctattattgctgtgaaattgtataaagattaggattcatgccagtttttattttaaaaaataatgtgcattttaagggtttatatttagaaaaaaataaaatgtttcaagaacaacacattgatatgtggaaatattctataaggttttcttttgttcccttagaattcattggagggatgcagtaaaaactgtagtagaaaccttgaaacacccatatgtgaaaaggtctgtggaaattgaggcctctacattaaaagtgcagaaccaactgttttacagtcaaagtgctaggaaacctgataggatacttccctttggcacaaaaacaccctgggtgctacatacaggagtatgacctttggtgaatatgtggcactaattttttttaccttaatcatattcttgtcaagtaggcaacccattgccccttggagaccacaccagccctgtaagttctcaccagcagcatggagattaggaagaggggctgctgtgaccaggagatacacacggctttaagtaactgagagcctaaagaaagtaacccagggagtccggtccagttttaatatttgtggatttgttgtcacacacattgtttagtcctgaaactaaaacctattttataaatagtagggttaattcctcgaaacaatttctttattaataaatgtcctgtgggtttagaaatatcaggtaaatatttgaatacagaatgatgattgcaattactgttacaagcgtgaaacacaaacttcagatcaaatctagagttgcttcatttaatgcatgctagcaacagccttaactttggattcagttatttgaaacacttttccggcatctttccctttctaatgttgtggggtggaaaccggatggcaaatcactgtgagccggatacctcagcacagtccaccttgtgtgtgacttcacaaatgggggacttcacaaatggggtaactgaatgttattactttcaaattttgacatggagcattatgatcaaggaaatggagctgccttatacattaaacccgtgatttaatcctattgacattttcatagccatgcctccagattttatctttttggcaaaattctgattccacagtttggtctgattgaaataaatattccctggacgtctggctaaaaattttgctaacaatcccagaggtgccattttcttattaataaatttcattggagccttatttcttactatattcaatttcgtttcaaacctgcaagtccctgggatggtcccacgactagggcctgcacatttcttacaatggcaaagcattttttaaaatttagggtcaggttgaaaaattctaggactaattctgtagagaggagggactgttaactaacgtgagtggggacggaggagtaggttaccacatttggagcagtaatagatgcaaacgatgtaaatttgaaatttgcccctttagttaaagaaggagcctgcaaagtccatttctctgttttcagccctgtcagtcacccatttaggatgttggcaaagtactgcttgagcagaatgtgtaagaaagtaataatgaaagcaaaagtatgtcagacagttacttcttccacatggttagaggcatgtgattttcagcactgtgtgttacagaaatgtcaggaatggtgtattataacgtgtgcaagataatgtcagtgtgcacagagggtcttttttccttatctgattagtactgttaatgttcaaagaataaaaatggttttacagtttagattctgagatagcaaaacctgatttttcaaccatgacctgcatgagagaagcatcctaggaagtcttagatcatacttttgagtttttaattttaatttatatagtgtttttttatgtcttaatatttttgtgaactggtgtaaattgttaatgcatataagcttgtgtatttttgtaaatagttttgtgatttatttcttgccccatatgtaaatatttagagtctcatttcttgcaaacttatttgaagctgagttgtgggtttgggttttgtttgtttctttggttgcagggtggggtggggggtggcaggggagggaggaagggatttttgtacctggagatggagatatcttgtggtttaaagcaaatgtcccactgaaagtgattc

SEQ ID NO: 54470 - DNA, 1839 bp, Artificial Sequence
  derived and/or modified sequence
atggagactgaaagtgagagtagcactttaggggatgacagtgtcttctggttggagtctgaagttataatccaggtgactgactgtgaagaggaagaaagggaagagaagttcaggaagatgaagtcctcagtacattctgaagaagatgattttgttccagagctacatagaaatgtacaccctcgagagcggcctgattgggaagaaactcttagcgcaatggcaagaggcgcagatgttccagagattcctggagatcttactcttaagacgtgtggcagtacagccagtatgaaggttaagcatgtgaaaaagttacccttcactaaaggtcactttccgaagatggctgaatgtgcgcatttccattatgagaatgttgagttcggcagcatacagctttcactttcagaagaacagaatgaagtaatgaaaaatggctgtgaatctaaagagctggtctacctcgtgcagattgcttgtcagggaaaaagttggattgttaaaagaagttatgaagattttcgggtacttgataaacatcttcatctgtgtatttatgaccgaagattttcccagctctcagaacttccccgttctgacaccctgaaggacagtccagagtcggtcactcagatgcttatggcttacctgtcacgcctttcagctatcgctggcaacaagatcaactgtgggcccgcccttacctggatggagattgataataagggaaatcaccttttggttcatgaggagtcatccatcaacactcctgctgtcggtgctgcccatgttatcaagaggtacactgctcgggcccctgacgaactgaccttagaggtgggagacattgtttctgttattgacatgcccccgaaagtgttaagcacatggtggagaggcaagcacggattccaggtgggactcttccctggacactgtgttgagttaattaaccaaaaagttccccagtcagtgaccaactcagtgccaaaaccagtgtctaaaaagcacggcaagctcattacgttcttacgaacattcatgaagtctcgtccaacaaaacagaagctgaagcagcggggaatcttgaaagagagggtgtttggttgtgacctgggggaacaccttctaaattctggttttgaagtgccgcaggttcttcaaagctgcacagcattcattgagagatatggcatcgtggatggaatctatcgcctttctggtgttgcctccaatatccagagactacgccatgaatttgactctgagcacgtccccgacctgacgaaagaaccgtatgttcaggacatccattctgtgggttccctatgtaagctgtacttccgggaactcccaaaccctctgcttacctaccagctgtatgagaaattttctgatgcagtttcagcagcaacagatgaagaaaggctgataaaaatccacgatgtcatccagcagctccccccaccacactacagaacactggagttcctgatgagacacttgtctcttctagctgactattgttccatcacaaatatgcatgcaaaaaatctagcaattgtttgggctccaaacctgttaagatcaaaacagatagaatctgcctgcttcagtggaacagcagctttcatggaagtgaggattcagtctgtggttgttgagttcatcctgaatcacgttgatgtgctgctgccacacttcagcgcacgcacagaactaatcgtccccttccccctccgccttcccagaaaacagtttactcctcctttgctaggcccgatgtcaccactgaaccctttggtccagataactgtttgcatttcaatatga

SEQ ID NO: 54471 - DNA, 8193 bp, Artificial Sequence
  derived and/or modified sequence
gattatgaagagacctctaagaaggaggcaagaggcgcagatgttccagagattcctggagatcttactcttaagacgtgtggcagtacagccagtatgaaggttaagcatgtgaaaaagttacccttcactaaaggtcactttccgaagatggctgaatgtgcgcatttccattatgagaatgttgagttcggcagcatacagctttcactttcagaagaacagaatgaagtaatgaaaaatggctgtgaatctaaagagctggtctacctcgtgcagattgcttgtcagggaaaaagttggattgttaaaagaagttatgaagattttcgggtacttgataaacatcttcatctgtgtatttatgaccgaagattttcccagctctcagaacttccccgttctgacaccctgaaggacagtccagagtcggtcactcagatgcttatggcttacctgtcacgcctttcagctatcgctggcaacaagatcaactgtgggcccgcccttacctggatggagattgataataagggaaatcaccttttggttcatgaggagtcatccatcaacactcctgctgtcggtgctgcccatgttatcaagaggtacactgctcgggcccctgacgaactgaccttagaggtgggagacattgtttctgttattgacatgcccccgaaagtgttaagcacatggtggagaggcaagcacggattccaggtgggactcttccctggacactgtgttgagttaattaaccaaaaagttccccagtcagtgaccaactcagtgccaaaaccagtgtctaaaaagcacggcaagctcattacgttcttacgaacattcatgaagtctcgtccaacaaaacagaagctgaagcagcggggaatcttgaaagagagggtgtttggttgtgacctgggggaacaccttctaaattctggttttgaagtgccgcaggttcttcaaagctgcacagcattcattgagagatatggcatcgtggatggaatctatcgcctttctggtgttgcctccaatatccagagactacgccatgaatttgactctgagcacgtccccgacctgacgaaagaaccgtatgttcaggacatccattctgtgggttccctatgtaagctgtacttccgggaactcccaaaccctctgcttacctaccagctgtatgagaaattttctgatgcagtttcagcagcaacagatgaagaaaggctgataaaaatccacgatgtcatccagcagctccccccaccacactacagaacactggagttcctgatgagacacttgtctcttctagctgactattgttccatcacaaatatgcatgcaaaaaatctagcaattgtttgggctccaaacctgttaagatcaaaacagatagaatctgcctgcttcagtggaacagcagctttcatggaagtgaggattcagtctgtggttgttgagttcatcctgaatcacgttgatgtgctgttcagcggcagaatcagcatggccatgcaagagggggcagcttctctatcaaggcccaagtccctcctggtatcctctccatccaccaaactgctgacattggaagaggcccaggcacgaacacaagctcaggtcaattctccaattgtgacggaaaataaatatatcgaagtaggagaaggacctgctgcacttcaggggaaatttcataccataattgagttcccacttgaaagaaagaggcctcaaaataagatgaaaaagtctcctgtgggtagctggcgttcctttttcaacttggggaaatcatcatctgtttctaaacgaaagctgcagcggaatgagagtgagccttcagagatgaaagccatggctctgaaaggtggcagggcagaaggaaccctccgttcagctaaaagtgaggagtctcttacatctctccatgcagttgatggtgattctaagctcttccgacccagaagacccagatcttccagtgatgcactgtctgcctcttttaatggagaaatgctggggaaccgctgtaactcctatgataatctgcctcatgacaatgagagtgaggaggaaggagggctgcttcatatcccagcccttatgtctcctcattcagctgaggatgttgacttgagcccaccagacattggagtagccagcctggattttgatccaatgtcatttcaatgtagtcctcctaaggccgaatcagaatgtctggagagtggtgcttcctttttagattcaccaggatactccaaggataaaccaagtgccaataaaaaggatgcagaaacaggtagtagccaatgtcagactccaggaagcacagcaagctctgaacctgtctctcctcttcaggagaaactgagtccattctttaccctggacttgagcccaactgaagataaatcatctaagccatcctcctttactgaaaaggtcgtctatgctttctctccgaagataggacggaaattaagcaaatcaccttctatgagcatatctgagccaatttcagtgaccctaccaccacgggtgtcagaagtcattggtacagtctcaaataccacagctcagaatgcatcatcttcaacctgggacaaatgcgttgaagaaagggatgccacaaatagatcccccacccagatagtaaagatgaaaacaaatgagacagttgcccaagaagcatatgaatctgaagtccagcccctggaccaggtggctgctgaagaagtagaattgccagggaaagaggatcagtctgtctcaagcagtcagagtaaggctgtagcttctggacagactcagacaggtaccgtttgttttcctccattctttctttaagttaagagggatcttcaatcctgtgtgccatctgtgccttttaagagagaaatttgtccacagctagcctttaatcaaagagaatgcttttctgggtggtgctgatggctcagagccctaaattaaaagcagtccaacaaaactccccaaaagggccaatggtcctgcttcaaatcttcacaaaagtccccttatctctttggacggtgagaattcgtggataatttttgcacaactgcgtagctcttgattctgtttttctcttctaataaaatatctttattgtagccttccaagttaacaagccagctacaccatcaaatgtaaaaactgttcataataacagtctacaagcacttgaagcttgttttctaagcaatcttttctgagccaggtgagggacatgctttttttcccccccatctctgtaacaattcaagaagagattgcagtctttatacactgtttgttttagttttccttctgaaccagatgtgttttcaacagcatttgcatgtgggatagaagatcatggattgccattttgaaatatggaaggcacctattttttaatgatcacatggggagtgtttggctttccatttaggataacgtaagctaccttttcactctcattttttttcccaatttcccactaggagcagttacccatgacccccctcaggattccgttcctgtcagttcagtctctcttatcccaccaccaccgcctccgaaaaatgttgcccgaatgttggcgctagcattagctgagtccgcacagcaagcctcaactcagtcattgaagagaccagggacctctcaggctgggtatacaaattatggagacatagcggtggctacaactgaagataatctgtccagttcttactctgcagttgctctagataaggcctatttccaaaccgatcgaccagcagagcagttccacctccagaataatgcaccaggaaactgtgaccatcctctaccagagacaacagctactggggatcctacccattccaacacaactgaatctggggagcaacatcaccaagtagacttaacagggaatcagccacatcaagcatatttatctggggacccagaaaaggccagaattacttcagttcccttagactcagagaagtctgatgatcatgtaagtttccctgaagaccagtctgggaagaacagtatgccaactgtctccttcttggatcaggaccagtctccaccccgtttctacagtggagatcagcctccttcttatcttggtgcaagtgtggataaactccatcaccctttagaatttgcagacaaatctcccacacctcctaatttacctagcgataaaatctaccctccttctgggtcccccgaagagaataccagcacagccaccatgacttacatgacaactactccagcaacagcccaaatgagcaccaaggaagccagctgggatgtggctgaacaacccaccactgctgattttgctgctgccacacttcagcgcacgcacagaactaatcgtccccttccccctccgccttcccagagatctgcagagcagccaccagttgtggggcaggtacaagcagcaaccaatataggattaaataattcccacaaggtaagaaggggaagatatcagtgagatgaaatatactattaccaaaggtatgtcacttttcagcagggtgtgttgttatctttgagtcagacacaacaattacttttaagccctgtggctggtttccatgagatagttcccatttgaggttggagtctgccattaccttgatgctggcttttccccaggaaaggagtagctcctagatgactatagcttaactgtacctgctcccttttcttcctaaagtgtctcggtagtttattccagtaacacaaagagatcaggatcaaatgagacaaagtgggctttacggttgtgggttgctttttcttatttttttccaactccatcactgactcattgtgactttgggcaagtcatttacctaccctctgccaattattcacagttacacaatgaaaatacttcattctcaaaacattcgtaagactgtctgccttgcagactttttggaagtataagagattatagtgccttgggattttttgttactttcctagcattcaccagcagtttgtcccatagtcaggtgcctgtttcaatgagagaatgtagtatgcagaatgctaaggtttcttcctgaatttcctcatattttaagaaagtgccacaggttgtttttcttctatatggtcaccttgaactattaataggacttaagattttagaccttagtggaggatgctgtgtttactgcttctcaaggatagcatgttttcagtatgaggattatctttggccagactaaggtggaatcaaaggtaggagagaggcagtagcttctgatttgaatattgcctttccctatgtttgaagccctaaaactgctaactgtgtacaactgtgaatttcaaaagtctccccagatgatagaattaactcttaatttaacaagatgtcctttgtgttgagactgagctagactaatagaccgggtatgtatttttaagctctacagcattacttgactaaacctctcttttggtttgtatattaaaattatgccataggcaacctcatctcgcatttaaaacctctcataaattagaaaactttgaatggttctccaaagataatactgggtgttgtacaaaatagcagcacaagccttcttttcctagaaatgggtacagattcattgcaaccacatggcttgggaaagttcaagctgctacccaaccagccttaatttgtgagttacaaatttaatagtacttgattcatagagggaacaaaaaatagacccatagtattatcatctttcaataggttcaaggagtagttccagttccagagaggccacctgaacctcgagccatggatgaccctgcgtctgccttcatcagtgacagtggtgctgctgctgctcagtgtcccatggctacagctgtccagccaggcctgcctgagaaagtgcgggacggtgcccgggtcccgctgctgcacctgcgcgccgagtctgtccctgcgcatccctgtggctttcctgcaccactgccccccaccaggatgatggagagtaagatgattgctgccatacactccagcagtgcagatgccaccagcagttcaaattatcattcctttgtcactgcttcatccacctctgtggacgatgcattgcctttaccacttcctgtcccacaacctaagcatgcttctcagaaaacagtttactcctcctttgctaggcccgatgtcaccactgaaccctttggtccagataactgtttgcatttcaatatgactccaaactgccagtaccgtccccagagtgtacctccccatcacaataaattggagcagcaccaagtgtatggtgccaggtcagagccaccagcctccatgggtcttcgttataacacatatgtggccccaggaagaaacgcatctggacaccactccaagccatgcagccgggtcgagtatgtgtcttctttgagctcctctgtcaggaatacctgttaccccgaagacattccaccgtaccctaccatccggagagtgcagtctctccatgctccgccgtcttccatgattcgctctgttcccatttcacggacagaagttcccccagatgatgagccagcctactgcccaagacctctgtaccaatataagccatatcagtcctcccaggcccgctcagattatcatgtcactcagcttcagccttactttgagaatggccgggtccactacaggtatagcccatattccagttcttctagttcctattacagtccagatggggccctgtgtgatgtggatgcctatggcacagtccagttgagaccccttcaccgccttcccaatcgagactttgctttctacaatcctaggctgcaaggaaagagcttgtacagttatgctggtttggctccacgtccccgggccaacgtgactggctatttctctcccaacgaccataatgtagtcagcatgcctccggctgctgatgtgaagcacacctacacctcatgggatcttgaggacatggaaaaataccgcatgcagtccatccggagagagagccgtgctcggcagaaggtgaaagggcctgtcatgtcccaatatgataacatgaccccggcggtgcaggacgacttgggtgggatctatgtcatccatctgcgtagtaaatcagatcctgggaaaactggacttctctcagtggcagaaggaaaggagagccgccatgcagccaaggccatcagtcccgagggagaggaccgcttctataggaggcatcccgaggcagagatggacagagcccaccatcacggaggccatggtagcacgcagccggagaagccatccctgcctcagaagcagagcagcctgaggagcaggaagcttcctgacatgggctgcagtcttcctgagcacagggcacaccaagaagcaagccataggcagttctgtgagtcaaagaatgggcccccttatccccagggagctggccagttagattatgggtccaaagggattccagacacttctgagccagtcagctaccacaactctggagtaaaatatgctgcatccgggcaagaatctttaagactgaaccacaaagaggtaaggctctccaaagagatggagcgaccctgggttaggcagccttctgccccagagaaacactccagagactgctacaaggaggaagaacacctcactcagtcaatcgtcccaccccctaaaccagagaggagtcatagcctcaaactccatcatacccagaacgtggagagggaccccagtgtgctgtaccagtaccaaccacacggcaagcgccagagcagtgtgactgttgtgtcccagtatgataacctggaagattaccactccctgcctcagcaccagcgaggagtctttggagggggcggcatggggacgtatgtgccccctggctttccccatccacagagcaggacctatgctacagcgttgggtcaaggggccttcctgcccgcagagttgtccttgcagcatcctgaaacacagatccatgcagaatgagccctgcgagcaatagagttgaagcagcctctgctggacagtggactgttctatttttttcaataaccaaaaagattaaacaaaaaatactataaaacccctgaccacatttaaaaaatgataataaaagtaaacaaatcagc

SEQ ID NO: 54472 - protein, 749 aa, Artificial Sequence
  derived and/or modified sequence
MQRPSVSRAENYQLLWDTIASLKQCEQAMQHAFIPVNGTEIEYEFEEITLERGNSGLGFSIAGGTDNPHIGDDPGIFITKIIPGGAAAEDGRLRVNDCILRVNEVDVSEVSHSKAVEALKEAGSIVRLYVRRRRPILETVVEIKLFKGPKGLGFSIAGGVGNQHIPGDNSIYVTKIIDGGAAQKDGRLQVGDRLLMVNNYSLEEVTHEEAVAILKNTSEVVYLKVGKPTTIYMTDPYGPPDITHSYSPPMENHLLSGNNGTLEYKTSLPPISPGRYSPIPKHMLVDDDYTSHSQHSTATRQPSMTLQRAVSLEGEPRKVVLHKGSTGLGFNIVGGEDGEGIFVSFILAGGPADLSGELQRGDQILSVNGIDLRGASHEQAAAALKGAGQTVTIIAQYQPEDYARFEAKIHDLREQMMNHSMSSGSGSLRTNQKRSLYVRAMFDYDKSKDSGLPSQGLSFKYGDILHVINASDDEWWQARRVMLEGDSEEMGVIPSKRRVERKERARLKTVKFNAKPGVIDSKGDIPGLGDDGYGTKTLRGQEDLILSYEPVTRQEINYTRPVIILGPMKDRINDDLISEFPDKFGSCVPHTTRPKRDYEVDGRDYHFVISREQMEKDIQEHKFIEAGQYNDNLYGTSVQSVRFVAERGKHCILDVSGNAIKRLQVAQLYPIAIFIKPRSLEPLMEMNKRLTEEQAKKTYDRAIKLEQEFGEYFTAIVQGDTLEDIYNQCKLVIEEQSGPFIWIPSKEKL

SEQ ID NO: 54473 - DNA, 2250 bp, Artificial Sequence
  derived and/or modified sequence
atgcaaagacccagcgtgtcaagagcggaaaattatcagctgctatgggacacgatcgcctcactgaaacaatgtgagcaagctatgcagcacgcatttattcctgtcaacggtactgaaattgagtatgagttcgaagagatcactctggagagaggcaactccggattgggtttctccatagccggcgggacggacaatcctcatatcggcgacgaccccggaatatttatcaccaaaattatacctggcggcgcagctgctgaagatgggcggctcagagtgaatgactgtattctgcgcgtcaatgaggtggatgtgtcagaggtcagtcactccaaggccgttgaagccctgaaagaggccgggtccattgtccgtctgtatgttaggcgcaggaggcccatcttagagactgtggttgagataaaattattcaagggccccaagggcctcggcttctcaatcgcagggggcgttggtaaccagcacatcccaggcgacaattctatttacgttacgaagataatagatggaggtgcagcccaaaaggacggtagacttcaggttggcgataggctgctgatggtgaacaactactccttggaggaagttacgcatgaggaggcggtggctatcctaaagaacacttcagaagttgtgtacttaaaggtcggcaaaccaacaaccatttacatgactgacccttacggccctcccgatatcacccattcttattctccacctatggagaaccacctcttgagcgggaataacggaaccctggagtacaaaactagtttacctcccatctcgccagggcgatattccccgattcccaaacatatgttagtagacgatgattatactagccattctcagcacagcacagccacgaggcagccttctatgaccttacagagagcagtgtccttggagggcgaacccaggaaagtcgtgctgcacaaggggagcaccggactgggcttcaacatcgtcggcggggaggatggcgagggtatttttgtgtctttcattctcgctggggggcctgccgatctctccggagaattgcaacggggggatcagatcctgagcgtcaacggcattgatctacgcggcgcctcccatgaacaggcagccgcggcacttaaaggtgcggggcaaacagtgacaattatcgcccaataccaaccggaagactacgcccgattcgaagcaaagatccacgaccttcgcgagcaaatgatgaatcactccatgtcatctggaagtggatcactcaggacaaatcagaagaggtctctgtatgtacgcgcaatgttcgattacgacaagtcaaaggacagcggtcttccttctcaaggcttaagttttaagtacggcgacattctgcacgtcataaacgcttccgatgacgaatggtggcaggctaggcgggttatgctagaaggtgacagcgaagagatgggcgtgatcccctccaagagacgtgtggagcgaaaggaacgagctaggctcaagactgttaagtttaatgctaagcccggagtcatcgactctaaaggcgacatacccgggctcggtgatgatggctacggaaccaagacactgagagggcaggaggacctgattttgtcttacgagccagtgaccagacaggaaatcaattacaccagaccggtgattattttgggacccatgaaagatagaatcaacgacgatctcatttctgaatttcccgacaaatttggttcctgtgtcccgcacacaactaggcccaaaagagactatgaggtggacggacgggattatcacttcgtcatttctcgtgagcagatggaaaaagacattcaggagcacaagttcatcgaggctggccagtacaacgataacctttacggtacttctgttcagagtgtacggttcgtggccgaaaggggaaagcattgtatcctggatgtgtctggaaacgctataaaaagactccaagtggcacagctttacccaatcgccatctttatcaagccaagaagcctagagcccctcatggaaatgaataagaggctgactgaggagcaggctaagaaaacatatgaccgggctattaaactggaacaagaattcggcgagtactttaccgcgattgtgcagggcgatacactggaggacatctacaatcagtgcaagctggttatcgaggagcagtccggccccttcatttggattccttctaaagagaagctctag

SEQ ID NO: 54474 - DNA, 2250 bp, Artificial Sequence
  derived and/or modified sequence
atgcagaggccttctgtgtccagagctgagaactaccagctgctgtgggacaccatcgccagcctgaagcagtgtgagcaggccatgcagcacgccttcatccctgtgaatggaacagaaattgaatatgaatttgaggagatcaccctggagcggggcaacagcggcctgggcttcagcattgctgggggcacagacaacccccacatcggagatgaccccggcatcttcatcaccaagatcatccctggaggagctgctgctgaagatggccgcctgcgggtgaatgactgcatcctgcgggtgaatgaggtggatgtgtctgaggtgagccacagcaaggctgtggaggccctgaaggaggccggcagcatcgtgcggctgtatgtgagaagaagaagacccatcctggagaccgtggtggagatcaagctgttcaagggccccaagggcctgggcttcagcattgctggaggagtgggcaaccagcacatccctggggacaacagcatctacgtgaccaagatcattgatggaggagctgcccagaaggatggccgcctgcaggtgggggaccggctgctgatggtgaacaactacagcctggaggaggtgacccatgaggaggccgtggccatcctgaagaacaccagcgaggtggtgtacctgaaggtgggcaagcccaccaccatctacatgacagacccctacggccccccagacatcacccacagctacagcccccccatggagaaccacctgctgagcggcaacaacggcaccctggagtacaagaccagcctgccccccatcagccctggccgctacagccccatccccaagcacatgctggtggatgatgactacaccagccacagccagcacagcacagccacccggcagcccagcatgaccctgcagagagctgtgtccctggagggggagcccaggaaggtggtgctgcacaagggcagcacaggcctgggcttcaacatcgtgggcggggaggatggagagggcatctttgtgtccttcatcctggccggcggccctgctgacctgtctggagagctgcagagaggagaccagatcctgtctgtgaatggcatcgacctgcggggggccagccatgagcaggccgccgccgccctgaagggagctggccagacagtgaccatcatcgcccagtaccagcctgaggactatgccaggtttgaggccaagatccatgacctgcgggagcagatgatgaaccacagcatgagcagcggcagcggcagcctgcggaccaaccagaagaggagcctgtatgtgcgggccatgtttgattatgacaagagcaaggacagcggcctgcccagccagggcctgtccttcaagtatggagacatcctgcacgtgatcaatgccagtgatgatgagtggtggcaggccaggagagtgatgctggagggggacagcgaggagatgggcgtcatccccagcaagagaagagtggagaggaaggagcgggcccggctgaagacagtgaagttcaatgccaagccaggagtgattgacagcaagggggacatccctggcctgggagatgatggctacggcaccaagaccctgcggggccaggaggacctgatcctgtcctatgagcctgtgacccggcaggagatcaactacaccaggcctgtgatcatcctgggccccatgaaggaccgcatcaatgatgacctgatcagcgagttcccagacaagtttggcagctgtgtgccccacaccacccggcccaagagggactatgaggtggatggccgggactaccactttgtgatcagccgggagcagatggagaaggacatccaggagcacaagttcatcgaggccggccagtacaatgacaacctgtatggcacctctgtgcagagcgtgcgctttgtggccgagcggggcaagcactgcatcctggatgtgtctggaaatgccatcaagaggctgcaggtggcccagctgtaccccatcgccatcttcatcaagcccaggagcctggagcccctgatggagatgaacaagaggctgacagaggagcaggccaagaagacctatgaccgggccatcaagctggagcaggagtttggagagtacttcaccgccatcgtgcagggcgacaccctggaggacatctacaaccagtgcaagctggtgattgaggagcagagcggccccttcatctggatccccagcaaggagaagctgtag

SEQ ID NO: 54475 - DNA, 2250 bp, Artificial Sequence
  derived and/or modified sequence
atgcagcggcccagcgtgagccgggccgagaactaccagctgctgtgggatactattgccagcttgaagcagtgtgagcaggcgatgcagcacgcctttattcctgtgaacggcacagaaatcgaatatgagttcgaggagataacgttagaaaggggaaattcaggcctgggtttctccatcgctggaggaacggataatcctcatattggggatgaccccggaatctttatcactaaaattatccctggtggggccgcagccgaggacggacgcctgcgcgtcaacgattgcatacttcgagtcaatgaggtggatgtctctgaagtaagccactccaaagccgtcgaagctctgaaagaggctgggtccatcgtcaggctgtatgttcggagacgtaggcccatcctggagacggtcgttgaaatcaagcttttcaaagggccaaagggtttaggcttctccattgctggcggggtgggaaaccaacatattcccggagacaactcaatttatgtcaccaagatcatagacggcggcgcggctcagaaagacgggcgcttgcaagtcggagaccgtctcctgatggtaaataattatagcttagaggaagtgacacatgaggaagcagtggccattctgaaaaacacctctgaagtggtttatttaaaggtcggaaagcccactactatttatatgactgacccatatggtccccctgacatcactcattcttattctccccctatggagaaccacctgctgtcggggaacaatggtacgttggagtataagacgtcgctgcctcctattagcccaggaaggtactctccaatccccaaacatatgctggtggacgatgactacacaagccactcacagcactctactgcaacccgtcaacctagtatgactctgcaacgcgcagtgagtctggagggggaacctcgcaaagtcgttctccataaaggtagcactggcctgggttttaacattgtgggcggcgaggatggcgaagggatttttgtgtcgtttatcctcgcagggggccctgctgacctgtcgggtgagctacaacgcggggatcaaatcctctcggtaaacggcatagatctccggggcgcgtcacatgaacaggctgcagctgcccttaagggtgctggacagacagtaaccataatcgcgcaatatcagccagaggactatgcccggttcgaagctaaaattcacgacctgcgggaacagatgatgaaccactcaatgtcttccggaagcggatcactgagaactaatcagaaaaggtccttgtacgtaagggccatgtttgactacgataagtcaaaggacagcggtcttccaagtcaaggcctctcattcaaatacggtgacatcttacacgtcatcaacgcctcagacgatgaatggtggcaggcacgacgcgtgatgctggagggcgattctgaggagatgggtgtgatcccctccaagaggagagtggaacggaaagaacgggctcgcctgaaaacggtaaaatttaacgccaagccaggagtgattgacagcaagggtgatatcccaggcctgggtgacgatggctacggtactaagacgctccgcggccaggaagacctcatcctcagctacgagcccgtaacaagacaggaaatcaactacactcgacctgtcattatcctgggacctatgaaagacagaatcaatgatgacctaattagcgagttccctgataagttcggcagttgcgtgcctcatacaacccggccgaagcgagattatgaggtggatggccgggactatcacttcgttatctcgagagaacaaatggagaaggatattcaagaacataaattcattgaagccggccaatataacgataatctttatggcacatccgtacagagtgtccgcttcgtggccgagcgtggaaagcactgcatcttagacgtctcaggtaacgcaatcaagcgccttcaagtggcccagctgtaccctattgctatctttataaagcctaggagtctcgaacccctcatggagatgaacaaaaggcttacagaggagcaggctaagaagacatatgatagagctattaagttggagcaggagttcggcgaatacttcaccgccattgttcagggcgatacactcgaagacatttacaatcaatgtaagcttgtgatcgaggagcagtcagggccgtttatttggatccccagtaaggaaaaactatag

SEQ ID NO: 54476 - DNA, 2250 bp, Artificial Sequence
  derived and/or modified sequence
atgcagaggccgagcgtgagccgggctgagaattaccagctcctatgggacacaattgcaagcctgaagcagtgcgagcaggccatgcagcacgcttttattcccgtgaacggcactgaaattgaatacgagtttgaagaaatcacactggaacggggaaacagtggcttggggttctccatcgctggaggcacagacaacccacatattggggacgatcctggaatctttatcacaaagatcattcctggaggggcagctgcagaagacggaaggctgcgggtgaatgactgcattctgagggttaatgaggtggacgtctctgaagtgagccacagcaaggcggtagaggccttaaaggaggctgggtctattgtgagactatacgttcgaagacggcgacctatcctggaaacagtggtcgagattaagctttttaaaggccctaagggcctaggcttttccatcgccggaggcgtcggaaatcaacatattcccggagataattctatttacgtcacgaagataattgacggcggtgcggctcaaaaggatggcaggctgcaagtcggggatcgcctccttatggtgaacaattactccttagaagaggtaacacacgaggaagccgtggccatattgaaaaacacatctgaagtggtgtatctcaaggtaggaaagccaacaactatttacatgactgatccttacgggccacccgatatcacccacagttattcacctccgatggagaaccatcttttgagcggtaataacggcacactcgagtataagacaagcttgccgccaatctcccccggtagatacagtccgataccgaagcacatgctggtggatgacgactacacctcccactcccaacattccaccgccactagacagccatccatgacactgcagagggctgttagtctggagggtgagcctaggaaggtggtcttacacaaggggtcaacagggctgggattcaacattgtgggaggagaggacggggaggggatattcgtctccttcatcctggctgggggaccagctgacctgtcaggcgaactgcaacggggagatcagattctttctgtcaacgggattgacctgagaggtgcctcccatgaacaggcggctgccgctttaaaaggggcaggccaaactgttacgatcattgctcaataccagccagaagattacgccaggttcgaggctaagattcatgatctacgggagcagatgatgaaccacagtatgagctcaggctctgggtccctgcgcacaaaccagaagaggtcactgtacgtgagagcgatgttcgactacgataagagtaaggactctgggctcccctcccagggactgagcttcaaatacggcgacattttacatgtcatcaatgcctcagacgatgagtggtggcaagctcggagagttatgctcgagggagatagcgaagagatgggggtcattccgtcgaaaagacgcgtggagcgcaaagagagggccagactgaaaacggtcaaattcaatgctaagccgggtgtgatcgactccaaaggcgatattcccggactgggagatgacgggtatggtacaaaaactctccgtggccaagaggatctgatcctatcctatgagcccgtgacccgacaggaaatcaattacacgcgccctgtgatcatactgggtcccatgaaggatcggatcaatgatgacctaatttcggagtttcctgataagttcgggagttgcgttccccatactacccggccaaagagagattatgaagtcgatgggagggattatcactttgtgatcagccgagaacagatggaaaaggacattcaagagcacaaatttatcgaagcaggacaatataatgataatctctacggcacttctgtgcaatctgtgcgcttcgttgccgaaagaggtaagcactgtatcctggacgtgagtgggaacgctattaaacgacttcaggtcgcccagctctatccaatcgcgattttcatcaagccaaggagcctggaaccattaatggagatgaacaagcggcttaccgaggagcaagcgaaaaagacctatgaccgagccatcaaactcgaacaggagtttggagagtattttaccgccatagtgcaaggagacacgctggaagatatctacaaccaatgtaagctggtcatcgaggaacagagtggaccattcatttggattccctccaaagaaaagctatag

SEQ ID NO: 54477 - DNA, 2250 bp, Artificial Sequence
  derived and/or modified sequence
atgcagagacccagcgtgagcagagccgagaactaccagctgctgtgggacaccatcgccagcctgaagcagtgcgagcaggccatgcagcacgccttcatccccgtgaacggcaccgagatcgagtacgagttcgaggagatcaccctggagagaggcaacagcggcctgggcttcagcatcgccggcggcaccgacaacccccacatcggcgacgaccccggcatcttcatcaccaagatcatccccggcggcgccgccgccgaggacggcagactgagagtgaacgactgcatcctgagagtgaacgaggtggacgtgagcgaggtgagccacagcaaggccgtggaggccctgaaggaggccggcagcatcgtgagactgtacgtgagaagaagaagacccatcctggagaccgtggtggagatcaagctgttcaagggccccaagggcctgggcttcagcatcgccggcggcgtgggcaaccagcacatccccggcgacaacagcatctacgtgaccaagatcatcgacggcggcgccgcccagaaggacggcagactgcaggtgggcgacagactgctgatggtgaacaactacagcctggaggaggtgacccacgaggaggccgtggccatcctgaagaacaccagcgaggtggtgtacctgaaggtgggcaagcccaccaccatctacatgaccgacccctacggcccccccgacatcacccacagctacagcccccccatggagaaccacctgctgagcggcaacaacggcaccctggagtacaagaccagcctgccccccatcagccccggcagatacagccccatccccaagcacatgctggtggacgacgactacaccagccacagccagcacagcaccgccaccagacagcccagcatgaccctgcagagagccgtgagcctggagggcgagcccagaaaggtggtgctgcacaagggcagcaccggcctgggcttcaacatcgtgggcggcgaggacggcgagggcatcttcgtgagcttcatcctggccggcggccccgccgacctgagcggcgagctgcagagaggcgaccagatcctgagcgtgaacggcatcgacctgagaggcgccagccacgagcaggccgccgccgccctgaagggcgccggccagaccgtgaccatcatcgcccagtaccagcccgaggactacgccagattcgaggccaagatccacgacctgagagagcagatgatgaaccacagcatgagcagcggcagcggcagcctgagaaccaaccagaagagaagcctgtacgtgagagccatgttcgactacgacaagagcaaggacagcggcctgcccagccagggcctgagcttcaagtacggcgacatcctgcacgtgatcaacgccagcgacgacgagtggtggcaggccagaagagtgatgctggagggcgacagcgaggagatgggcgtgatccccagcaagagaagagtggagagaaaggagagagccagactgaagaccgtgaagttcaacgccaagcccggcgtgatcgacagcaagggcgacatccccggcctgggcgacgacggctacggcaccaagaccctgagaggccaggaggacctgatcctgagctacgagcccgtgaccagacaggagatcaactacaccagacccgtgatcatcctgggccccatgaaggacagaatcaacgacgacctgatcagcgagttccccgacaagttcggcagctgcgtgccccacaccaccagacccaagagagactacgaggtggacggcagagactaccacttcgtgatcagcagagagcagatggagaaggacatccaggagcacaagttcatcgaggccggccagtacaacgacaacctgtacggcaccagcgtgcagagcgtgagattcgtggccgagagaggcaagcactgcatcctggacgtgagcggcaacgccatcaagagactgcaggtggcccagctgtaccccatcgccatcttcatcaagcccagaagcctggagcccctgatggagatgaacaagagactgaccgaggagcaggccaagaagacctacgacagagccatcaagctggagcaggagttcggcgagtacttcaccgccatcgtgcagggcgacaccctggaggacatctacaaccagtgcaagctggtgatcgaggagcagagcggccccttcatctggatccccagcaaggagaagctgtag

SEQ ID NO: 54478 - DNA, 1831 bp, Artificial Sequence
  derived and/or modified sequence
atatttatcaggatgagttacaaggaaatatatgtacccagtgagcgagaatgctgcatggtcaccccctgtgatgtaaaatatgagaatctaggaggggctgttttataattcatcaggttccgctagtgagttctgtcagagtcttagttataaaggcaagtgtgaaccggacagcagacaggagaacctggcaccaaggagacggagaagctgcctttggtgcctcctgcctcctccctgctttgttccaataattttgtgctcgattacgctcgatttgaggccaaaatccatgacctacgagagcagatgatgaaccacagcatgagctccgggtccggatccctgcgaaccaatcagaaacgctccctctacgtcagagccatgttcgactacgacaagagcaaggacagtgggctgccaagtcaaggacttagttttaaatatggagatattctccacgttatcaatgcctctgatgatgagtggtggcaagccaggagagtcatgctggagggagacagtgaggagatgggggtcatccccagcaaaaggagggtggaaagaaaggaacgtgcccgattgaagacagtgaagtttaatgccaaacctggagtgattgattcgaaaggggacatccccggattaggtgacgacggttatggaacaaagactctgaaacatgtttcttctaatgccagcgatagcgaaagtagctaccgaggacaagaagacctcattctttcctatgagcctgttacaaggcaggaaataaactacacccggccggtgattatcctggggcccatgaaggatcggatcaatgacgacttgatatctgaattccctgataaatttggctcctgtgtgcctcatactacgaggccaaagcgagactacgaggtggatggcagagactatcactttgtcatttccagagaacaaatggagaaagatatccaagagcacaagtttatagaagccggccagtacaatgacaatttatatggaaccagtgtgcagtctgtgagatttgtagcagaaagaggcaaacactgtatacttgatgtatcaggaaatgctatcaagcggttacaagttgcccagctctatcccattgccatcttcataaaacccaggtctctggaacctcttatggagatgaataagcgtctaacagaggaacaagccaagaaaacctatgatcgagcaattaagctagaacaagaatttggagaatattttacagctattgtccaaggagatactttagaagatatatataaccaatgcaagcttgttattgaagagcaatctgggcctttcatctggattccctcaaaggaaaagttataaattagctactgcgcctctgacaacgacagaagagcatttagaagaacaaaatatatataacatactacttggaggcttttatgtttttgttgcatttatgtttttgcagtcaatgtgaattcttacgaatgtacaacacaaactgtatgaagccatgaaggaaacagaggggccaaagggtgggacagaaaagacattgcagtatgaaggaaggctttggtttgctcaaagtgccaggtgtagggatgaacctctgacgggctttctgcccaagagatgagatgagagcctcctcaccccagcagatgtccagagctgatttagctgcagagctctctgtgtcttttgctttaaagaaaaattgccagcactcgaacctcatcagccttcccattacccacatctgtaattggtacactttgaattttataactatgcacatcttttgatttcttaacaagcaaatgaaaga

SEQ ID NO: 54479 - DNA, 3027 bp, Artificial Sequence
  derived and/or modified sequence
agtttgagtgttaccagctttcgctatgcaacggccaagtgtttctcgggctgagaattatcagcttttgtgggatactattgcttccttaaaacaatgtgaacaagctatgcaacatgcatttattccggtcaatgggacagaaattgaatatgaatttgaagaaattacactggagagggggaattctggcctgggattcagtattgctggggggacagataatccccacattggagatgaccctggcatatttattacgaagattataccaggaggtgctgcagcagaggatggcagactcagggtcaatgattgtatcttgcgggtgaatgaggttgatgtgtcagaggtttcccacagtaaagcggtggaagccctgaaggaagcagggtctatcgttcggctgtatgtgcgtagaagacgacctattttggagaccgttgtggaaatcaaactgttcaaaggccctaaaggtttaggcttcagtattgcaggaggtgtggggaaccaacacattcctggagacaacagcatttatgtaactaaaattatagatggaggagctgcacaaaaagatggaaggttgcaagtaggagatagactactaatggtaaacaactacagtttagaagaagtaacacacgaagaggcagtagcaatattaaagaacacatcagaggtagtttatttaaaagttggcaaacccactaccatttatatgactgatccttatggtccacctgatattactcactcttattctccaccaatggaaaaccatctactctctggcaacaatggcactttagaatataaaacctccctgccacccatctctccaggaaggtactcaccaattccaaagcacatgcttgttgacgacgactacaccagtcattcccaacatagcaccgcaactcgtcagccttcaatgactctccaacgggccgtctccctggaaggagagcctcgcaaggtagtcctgcacaaaggctccactggcctgggcttcaacattgtcggtggggaagatggagaaggtatttttgtgtccttcattctggctggtggaccagcagacctaagtggggagctccagagaggagaccagatcctatcggtgaatggcattgacctccgtggtgcatcccacgagcaggcagctgctgcactaaagggggctggacagacagtgacgattatagcacaatatcaacctgaagattacgctcgatttgaggccaaaatccatgacctacgagagcagatgatgaaccacagcatgagctccgggtccggatccctgcgaaccaatcagaaacgctccctctacgtcagagccatgttcgactacgacaagagcaaggacagtgggctgccaagtcaaggacttagttttaaatatggagatattctccacgttatcaatgcctctgatgatgagtggtggcaagccaggagagtcatgctggagggagacagtgaggagatgggggtcatccccagcaaaaggagggtggaaagaaaggaacgtgcccgattgaagacagtgaagtttaatgccaaacctggagtgattgattcgaaaggggacatccccggattaggtgacgacggttatggaacaaagactctgagaggacaagaagacctcattctttcctatgagcctgttacaaggcaggaaataaactacacccggccggtgattatcctggggcccatgaaggatcggatcaatgacgacttgatatctgaattccctgataaatttggctcctgtgtgcctcatactacgaggccaaagcgagactacgaggtggatggcagagactatcactttgtcatttccagagaacaaatggagaaagatatccaagagcacaagtttatagaagccggccagtacaatgacaatttatatggaaccagtgtgcagtctgtgagatttgtagcagaaagaggcaaacactgtatacttgatgtatcaggaaatgctatcaagcggttacaagttgcccagctctatcccattgccatcttcataaaacccaggtctctggaacctcttatggagatgaataagcgtctaacagaggaacaagccaagaaaacctatgatcgagcaattaagctagaacaagaatttggagaatattttacagctattgtccaaggagatactttagaagatatatataaccaatgcaagcttgttattgaagagcaatctgggcctttcatctggattccctcaaaggaaaagttataaattagctactgcgcctctgacaacgacagaagagcatttagaagaacaaaatatatataacatactacttggaggcttttatgtttttgttgcatttatgtttttgcagtcaatgtgaattcttacgaatgtacaacacaaactgtatgaagccatgaaggaaacagaggggccaaagggtgggacagaaaagacattgcagtatgaaggaaggctttggtttgctcaaagtgccaggtgtagggatgaacctctgacgggctttctgcccaagagatgagatgagagcctcctcaccccagcagatgtccagagctgatttagctgcagagctctctgtgtcttttgctttaaagaaaaattgccagcactcgaacctcatcagccttcccattacccacatctgtaattggtacactttgaattttataactatgcacatcttttgatttcttaacaagcaaatgaaagaaagaaggaaaaaagaaaggaatccctttggagatgacatactatcagggaaggataagtgtgtagttttttgactggcatctgcaaagacaagaatttcataaaatttgcaagtgtatggaggactaacctcactgacaggaggggattccacctgggattagctttatgattgttgattgcctattttgccatttataaactgaaagaaggcactaaagatgagaataatttatacaataaaaatatattaaatgtatagaaacaaatttctataggtt

SEQ ID NO: 54480 - DNA, 5927 bp, Artificial Sequence
  derived and/or modified sequence
atgtacccagtgagcgagaatgctgcatggtcaccccctgtgatgtaaaatatgagaatctaggaggggctgttttataattcatcaggttccgctagtgagttctgtcagagtcttagttataaaggcaagtgtgaaccggacagcagacaggagaacctggcaccaaggagacggagaagctgcctttggtgcctcctgcctcctccctgctttgttccaataattttgtgctcgattacgctcgatttgaggccaaaatccatgacctacgagagcagatgatgaaccacagcatgagctccgggtccggatccctgcgaaccaatcagaaacgctccctctacgtcagagccatgttcgactacgacaagagcaaggacagtgggctgccaagtcaaggacttagttttaaatatggagatattctccacgttatcaatgcctctgatgatgagtggtggcaagccaggagagtcatgctggagggagacagtgaggagatgggggtcatccccagcaaaaggagggtggaaagaaaggaacgtgcccgattgaagacagtgaagtttaatgccaaacctggagtgattgattcgaaaggggacatccccggattaggtgacgacggttatggaacaaagactctgagaggacaagaagacctcattctttcctatgagcctgttacaaggcaggaaataaactacacccggccggtgattatcctggggcccatgaaggatcggatcaatgacgacttgatatctgaattccctgataaatttggctcctgtgtgcctcatactacgaggccaaagcgagactacgaggtggatggcagagactatcactttgtcatttccagagaacaaatggagaaagatatccaagagcacaagtttatagaagccggccagtacaatgacaatttatatggaaccagtgtgcagtctgtgagatttgtagcagaaagaggcaaacactgtatacttgatgtatcaggaaatgctatcaagcggttacaagttgcccagctctatcccattgccatcttcataaaacccaggtctctggaacctcttatggagatgaataagcgtctaacagaggaacaagccaagaaaacctatgatcgagcaattaagctagaacaagaatttggagaatattttacagctattgtccaaggagatactttagaagatatatataaccaatgcaagcttgttattgaagagcaatctgggcctttcatctggattccctcaaaggaaaagttataaattagctactgcgcctctgacaacgacagaagagcatttagaagaacaaaatatatataacatactacttggaggcttttatgtttttgttgcatttatgtttttgcagtcaatgtgaattcttacgaatgtacaacacaaactgtatgaagccatgaaggaaacagaggggccaaagggtgggacagaaaagacattgcagtatgaaggaaggctttggtttgctcaaagtgccaggtgtagggatgaacctctgacgggctttctgcccaagagatgagatgagagcctcctcaccccagcagatgtccagagctgatttagctgcagagctctctgtgtcttttgctttaaagaaaaattgccagcactcgaacctcatcagccttcccattacccacatctgtaattggtacactttgaattttataactatgcacatcttttgatttcttaacaagcaaatgaaagaaagaaggaaaaaagaaaggaatccctttggagatgacatactatcagggaaggataagtgtgtagttttttgactggcatctgcaaagacaagaatttcataaaatttgcaagtgtatggaggactaacctcactgacaggaggggattccacctgggattagctttatgattgttgattgcctattttgccatttataaactgaaagaaggcactaaagatgagaataatttatacaataaaaatatattaaatgtatagaaacaaatttctataggttaaaaaagttttgtgaaatattttgtaaagactaatattgaaagactaaatgtatgcaacatcagcagatgatcaaattcaagacctgaaagttgcactctcccttttgttgccaatgatctgttaagagcatctgagttccttttaagtctgacaaagacttcttcctcacttacctcccttccacattagtgatacactctcatgcagcacatcccttaatgagttgccctcatggatatttttggaagacatttggttaatgcatttttttatgctgatggcttttcagagacaaacttatgcaaatgatctaaagggaagtttttgctttcctctagttaaataacctgagcctgccatgcaaatagttgaataactttgttcctagttactgacatacaattcttaaaggaccatttagcattttggccaacaatgagtaattaggattagtacctttttgttttacagagtaactgagagttttgtaacatccagagatggtactagagccaatgagagatctgttcctagatgcactatttctttgaggaagagagagaagagaagtgtctggttgggggtgagggggtgcagacttttttgtttctatgtacagagcaaagagatagagtcacaaggaaagacaattaatgactttgagctcaaccaactgaactgcctttcttggagctgcacctggaccaagtttattttttaacaattataataacgatgatttaaaaaaagaaacctcccaaagcctataaactgaactagaagagttggtttcccactttagagtggatggcgacatcagcattgcttttgcccatggtgtttggggagagacttttcagtgataataaccactctactctgggttctgtgcatgcccagactaagccccatcgccttatttctggggtacatccagacctggcagggattctgccacactgtgcagcaaaccagcatgtaggctgggtaggagagcaagagatagagccatcagagtgatggggcttcttcacagtaagaacatcggagcttagaatgagagtctctttccaaaaacaggcattgttcatcttacgctaaacatcattgtctgcctggctacagtcaccaaaacaaaacagaaatgcaaaattatgcatcttcccatagtcctgaggcttcctttgccaatggaagggctagcaatgcattctccctctcatgaaagttaaatttccagagacttccttagattgctcaaaatgttaaagatatgtccatgtctgcaattcgccagtttcaggtcaaggcctactttcatcaatattgctcccagaagttttctgacaccagaatgccattcctgatcccagctctatttttaggccaccacgataacttctttggtttctcaactgagcatgcaaccatttatttaaaagactgtcattaatgagtagatgttttcgcgggtcgtgtgatgtgctttccatttactagtgttgctgtggctaagtacaatcaaattgaaccaccaacccttggttttgtagtaatataactatttattttcctagtgtagatgctttcagattagaattggcatttgcactgatttttttatgtagatttatataaatatatagatacatatatatttgcttgaagaatcaccaagcaaattggtgagagggtcttttccaatagaatttacacctccatttgttgtgttgtcttgcacttcccaatgttgatgtctctatggctccaatgaactggtgtattttgcagcaaatctgatgacttgtatggaaatggcatgaaagttacccagattacatctggtgcaaatgcactcggagcctggggccagactggtgctaacactgcaaactttgtccagagctctctccaacctgaaggcttgctgggggtgcaatgtcaccttcacacatgctgggccctttcagaaaagtgccagatcgtgtaactggtgctatttttcatgctctggtacaatgtgtagcaccacgggggtctcagctttaccaaaatcaaaattccatttgtcagctaagtgcagaggcatttgttttttgctctcctcccacagaattgtcggccatttatttgcaggccttttgcgggatttcttggctatttatttgcaggccttttttcccagccccaaattcttgggttggctctgtctgcttaaagagcctgtcttcacaaagctgcactcgggtgcctctgtgcgctgtcttagatcctactgccggcccttcaggactccgagccaggaaagaactctccaacctctggctcgagactctactttttttctcattcttttccttactctcctcctccttctacttccgactaattccatctctttttttttttgttcctctccttttcctattcctccttcccaccatctctgagttgttgactttctcctataatccttctctattccctttctctttttgtccacctctcctttagtctctgtttctctgcccttcttattcctcttctgtcctttctcctctcctcaaatctctgatcatcttctcccgtacatccctgtattgatttttctgtcctctaaagggctcatggctgattcagacagcaagtccatgcactggactaatgacacaaatactttaggtcgccgtttcacctactcagcccagaaagtaaagctgagcgtgaggccctgacctggagcctgctccagcccgcctcccggagccagcctgcaccgttgccctggcagcgatgatgcatgtgctgtgggccctgccggcgcctgagtgcctctgcctgaacactgctcctaagcgagcccactcccagcactaccgcatggctctgaggacattttctttcaataaaggcagactctggccccaattattctgatagcaaacctcttcctcctcattgaagccatgccatcaccttggtttggagagagacatttttttcccattcataagctttctttttcccatttttatgtgaagccccctctgcttttcagctggtgattgctctggtgagactgaatggacttgctggtgaaatgaaatctcttctttcctgtcttggtcctgcctaaattcctacaaatatatttaagccaaggactcaggctaattcctaagttgatcacattaatttgttactcctagagggaaaaagatcaattcccttgaagcatgtggagtacctcctgtgacagctgacttgccaggggactccctacagaattctgtgatatacattttacttctgtgtatgtatggtatatatggtatgtataccatgtacacacgttacattgagtatgaatgactgtggttggaaacacacacacacactcaagtctgtaaatatccttcctcactgaaacctgtgctttggaaatcatttcttgtacagctgtgcagtttcttgtaacagctgaggacaaagctaagacaggcggacaatttagacaaagatcatctaaagagtatagtatctccctagcaactcatgaggacagacaaccaagtggcaaggttgactcccaatgggatggcagacttttcttctctcctttttgagtttgtgtttcctaagtgtttcttaacttctgagtgcaccaggctgtacccgttagatcctttcaatatgacagttttgtgcttctctctgacaggatgtttctccaccgagctgtagcacaggatgggagggaggtgggaatactccttgcctaggctggagtttacagagacactgcacagcttacactcctgttaagtgtaaatattcaacacttccattccatttgtgtaaaaaataaagcacacacgattataaaa

SEQ ID NO: 54481 - DNA, 559 bp, Artificial Sequence
  derived and/or modified sequence
attaacactacgctgtgaataactttgtttactctcttccacattttaaaagaagataccagactaccacttcagagttggaatttcaaacaccagcagctagctgggaggcaggattgaatttggagataagaattcttcctggcgtccttcagcagcctccccaggcaggttttcacctcttcgacttttccaggactaagcctttttaactgagaagagaaagaaaaagagattacgctcgatttgaggccaaaatccatgacctacgagagcagatgatgaaccacagcatgagctccgggtccggatccctgcgaaccaatcagaaacgctccctctacgtcagagccatgttcgactacgacaagagcaaggacagtgggctgccaagtcaaggacttagttttaaatatggagatattctccacgttatcaatgcctctgatgatgagtggtggcaagccaggagagtcatgctggagggagacagtgaggagatgggggtcatccccagcaaaaggagggtggaaagaaaggaacgtgcccgattgaagac

SEQ ID NO: 54482 - DNA, 1005 bp, Artificial Sequence
  derived and/or modified sequence
atgatgaatcatagtatgagttctggctccggtagcttgcgaacaaaccaaaaaaggagcctctatgtcagagcaatgttcgattatgataagtcaaaagactccggacttccatcccaaggtctgagcttcaaatatggggacattctgcatgtgatcaatgcctcggacgacgagtggtggcaagctcgtagggttatgctggagggtgactccgaagagatgggtgttattcctagcaaaagaagagtagagcggaaggagcgcgcccggctaaagactgtgaaattcaatgcaaaacctggggtgattgattcaaagggtgatatcccaggcctcggcgatgacggatatgggaccaagacactgcgtgggcaggaggacttgatactaagttatgaaccagttacacggcaggagattaattacaccaggcccgtgatcatcttgggccccatgaaagaccggatcaacgacgatctcataagcgagtttccggacaagttcggaagctgcgtcccccacaccacacgccccaaacgagattacgaagttgatggtcgcgactaccacttcgtgatttcaagagagcaaatggagaaggatatccaggagcacaaattcatcgaagccgggcaatacaatgacaatctgtatgggacgagcgtccagagcgtgcggttcgtggccgaaaggggcaaacattgtatcctcgatgtcagcggcaatgccatcaaacggctccaggtagctcagctctacccgatcgccatcttcatcaagccaagaagcctcgaaccactcatggagatgaataagcggctgacggaggaacaggctaagaagacctacgaccgcgccataaagctggagcaagaattcggagaatattttacagccattgtccaaggcgacacactcgaggatatatacaatcagtgcaagttagtcattgaggagcagtctggcccatttatctggataccctccaaggaaaaactgtag

SEQ ID NO: 54483 - DNA, 1047 bp, Artificial Sequence
  derived and/or modified sequence
atgatgaaccactcaatgtcatccggcagcggctctctgcggacaaaccagaagcgcagtttgtacgtcagagcgatgtttgactacgacaaatcaaaggacagcggattgccgagtcagggactttcttttaagtatggagacattctgcatgtgattaacgcctctgatgatgaatggtggcaggcccggagggtgatgctggagggagactcagaagagatgggagtgatcccatctaaacgtcgagtggagaggaaggagcgtgcacggctcaaaacagtaaagttcaatgccaaacccggggtgattgacagtaagggcgatatccccgggctgggagacgacggctacggaacaaaaacgctaaaacatgtgtcctccaacgctagcgattcagagagtagttataggggccaggaagaccttatcctgtcctatgagcctgtcactcggcaggaaatcaattatacgagacccgtcatcatactcggccccatgaaggacagaattaatgacgatttgataagtgagtttcccgataaattcggatcatgcgtgccacacacaactcggcccaaacgggactacgaggtggacggccgcgactaccactttgtcatttcaagagaacagatggaaaaagacattcaggaacacaaattcatagaggccggtcaatataacgacaacctgtatggcacctcggtgcaatccgtgagattcgtggccgagagggggaaacattgcattctcgatgtctctggcaatgccattaagcgtctgcaagttgcccagttataccccatcgctattttcataaagccccgcagcctcgaacccctgatggaaatgaacaaaagactgactgaagaacaggctaagaaaacctatgatagggcgattaaattggaacaagagttcggagaatatttcactgccattgtccaaggggatacactagaagacatctacaaccagtgcaagttggtaattgaagagcaatccggccccttcatctggatcccctccaaggagaagctgtag

SEQ ID NO: 54484 - DNA, 1005 bp, Artificial Sequence
  derived and/or modified sequence
atgatgaaccactctatgtcctcagggtccggcagcctcaggaccaaccagaagcggtctctctatgtgcgggcaatgttcgactacgacaaaagcaaggacagcggtctcccgagtcagggcctttcgtttaagtacggagacatcctccatgttatcaatgcctccgatgacgaatggtggcaggcccgcagggtaatgcttgagggagattctgaagagatgggcgttatccctagcaaaagaagagtggagcgcaaggaacgcgcccgactaaaaactgtgaagtttaatgccaagcctggagtgatcgattcaaagggcgacatacccggtcttggggacgacggatacggcaccaaaactctccggggtcaggaagacttgatattgagttatgaacctgttacgaggcaggagataaactacacacgacccgtgataatattaggtccaatgaaagaccggatcaacgacgacctgatcagcgaattcccggacaaattcggatcatgcgtcccccacactacccgccctaaacgcgactatgaagttgacggtagagactaccacttcgtcatctccagagagcagatggagaaggacatacaggagcacaaattcattgaagcagggcagtacaatgacaacctgtatggtacctcagtgcagtctgttcggttcgtggctgaacgcggcaagcattgcattttggatgtgtctggaaacgccattaagcgtctccaggtagcccagctgtaccccattgccatttttattaagcctcggtcgttagaaccattgatggaaatgaataagcggctcactgaggagcaggccaagaagacctacgacagagccataaagcttgagcaggagtttggtgaatacttcacagccatcgttcagggagatactctggaggacatttacaaccagtgcaaactggtaattgaagaacagtcaggcccattcatatggataccttctaaggaaaagttgtag

SEQ ID NO: 54485 - DNA, 285 bp, Artificial Sequence
  derived and/or modified sequence
atgatgaatcactctatgtcgagcgggagcggatccctgagaacaaatcagaagcgttccctgtatgttcgagcgatgtttgactacgataagtcaaaagacagcggcttgcctagtcaggggctaagttttaagtacggggatattctgcacgtcataaatgcttcagatgacgagtggtggcaggcccgtcgagtcatgctcgaaggtgatagcgaggagatgggggtgataccgagcaaacgccgagtagaaaggaaggagcgagcccgactaaaaacttag

SEQ ID NO: 54486 - DNA, 1005 bp, Artificial Sequence
  derived and/or modified sequence
atgatgaaccacagcatgagcagcggcagcggcagcctgcggaccaaccagaagaggagcctgtatgtgcgggccatgtttgattatgacaagagcaaggacagcggcctgcccagccagggcctgtccttcaagtacggggacatcctgcacgtgatcaatgccagtgatgatgagtggtggcaggcccggcgggtgatgctggagggggacagcgaggagatgggcgtcatccccagcaagagaagagtggagaggaaggagcgggcccggctgaagacagtgaagttcaatgccaagccaggagtcatcgacagcaaaggagacatccctggcctgggagatgatggctacggcaccaagaccctgcggggccaggaggacctgatcctgtcctatgagcctgtgacccggcaggagatcaactacaccaggcctgtgatcatcctgggccccatgaaggaccgcatcaatgatgacctgatcagcgagttcccagacaagtttggcagctgtgtgccccacaccacccggcccaagagggactatgaggtggatggccgggactaccacttcgtcatcagccgggagcagatggagaaggacatccaggagcacaagttcattgaagctggccagtacaatgacaacctgtatggcacctctgtgcagagcgtgcgctttgtggccgagcggggcaagcactgcatcctggatgtgtctggaaatgccatcaagaggctgcaggtggcccagctgtaccccatcgccatcttcatcaagcccaggagcctggagcccctgatggagatgaacaagaggctgacagaggagcaggccaagaagacctatgaccgggccatcaagctggagcaggagtttggagagtacttcaccgccatcgtgcagggcgacaccctggaggacatctacaaccagtgcaagctggtgattgaggagcagagcggccccttcatctggatccccagcaaggagaagctgtag

SEQ ID NO: 54487 - DNA, 1047 bp, Artificial Sequence
  derived and/or modified sequence
atgatgaaccacagcatgagcagcggcagcggcagcctgcggaccaaccagaagaggagcctgtatgtgcgggccatgtttgattatgacaagagcaaggacagcggcctgcccagccagggcctgtccttcaagtacggggacatcctgcacgtgatcaatgccagtgatgatgagtggtggcaggcccggcgggtgatgctggagggggacagcgaggagatgggcgtcatccccagcaagagaagagtggagaggaaggagcgggcccggctgaagacagtgaagttcaatgccaagccaggagtcatcgacagcaaaggagacatccctggcctgggagatgatggctacggcaccaagaccctgaagcacgtgagcagcaatgccagtgacagcgagagcagctaccggggccaggaggacctgatcctgtcctatgagcctgtgacccggcaggagatcaactacaccaggcctgtgatcatcctgggccccatgaaggaccgcatcaatgatgacctgatcagcgagttcccagacaagtttggcagctgtgtgccccacaccacccggcccaagagggactatgaggtggatggccgggactaccacttcgtcatcagccgggagcagatggagaaggacatccaggagcacaagttcattgaagctggccagtacaatgacaacctgtatggcacctctgtgcagagcgtgcgctttgtggccgagcggggcaagcactgcatcctggatgtgtctggaaatgccatcaagaggctgcaggtggcccagctgtaccccatcgccatcttcatcaagcccaggagcctggagcccctgatggagatgaacaagaggctgacagaggagcaggccaagaagacctatgaccgggccatcaagctggagcaggagtttggagagtacttcaccgccatcgtgcagggcgacaccctggaggacatctacaaccagtgcaagctggtgattgaggagcagagcggccccttcatctggatccccagcaaggagaagctgtag

SEQ ID NO: 54488 - DNA, 285 bp, Artificial Sequence
  derived and/or modified sequence
atgatgaaccacagcatgagcagcggcagcggcagcctgcggaccaaccagaagaggagcctgtatgtgcgggccatgtttgattatgacaagagcaaggacagcggcctgcccagccagggcctgtccttcaagtacggggacatcctgcacgtgatcaatgccagtgatgatgagtggtggcaggcccggcgggtgatgctggagggggacagcgaggagatgggcgtcatccccagcaagagaagagtggagaggaaggagcgggcccggctgaagacctag

SEQ ID NO: 54489 - DNA, 1005 bp, Artificial Sequence
  derived and/or modified sequence
atgatgaaccacagcatgagcagcggcagcggcagcctgcggaccaaccagaagaggtcattgtatgtgagagctatgtttgattacgataagtcgaaggattccggtctgcccagccaggggctgagtttcaaatacggtgacatattacatgtcatcaacgcctcggacgatgagtggtggcaggcaagaagggtaatgcttgaaggagattctgaggaaatgggcgtcattccaagcaagagacgggtggaacggaaggaacgggcgcgacttaaaaccgtgaaattcaatgcgaagcctggcgtcatcgacagtaagggagacattcctggactcggggatgatgggtacggcacgaagactctccgtggccaggaggacctgatcctaagctacgagcccgtgactcggcaggaaattaattacacccggcccgtaataatcttaggtcccatgaaggacaggatcaacgacgacttaatatctgagtttccagataagttcggcagttgtgtgccacataccacacgaccaaaaagggattacgaggtcgatggacgagactaccatttcgtgatctcaagggaacagatggaaaaggatatccaggagcacaagtttatcgaggctggtcaatacaacgataacttgtacggaaccagtgtccagtctgtgcggttcgtggcagaaagagggaagcactgcatcctggatgtctctggtaatgctatcaaaaggctgcaggtagcccaactttacccgatcgccatttttataaaacccagatccctggaacctctaatggaaatgaataagaggctgaccgaggaacaggcgaaaaaaacctacgatagagcaattaaactcgagcaggagtttggcgaatattttacagcgatcgttcagggtgacactctggaagacatttacaatcagtgtaagttggtaatcgaagaacagtctggcccattcatatggatcccttcaaaagaaaaattgtag

SEQ ID NO: 54490 - DNA, 1047 bp, Artificial Sequence
  derived and/or modified sequence
atgatgaaccacagcatgagcagcggcagcggcagcctgcggaccaaccagaaacgcagcctgtacgtccgtgctatgtttgactatgacaagtctaaagattccggtctgcccagccaaggtttgtcctttaagtatggtgatattctacatgtaattaacgcctctgatgacgagtggtggcaagctagaagagtgatgttagagggcgactccgaagaaatgggcgtcattccctctaaacgacgcgtggaacgcaaggaacgagcccgcctcaaaacggtgaaattcaacgctaaaccgggcgtaatagattctaaaggtgatatcccagggctcggggacgatggctacgggaccaagactttgaaacacgtctcgagcaatgcgtcggatagcgaatcctcttatagaggccaggaggatctgattttgtcttacgaaccagtgaccagacaggagatcaattatacccggcccgtgatcatcctggggccaatgaaggaccggatcaacgacgatttaatcagtgagttccctgacaagtttggaagttgcgtgccccacacaacaagacctaaacgcgattatgaggtggatggccgcgactatcatttcgtgatttccagggagcagatggagaaagacatccaggaacataagttcatagaggcgggacagtacaatgacaatctctatggcacctctgtccagtctgtacgatttgtcgctgaacgaggcaagcattgtatcctggatgtcagcgggaacgctataaagcgcctgcaagtggcccagctctatcccattgccatctttatcaagccgcgaagcctagaaccacttatggagatgaataaaaggctcaccgaagagcaggctaagaagacgtacgatagggcaattaagctcgagcaagagtttggggagtacttcactgccattgtacaaggggatacactggaagacatttacaaccagtgcaagctggttatcgaggagcagagcggaccgtttatatggatcccgagcaaagaaaagctatag

SEQ ID NO: 54491 - DNA, 1005 bp, Artificial Sequence
  derived and/or modified sequence
atgatgaaccacagcatgagcagcggcagcggcagcctgcggaccaaccagaagagatcactctatgtcagagccatgttcgattacgacaaatccaaagactcggggcttccctcgcaaggactcagttttaagtacggcgacatcttgcatgtgatcaatgccagcgatgacgagtggtggcaggctagaagagtaatgctagaaggggacagcgaggaaatgggggtgattccttccaagcgaagagttgaaagaaaagagcgagcacgcctaaagaccgtcaaattcaacgccaagcctggagttattgacagcaaaggtgatatccccggcctgggagacgacggctatggtaccaaaactttaaggggacaggaggacctcatcttatcctatgagccagtaactaggcaggagatcaactacactaggcccgttatcattctcggtccaatgaaagacaggattaatgacgatctcatatccgaatttcctgataagttcgggagttgcgtacctcatactacccggcctaaacgggattacgaggtggacgggagggactatcattttgtcatttcgcgcgagcagatggagaaagatatccaggagcacaaatttatcgaggcagggcagtataatgacaacttatacggcaccagtgtccaatccgtgaggtttgtagcagagcgagggaaacattgtattctggacgtgtctgggaatgctatcaaaagattgcaggtggcccagctttaccccatcgcaatttttattaagcctcgcagcctcgaacctctgatggaaatgaataagcgtctgacagaagagcaggcaaaaaagacatacgatagagccattaagttggagcaggaatttggcgaatattttacagctatcgtgcagggcgacacgctggaggacatttacaatcagtgcaaattagtaatagaggaacagtcgggcccttttatctggatcccaagcaaagaaaaactttag

SEQ ID NO: 54492 - DNA, 285 bp, Artificial Sequence
  derived and/or modified sequence
atgatgaaccacagcatgagcagcggcagcggcagcctgcggaccaatcagaagaggtctctgtacgtccgggcaatgttcgactacgataaatctaaggattccgggctgccctcccagggactgtccttcaagtacggcgacatcctgcacgtgattaatgcctccgacgatgagtggtggcaggcccgccgagtgatgctggagggcgactcagaagaaatgggcgtaatcccctcgaagcgaagagttgagaggaaggagagggcacggctgaaaacctag

SEQ ID NO: 54493 - DNA, 1005 bp, Artificial Sequence
  derived and/or modified sequence
atgatgaaccattcaatgtccagcgggtcaggaagtttgaggactaaccaaaagcgcagtctctatgtgagagcaatgttcgactacgacaaatccaaggactccggcctcccaagtcagggcctgagttttaagtatggtgacatactgcacgtcataaatgcttccgatgatgagtggtggcaagctcggagggtaatgctggaaggtgactcagaagagatgggggtcataccctccaagagaagggtagagagaaaagagcgtgcaagactgaagacggtgaaatttaacgctaaacctggcgtaattgactccaagggggatattcccggtctcggtgacgatggctacggcaccaaaaccctgaggggacaggaggatctgatcctgagctatgagcccgtgacccgacaagagattaattacaccagacctgtcatcatattgggcccaatgaaggacagaattaatgatgacttaatcagtgaatttccagacaagttcggatcttgtgtgccacacacaactcgccctaagagggactacgaggtagacggaagagactaccactttgtcatctccagggaacaaatggagaaagatatccaggagcacaagttcatcgaagccggacagtacaacgataatctctacggaacgagcgtgcagtccgtgagattcgtggccgagagaggaaagcactgcatactcgacgtgtctggcaatgccattaaacggttgcaggtggctcaattgtaccctattgctatattcatcaaacccagaagtctggagcctctgatggagatgaataaaagactcacggaggagcaagctaagaagacttacgaccgcgctattaagctcgagcaggagttcggggagtatttcacggctattgtgcaaggagatactttagaggacatatataatcagtgcaagttagtgattgaagaacagagtggaccattcatctggataccatctaaagaaaagctctag

SEQ ID NO: 54494 - DNA, 1047 bp, Artificial Sequence
  derived and/or modified sequence
atgatgaatcactctatgagctccgggagtggctccctccggaccaatcaaaaacggtccctgtatgttagagcgatgtttgattacgataagagtaaggacagtggattgcccagtcaaggcctgagcttcaagtacggggatatccttcatgtgatcaatgccagcgacgacgagtggtggcaggctaggagagtgatgctcgaaggcgatagcgaggaaatgggcgttatcccctccaaacgtcgcgtcgagaggaaggaaagggcacgcctcaagacagtgaagttcaatgcaaaacccggagtcatcgattctaagggcgatattcctggcttaggagacgacggctacggcacgaagactctgaaacacgttagctccaacgcgagcgactcagagtccagctatcggggtcaggaggatctgatcttaagctacgagcccgtgactcgtcaggaaatcaattatacacgcccagtcatcattttgggtcctatgaaggataggattaatgacgatctgatttcagagttccccgataagtttggtagctgcgtcccacacaccaccagacctaaacgagattatgaagttgacggacgagattatcatttcgtgatcagcagggagcagatggaaaaagacattcaagaacacaaattcatcgaggctgggcagtataatgacaacctgtacggcacgtctgtgcagtccgtccggttcgtggcagaacgcggtaaacattgcatcctcgacgtatctggcaatgctattaaaaggctgcaagtggcccagttgtatccaatcgcgattttcataaaacccagatcactggaaccactgatggaaatgaataagcggctgactgaggagcaggcgaagaaaacctacgatagggctataaaactcgaacaggagtttggtgaatacttcaccgccatcgtgcagggcgatacgctggaagatatctacaatcagtgtaaacttgtgattgaggagcagtctggcccttttatttggatccctagtaaagagaagttatag

SEQ ID NO: 54495 - DNA, 1005 bp, Artificial Sequence
  derived and/or modified sequence
atgatgaatcacagcatgagttctggaagcggctccttacgaactaaccagaagaggtctttatacgtaagagccatgttcgattatgataaaagtaaggatagcgggcttccctcgcagggtctgtcgttcaaatatggcgacatccttcatgtcatcaatgcctcagatgacgagtggtggcaggcacggagagtgatgctggagggggattccgaagagatgggtgtgatccccagtaagcggagagtggagcggaaggagagagcaaggctaaagactgtcaaatttaacgccaagcctggagtcatcgactccaaaggggatattcccggactaggggacgatggctatggaacaaagacattgcgcggacaggaagatctcatcctaagttacgagcctgtgactagacaagaaataaattatacccgaccagtgataatcctcgggccaatgaaggacagaataaatgacgatttgatatccgaattccctgataaatttggctcctgtgtgccccacacgacaagacccaaaagggattacgaggtggatggcagggattatcacttcgtgatctcgcgggaacagatggaaaaggacatccaagagcataaattcatagaggcagggcaatataatgataacctgtacggcacctccgtgcaatccgtgaggttcgtggccgaacggggtaagcactgcattttagatgtaagtgggaatgcaatcaagaggctgcaggttgctcagttgtatcccattgcaatctttatcaagcctcgaagcctggaacctctgatggaaatgaataagcgactgacggaggagcaggcaaaaaaaacatacgaccgcgcaattaagttggagcaggagttcggggaatattttacggctattgtccaaggggatactttagaagacatctacaatcagtgcaagcttgtgatcgaggagcaatccgggccatttatctggattccttccaaagagaagttgtag

SEQ ID NO: 54496 - DNA, 285 bp, Artificial Sequence
  derived and/or modified sequence
atgatgaatcactccatgagttccggatctggtagtctgcggacaaaccagaagcggtcactctacgtccgagccatgtttgattatgacaaaagtaaagatagcggtctcccctcgcaggggttaagctttaaatatggggacattctccacgtcatcaatgccagtgatgatgagtggtggcaggctagaagggtgatgctggagggggatagcgaagagatgggggtcattccctccaaaagaagggtggaacggaaggagagggcaagacttaagacttag

SEQ ID NO: 54497 - DNA, 1005 bp, Artificial Sequence
  derived and/or modified sequence
atgatgaaccacagcatgagcagcggcagcggcagcctgagaaccaaccagaagagaagcctgtacgtgagagccatgttcgactacgacaagagcaaggacagcggcctgcccagccagggcctgagcttcaagtacggcgacatcctgcacgtgatcaacgccagcgacgacgagtggtggcaggccagaagagtgatgctggagggcgacagcgaggagatgggcgtgatccccagcaagagaagagtggagagaaaggagagagccagactgaagaccgtgaagttcaacgccaagcccggcgtgatcgacagcaagggcgacatccccggcctgggcgacgacggctacggcaccaagaccctgagaggccaggaggacctgatcctgagctacgagcccgtgaccagacaggagatcaactacaccagacccgtgatcatcctgggccccatgaaggacagaatcaacgacgacctgatcagcgagttccccgacaagttcggcagctgcgtgccccacaccaccagacccaagagagactacgaggtggacggcagagactaccacttcgtgatcagcagagagcagatggagaaggacatccaggagcacaagttcatcgaggccggccagtacaacgacaacctgtacggcaccagcgtgcagagcgtgagattcgtggccgagagaggcaagcactgcatcctggacgtgagcggcaacgccatcaagagactgcaggtggcccagctgtaccccatcgccatcttcatcaagcccagaagcctggagcccctgatggagatgaacaagagactgaccgaggagcaggccaagaagacctacgacagagccatcaagctggagcaggagttcggcgagtacttcaccgccatcgtgcagggcgacaccctggaggacatctacaaccagtgcaagctggtgatcgaggagcagagcggccccttcatctggatccccagcaaggagaagctgtag

SEQ ID NO: 54498 - DNA, 1047 bp, Artificial Sequence
  derived and/or modified sequence
atgatgaaccacagcatgagcagcggcagcggcagcctgagaaccaaccagaagagaagcctgtacgtgagagccatgttcgactacgacaagagcaaggacagcggcctgcccagccagggcctgagcttcaagtacggcgacatcctgcacgtgatcaacgccagcgacgacgagtggtggcaggccagaagagtgatgctggagggcgacagcgaggagatgggcgtgatccccagcaagagaagagtggagagaaaggagagagccagactgaagaccgtgaagttcaacgccaagcccggcgtgatcgacagcaagggcgacatccccggcctgggcgacgacggctacggcaccaagaccctgaagcacgtgagcagcaacgccagcgacagcgagagcagctacagaggccaggaggacctgatcctgagctacgagcccgtgaccagacaggagatcaactacaccagacccgtgatcatcctgggccccatgaaggacagaatcaacgacgacctgatcagcgagttccccgacaagttcggcagctgcgtgccccacaccaccagacccaagagagactacgaggtggacggcagagactaccacttcgtgatcagcagagagcagatggagaaggacatccaggagcacaagttcatcgaggccggccagtacaacgacaacctgtacggcaccagcgtgcagagcgtgagattcgtggccgagagaggcaagcactgcatcctggacgtgagcggcaacgccatcaagagactgcaggtggcccagctgtaccccatcgccatcttcatcaagcccagaagcctggagcccctgatggagatgaacaagagactgaccgaggagcaggccaagaagacctacgacagagccatcaagctggagcaggagttcggcgagtacttcaccgccatcgtgcagggcgacaccctggaggacatctacaaccagtgcaagctggtgatcgaggagcagagcggccccttcatctggatccccagcaaggagaagctgtag

SEQ ID NO: 54499 - DNA, 285 bp, Artificial Sequence
  derived and/or modified sequence
atgatgaaccacagcatgagcagcggcagcggcagcctgagaaccaaccagaagagaagcctgtacgtgagagccatgttcgactacgacaagagcaaggacagcggcctgcccagccagggcctgagcttcaagtacggcgacatcctgcacgtgatcaacgccagcgacgacgagtggtggcaggccagaagagtgatgctggagggcgacagcgaggagatgggcgtgatccccagcaagagaagagtggagagaaaggagagagccagactgaagacctag

SEQ ID NO: 54500 - DNA, 2115 bp, Artificial Sequence
  derived and/or modified sequence
atgaagcagacccacgccgacacccccgtggaccactgcctgagcggcatcagaaagtgcagcagcaccttcaagctgaagagcgaggtgaacaagcacgagaccgccctggagatgcagaaccccaacctgaacaacaaggagtgctgcttcaccttcaccctgaacggcaacagcagaaagctggacagaagcgtgttcaccgcctacggcaagcccagcgagagcatctacagcgccctgagcgccaacgactacttcagcgagagaatcaagaaccagttcaacaagaacatcatcgtgtacgaggagaagaccatcgacggccacatcaacctgggcatgcccctgaagtgcctgcccagcgacagccacttcaagatcaccttcggccagagaaagagcagcaaggaggacggccacatcctgagacagtgcgagaaccccaacatggagtgcatcctgttccacgtggtggccatcggcagaaccagaaagaagatcgtgaagatcaacgagctgcacgagaagggcagcaagctgtgcatctacgccctgaagggcgagaccatcgagggcgccctgtgcaaggacggcagattcagaagcgacatcggcgagttcgagtggaagctgaaggagggccacaagaagatctacggcaagcagagcatggtggacgaggtgagcggcaaggtgctggagatggacatcagcaagaagaaggccctgcagcagaaggacatccacaagaagatcaagcagaacgagagcgccaccgacgagatcaaccaccagagcctgatccagagcaagaagaaggtgcacaagcccaagaaggacggcgagaccaaggacgtggagcacagcagagagcagatcctgcccccccaggacctgagccactacatcaaggacaagaccagacagaccatccccagaatcagaaactactacttctgcagcctgcccagaaagtacagacagatcaacagccaggtgagaagaagaccccacctgggcagaagatacgccatcaacctggacgtgcagaaggaggccatcaacctgctgaagaactaccagaccctgaacgaggccatcatgcaccagtaccccaacttcaaggaggaggcccagtgggtgagaaagtacttcagagaggagcagaagagaatgaacctgagccccgccaagcagttcaacatctacaagaaggacttcggcaagatgaccgccaacagcgtgagcgtggccacctgcgagcagctgacctactacagcaagagcgtgggcttcatgcagtgggacaacaacggcaacaccggcaacgccacctgcttcgtgttcaacggcggctacatcttcacctgcagacacgtggtgcacctgatggtgggcaagaacacccaccccagcctgtggcccgacatcatcagcaagtgcgccaaggtgaccttcacctacaccgagttctgccccacccccgacaactggttcagcatcgagccctggctgaaggtgagcaacgagaacctggactacgccatcctgaagctgaaggagaacggcaacgccttcccccccggcctgtggagacagatcagcccccagcccagcaccggcctgatctacctgatcggccaccccgagggccagatcaagaagatcgacggctgcaccgtgatccccctgaacgagagactgaagaagtaccccaacgactgccaggacggcctggtggacctgtacgacaccaccagcaacgtgtactgcatgttcacccagagaagcttcctgagcgaggtgtggaacacccacaccctgagctacgacacctgcttcagcgacggcagcagcggcagccccgtgttcaacgccagcggcaagctggtggccctgcacaccttcggcctgttctaccagagaggcttcaacgtgcacgccctgatcgagttcggctacagcatggacagcatcctgtgcgacatcaagaagaccaacgagagcctgtacaagagcctgaacgacgagaagctggagacctacgacgaggagaagggcaagcaggagagcagcctgcaggaccaccagatcgagcccatggagtgctag

SEQ ID NO: 54501 - DNA, 489 bp, Artificial Sequence
  derived and/or modified sequence
atgaagcagacccacgccgacacccccgtggaccactgcctgagcggcatcagaaagtgcagcagcaccttcaagctgaagagcgaggtgaacaagcacgagaccgccctggagatgcagaaccccaacctgaacaacaaggagtgctgcttcaccttcaccctgaacggcaacagcagaaagctggacagaagcgtgttcaccgcctacggcaagcccagcgagagcatctacagcgccctgagcgccaacgactacttcagcgagagaatcaagaaccagttcaacaagaacatcatcgtgtacgaggagaagaccatcgacggccacatcaacctgggcatgcccctgaagtgcctgcccagcgacagccacttcaagatcaccttcggccagagaaagagcagcaaggaggacggccacatcctgagacagtgcgagaaccccaacatggagtgcatcctgttccacgtggtggccatcggctag

SEQ ID NO: 54502 - DNA, 2115 bp, Artificial Sequence
  derived and/or modified sequence
atgaaacagacccacgcagacacgccagtggatcactgtctttccggaatacgaaaatgttccagcacttttaaactcaagagtgaggtaaataaacatgagaccgcactcgagatgcaaaaccccaacctcaacaataaggaatgctgttttacctttacactgaacggtaattcgagaaaactcgatcgctctgttttcaccgcctatggcaagccgagcgagtctatctatagtgcattgtcagccaacgattatttctctgagcgaattaaaaatcagtttaacaaaaatattatcgtttacgaggagaagacaatagatggacatattaacctgggtatgcccctgaaatgtttgccttctgactcgcacttcaagatcaccttcgggcaacgaaaatccagtaaggaggacggccacatcctccgccagtgtgaaaaccctaatatggaatgcatcttgtttcacgtggtagccatcgggcgcacgcggaaaaagattgtaaaaattaatgagcttcatgaaaagggatccaagctctgcatatacgccctaaagggcgaaacaattgaaggggccctttgtaaagatggaagatttaggtccgacataggcgaatttgagtggaaattgaaagaagggcacaaaaagatctacggaaaacaaagtatggtggacgaggtgagtgggaaagtccttgagatggacattagtaagaagaaagcccttcaacagaaggacatacacaagaaaattaaacagaacgagtccgccacagacgagattaaccatcaatccctgatccagtcaaaaaaaaaggtacataagcctaagaaggacggtgaaactaaagatgttgagcattctcgtgaacagattctgccaccacaagacctgtctcactatattaaagacaaaacaagacaaactatccccagaattcgcaactactatttctgctccctgccacgaaagtatcgccaaatcaactcacaggttcgccggcggccgcacttgggacgccgctatgcgatcaatttagacgttcaaaaggaagccatcaacctgttgaagaattatcagactctgaacgaggctattatgcatcagtaccctaactttaaggaggaagcacaatgggttcgaaagtattttagggaggagcaaaagcgaatgaacttgtcacccgccaagcagttcaacatatacaagaaggatttcggaaagatgacagcaaacagcgtgtctgtagccacatgcgagcaactgacctactacagcaaatcagtgggctttatgcagtgggacaacaacggaaacacgggcaatgcaacctgtttcgtgttcaacggaggctacattttcacctgccgccacgtggtgcaccttatggtcggaaaaaacactcacccgagcctgtggccggacataattagtaaatgcgccaaggtcactttcacgtacacagagttctgtcctacccctgataactggtttagcatcgaaccttggctcaaggtgagcaatgagaatctggattatgctatcctcaagttgaaagaaaacggtaacgctttcccccctggattgtggaggcagatttccccccagccaagcacaggtctgatctatctgattggccacccagaaggtcagatcaagaagatcgacggctgcactgttatcccactgaatgagaggttaaaaaagtatcctaatgattgccaggatggccttgtcgatctgtacgacacaacaagtaacgtgtattgtatgtttacccagcggtccttcctcagcgaggtgtggaatacacatactctgagttacgacacctgcttttccgacgggagctctgggtcacccgttttcaacgcctcgggcaagctggtggccctacatacgtttggcctcttttatcagcgtgggtttaacgtgcatgctctgatcgaattcggatattcaatggactcaattctgtgcgacatcaagaagacaaatgagtctctgtacaaatctttaaatgacgaaaaactggagacatatgacgaagaaaaagggaagcaagagtctagcctccaggatcaccagattgaaccgatggaatgctag

SEQ ID NO: 54503 - DNA, 2115 bp, Artificial Sequence
  derived and/or modified sequence
atgaaacaaacccacgccgatacgccggttgaccattgcttatcgggtattcgcaagtgtagcagtacctttaaactaaaaagtgaggttaataaacacgagaccgcacttgaaatgcagaacccaaatttgaacaacaaggaatgctgcttcacttttacattaaatggaaactcgcggaaacttgaccgctccgtcttcacggcttacggtaaaccctcagagagcatttattcggccctcagcgccaacgattattttagtgaacgtattaaaaaccagttcaacaaaaatatcatagtctatgaggagaaaaccatcgacggccacattaacctggggatgcctctcaagtgtttaccctctgactctcacttcaaaatcacctttgggcagagaaagagtagtaaggaagatggtcacattctgcggcagtgtgagaatccaaacatggagtgcatcctgtttcatgtcgttgcgattggccgcacacgaaaaaaaatcgtcaagattaatgagctccacgagaagggcagcaagctgtgtatctatgcgctgaagggcgagacaatcgagggagctttgtgtaaagacgggaggtttcgctcagacatcggcgagttcgagtggaaacttaaggaaggacataagaagatctacggcaaacagtctatggtggatgaagtcagtgggaaagtgctcgaaatggacataagcaaaaagaaggcactgcaacagaaggacatccacaaaaaaattaaacagaatgagtccgccactgatgaaattaatcaccagagcttgattcagagcaagaagaaggtccataaacctaaaaaggacggtgagaccaaagacgtggagcactcacgcgagcaaattttgcccccacaggacctgagccattacatcaaagataagacccggcaaaccattccccgtatacggaattattatttctgttctctaccccgaaagtacaggcagatcaatagccaggtacgccgtaggccacatctgggccggcgctacgccataaatctagacgtacagaaggaagccatcaatcttctgaagaactaccagactctgaacgaggcgattatgcatcagtaccctaattttaaagaagaagcacagtgggtcagaaaatacttccgtgaagagcagaagcgcatgaatctctcgcccgctaaacaatttaacatctacaagaaagacttcgggaagatgaccgcaaatagtgtctccgtggccacctgtgaacagttgacttactactccaagagtgtggggtttatgcaatgggacaataatggaaataccggaaacgcaacctgcttcgtgtttaacggcggctatatctttacctgcaggcacgtggtgcacctgatggtgggcaagaacacccacccatccctatggcctgacatcatctctaaatgcgcgaaggtgacgttcacatacacagaattctgcccaactcccgataactggttctccatagagccttggctgaaagtgagcaatgaaaacctggactacgctatcctcaagctcaaggaaaacggtaatgcctttcctccaggtctctggcggcagatctccccacagcctagcactggtcttatctacctcatcggccacccggaaggacagatcaagaagatcgatgggtgcaccgttattccgcttaacgagcggctgaagaagtaccccaacgattgccaggacggtctggttgatctgtacgataccacctccaatgtatattgcatgttcactcagcggtctttcctcagtgaggtttggaatacacacactcttagctacgatacttgtttttctgacggttccagcggatcgcctgtcttcaacgcctccggcaaactcgtagcactccacacctttgggcttttctaccagaggggattcaatgtacacgctcttatcgagtttggatattcgatggattcaatcctctgcgatattaagaagactaatgagagtctgtacaaaagcctgaacgacgagaaactggagacctatgacgaggagaaagggaaacaggagagcagcctgcaggatcaccaaattgaacccatggaatgttag

SEQ ID NO: 54504 - DNA, 489 bp, Artificial Sequence
  derived and/or modified sequence
atgaagcagacccacgcagacacccctgtcgaccactgtttgagtggcattcgcaaatgctcatcgacctttaagctaaagtccgaagtcaataagcatgaaacagcacttgagatgcagaatcccaacctcaataataaggaatgctgttttacgtttactctcaatggaaatagcagaaagctcgaccggtctgtgttcaccgcatacggcaagccttctgagagtatttacagcgccctgagcgccaatgattatttttcagaaagaataaagaatcaattcaataagaacattattgtgtacgaggagaaaaccatcgacggccatatcaatttaggtatgcctctcaagtgcctgccatctgattctcatttcaagattacatttggtcagaggaagagctctaaggaggacggccacatactacgacagtgtgagaatcccaatatggagtgtattctcttccatgttgtagccattggctag

SEQ ID NO: 54505 - DNA, 2115 bp, Artificial Sequence
  derived and/or modified sequence
atgaagcagacccacgccgacacccctgtggaccactgcctgagcggcatcaggaagtgcagcagcaccttcaagctgaagtctgaggtgaacaagcatgaaacagccctggagatgcagaaccccaacctgaacaacaaggagtgctgcttcaccttcaccctgaatggaaacagcaggaagctggacagatctgtgttcaccgcctacggcaagcccagcgagagcatctacagcgccctgagcgccaatgactacttcagcgagcgcatcaagaaccagttcaacaagaacatcatcgtgtatgaggagaagaccattgatggccacatcaacctgggcatgcccctgaagtgcctgcccagcgacagccacttcaagatcaccttcggccagaggaagagcagcaaggaggatggccacatcctgcggcagtgtgagaaccccaacatggagtgcatcctcttccacgtggtggccatcggccgcaccaggaagaagatcgtgaagatcaatgagctgcacgagaagggcagcaagctgtgcatctatgccctgaagggggagaccattgaaggagccctgtgcaaggatggccgcttcagaagtgacattggagaatttgagtggaagctgaaggagggccacaagaagatctacggcaagcagagcatggtggatgaggtgtctgggaaggtgctggagatggacatcagcaagaagaaggccctgcagcagaaggacatccacaagaagatcaagcagaatgaaagtgccacagatgagatcaaccaccagagcctcatccagagcaagaagaaggtgcacaagcccaagaaggatggagagaccaaggatgtggagcacagccgggagcagatcctgcccccccaggacctgagccactacatcaaggacaagacccggcagaccatcccccgcatccggaactactacttctgcagcctgcccaggaagtaccggcagatcaacagccaggtgagaagaagaccccacctgggccgccgctatgccatcaacctggatgtgcagaaggaggccatcaacctgctgaagaactaccagaccctgaatgaggccatcatgcaccagtaccccaacttcaaggaggaggcccagtgggtgaggaagtacttccgggaggagcagaagaggatgaacctgagccctgccaagcagttcaacatctacaagaaggactttgggaagatgacagccaacagcgtgtctgtggccacctgtgagcagctgacctactacagcaagtctgtgggcttcatgcagtgggacaacaatggaaacacaggaaatgccacctgctttgtgttcaatggaggctacatcttcacctgccgccacgtggtgcacctgatggtgggcaagaacacccaccccagcctgtggccagacatcatcagcaaatgtgccaaggtgaccttcacctacacagagttctgccccaccccagacaactggttcagcattgagccctggctgaaggtgtccaatgaaaacctggactatgccatcctgaagctgaaggaaaatggaaatgccttccccccaggcctgtggaggcagatcagcccccagcccagcacaggcctcatctacctgattggccaccctgagggccagatcaagaagattgatggctgcaccgtcatccccctgaatgaaaggctgaagaagtacccaaatgactgccaggacggcctggtggacctgtatgacaccaccagcaatgtgtactgcatgttcacccagaggagcttcctgtctgaggtgtggaacacccacaccctgtcctatgacacctgcttcagtgatggcagcagcggcagccctgtgttcaatgccagcggcaagctggtggccctgcacaccttcggcctcttctaccagaggggcttcaacgtgcacgccctgattgaatttggctacagcatggacagcatcctgtgtgacatcaagaagaccaatgaaagcctgtacaagagcctgaatgatgagaagctggagacctatgatgaggagaagggcaagcaggagagcagcctgcaggaccaccagatcgagcccatggagtgctag

SEQ ID NO: 54506 - DNA, 489 bp, Artificial Sequence
  derived and/or modified sequence
atgaagcagacccacgccgacacccctgtggaccactgcctgagcggcatcaggaagtgcagcagcaccttcaagctgaagtctgaggtgaacaagcatgaaacagccctggagatgcagaaccccaacctgaacaacaaggagtgctgcttcaccttcaccctgaatggaaacagcaggaagctggacagatctgtgttcaccgcctacggcaagcccagcgagagcatctacagcgccctgagcgccaatgactacttcagcgagcgcatcaagaaccagttcaacaagaacatcatcgtgtatgaggagaagaccattgatggccacatcaacctgggcatgcccctgaagtgcctgcccagcgacagccacttcaagatcaccttcggccagaggaagagcagcaaggaggatggccacatcctgcggcagtgtgagaaccccaacatggagtgcatcctcttccacgtggtggccatcggctag

SEQ ID NO: 54507 - DNA, 2115 bp, Artificial Sequence
  derived and/or modified sequence
atgaagcagacccacgccgacacccccgtggaccactgcctgagcggaattcgaaagtgtagcagtacatttaaactgaaatcagaggtgaataagcacgagaccgcactggagatgcaaaaccccaatttgaataataaggagtgctgtttcaccttcacactcaatggaaattccagaaagctggaccgatccgttttcaccgcatatggcaaaccaagtgaaagcatttatagcgccctcagcgcaaacgactacttcagcgagagaatcaaaaatcagtttaacaaaaatattattgtgtatgaggagaagaccatcgatggccatattaacctcggcatgcctcttaaatgcttaccatccgattcccactttaagatcacgtttggtcaacgcaaaagtagcaaagaggacggacatatccttcgccaatgcgagaatcctaacatggaatgtattctgttccatgtcgtggcgatcggccggactcgcaagaagatagtgaagatcaacgagctccatgagaaggggagtaagctgtgcatttatgccctgaaaggagagaccatagagggcgctctatgtaaagacggtcggtttagaagtgacattggcgaattcgagtggaagttaaaggagggccataagaagatttatggaaaacagtctatggtcgacgaagtgagcggcaaggtgctggaaatggatatatccaagaagaaggccctgcagcagaaagatattcacaagaagataaagcagaatgaatctgcaaccgacgaaatcaaccatcagtcactgatccagagtaagaaaaaggtccataaaccgaaaaaagatggggaaacaaaagatgtagaacatagccgagagcagattctgccaccacaggacctgagtcattacatcaaagataaaacccgccaaacaattccccggattcggaactactatttttgcagtctgcccagaaagtaccgccagatcaattcgcaggtccgacgtcggccccacctgggccgccgttatgcaattaacttggacgtgcagaaagaggccatcaacctgttgaagaactatcagacactcaacgaagccattatgcaccagtacccaaactttaaagaagaagcccagtgggtgagaaagtactttcgagaagagcagaagagaatgaatttgtcccctgccaagcaatttaatatatacaagaaggactttggcaaaatgacagccaattccgtcagtgttgcaacttgtgagcaattgacttattactccaaaagtgtcgggtttatgcagtgggacaataacggcaacaccggtaacgccacctgcttcgtctttaacggaggctatatttttacgtgtaggcacgtggtacacttgatggttggtaagaatactcacccaagcctctggccagacattatctcgaaatgtgccaaggtcacttttacatacactgaattttgccctactccagacaattggtttagcattgaaccatggttgaaagtatcgaacgagaacttggactatgccatcttgaagttgaaagaaaacggaaatgccttccccccgggtttatggcggcagatatctcctcagccctcgaccggcttgatttatcttattggacaccccgaaggacagattaagaaaatcgacggatgcacagtgattcccctgaatgagaggttgaagaagtatcccaacgactgccaggacggcctggtggacctatacgatacgacatcaaacgtgtattgcatgtttacccagcgaagtttcctatcagaggtctggaatacccatacgctttcttacgacacatgtttttctgacggatcttccggatcacctgtgttcaacgcttcaggcaagttggtggccctccacacgttcggtttattttatcagcggggttttaacgtgcatgctttaattgagtttggctactctatggattctatcttgtgtgacataaagaaaactaatgaatccttgtataagagcctaaatgatgagaaactagagacttacgatgaagagaaaggaaagcaggagtccagcctgcaagaccatcaaatcgagcccatggagtgctag

SEQ ID NO: 54508 - DNA, 2115 bp, Artificial Sequence
  derived and/or modified sequence
atgaagcagacccacgccgacacccccgtggaccactgcctgagcggcataagaaagtgttcatccacctttaagctcaagtccgaggttaacaagcacgagaccgccctagaaatgcagaacccaaacctgaacaacaaggaatgttgctttaccttcactttaaatgggaactcaaggaaactggacaggagtgtgtttaccgcgtatggaaaaccgtctgaatccatctattctgcactttcagctaacgactatttctcagagaggattaagaatcaatttaacaaaaacatcattgtgtatgaggaaaaaactatcgacgggcatatcaacctcgggatgccactgaagtgcctcccgagtgattctcatttcaagatcactttcggccaacgcaagtccagcaaggaagatggacacattctcaggcagtgtgagaatccgaacatggagtgcatattatttcacgttgttgctatcggacggacaaggaagaaaatcgtgaagatcaatgaactccatgaaaaagggagcaaactgtgtatatacgccctgaagggggaaacaatcgaaggggccctgtgcaaggatggccggtttaggtcggatatcggtgagttcgaatggaagttgaaggaggggcataaaaagatctacggaaaacaaagcatggtcgatgaggtcagcggaaaggtactcgaaatggacattagcaaaaagaaagcactgcagcagaaggatattcacaaaaagataaagcagaatgaatcggccactgacgagattaaccatcagtcgttgattcagtcaaaaaagaaagtgcacaagcctaagaaggatggggaaacaaaggatgtagagcacagtagagaacagatacttcctcctcaggacctatctcactatatcaaggataagacccgccagactatacctcgaattaggaactattacttctgtagcttgccccgcaaatacaggcaaattaatagccaggtgaggagaaggccacatctgggaagacgatacgctattaatctagacgtccaaaaggaggcaattaatctgcttaaaaattatcagactctcaacgaggcaattatgcaccagtacccaaatttcaaggaagaggcccagtgggtccgtaagtactttcgggaggagcagaagcgcatgaatttgtcgcctgcaaaacagttcaatatctacaagaaggattttgggaaaatgacagccaacagcgtttcagtggccacatgtgagcagctcacttactattctaagagcgtgggattcatgcagtgggacaacaatgggaatactggtaatgcgacttgctttgtgtttaacggggggtacatttttacctgcagacatgtggtgcacctcatggtgggaaaaaatactcacccgtccctctggccagacattattagcaagtgcgcaaaagtgactttcacatacaccgagttctgccctacacccgataactggttcagtattgaaccttggctgaaagttagcaatgagaatctggattatgcaatcctgaaactgaaggaaaacgggaatgctttccccccaggactatggcggcagatttctcctcaacccagcacaggtctgatatacctaattggacacccagaagggcaaattaaaaaaatagatggatgtaccgtgataccccttaacgagcggctgaagaaataccccaacgactgccaagatggactggtcgatctctacgataccaccagcaatgtttactgtatgttcacccagcggagctttttgagtgaggtttggaatactcatactctgagttacgacacttgcttcagcgacgggtcgtccggaagcccagtgtttaacgctagcggcaaactcgttgcgctacatactttcggtctgttttaccagcgtggctttaacgtgcatgctctcatcgaatttggctattccatggactctatcctgtgcgatattaaaaaaacaaatgaatccttgtataaatcccttaatgatgagaaactggagacctacgacgaggaaaagggcaagcaggaatcttcgctgcaagaccatcaaattgagcccatggaatgttag

SEQ ID NO: 54509 - DNA, 489 bp, Artificial Sequence
  derived and/or modified sequence
atgaagcagacccacgccgacacccccgtggaccactgcctgagcggcatcaggaaatgttccagcacgttcaagcttaaaagcgaggtcaacaagcacgagaccgccctggaaatgcagaatcccaacctcaacaataaagaatgctgcttcacattcaccctaaacggaaactcaaggaagctggatagatccgtattcactgcctacgggaagccatctgagagcatttattcagctttgagcgccaacgattacttttcggagcggattaaaaatcagtttaacaagaatataatcgtgtatgaggagaaaactatagacggccacattaatttgggtatgcctctgaagtgcttaccttctgatagtcacttcaaaattaccttcggacaacgaaagagctccaaagaagatggacatatcctccgtcagtgtgagaacccgaatatggagtgcatcctctttcatgtggtcgccatcgggtag

SEQ ID NO: 54510 - DNA, 2115 bp, Artificial Sequence
  derived and/or modified sequence
atgaagcagacacatgccgacacccccgtggatcactgccttagcggcatcaggaagtgtagctcaacttttaagttgaagtcagaagtgaataaacacgaaaccgccctagagatgcaaaatcccaatctaaacaacaaagagtgctgcttcacgttcactttaaatggtaacagccggaagcttgatcggagtgtgtttaccgcttacggcaaaccgagcgagagtatctatagcgccttgagcgcgaatgattatttttcagagagaataaagaatcagtttaacaagaacataatcgtctacgaggaaaaaacaatcgacggtcatatcaatcttgggatgccacttaaatgcctcccttccgattcacactttaagataacatttggccaaagaaagagttcgaaggaggacggccacattcttcggcaatgtgaaaatcctaacatggaatgcatccttttccatgtggtagccattggcagaacccgtaagaagattgtgaaaataaatgagctacatgaaaagggatctaagctctgtatatacgctcttaagggagagactatcgagggagccctctgcaaagacggccgattcagaagcgatattggtgaatttgagtggaagctcaaggaaggacacaagaaaatttatggaaagcagagtatggttgacgaagtgagtggtaaggtgctcgagatggacatatccaaaaaaaaagctttacagcagaaagatatacataaaaagataaagcagaacgaatctgccaccgacgagatcaaccaccaatcactgatacaatctaagaagaaggtccacaaacctaaaaaggatggcgagacgaaggacgtagagcactctcgggaacaaattcttccccctcaggatctgagtcactatatcaaagacaaaaccagacaaactatccctagaatccgcaactactacttttgtagtcttccacgaaaataccgtcagatcaactcccaggtcagacgcaggccccatctcggcaggagatacgctattaatctcgacgttcaaaaagaagcaattaaccttctgaaaaactaccagacactcaacgaggccatcatgcatcaatacccaaattttaaggaagaagcacagtgggtgcgcaagtactttcgcgaggaacagaagagaatgaatttgagcccggctaaacagttcaatatctacaaaaaagattttggaaagatgacagccaattcagtgtccgtagctacctgcgagcagttgacgtattacagcaaatcagttgggttcatgcaatgggataataatggtaacactgggaacgcaacttgttttgtgttcaatggcggatatatattcacatgcagacacgtcgtccatttaatggtcggaaagaacacccacccatccctctggccggatatcattagcaaatgcgcaaaggtcacatttacttatactgaattttgccccacccccgacaattggttcagcattgaaccttggctgaaagtgtctaatgagaatctcgactatgccatactgaagctgaaagaaaatgggaacgctttcccacctggcttatggaggcagatttcccctcagccctccaccggcctgatctatcttattggccaccccgaaggccagattaaaaaaattgacgggtgtaccgtcatacccttgaacgagagactgaagaagtaccctaacgattgccaggacggccttgtggacttgtacgacaccacgtctaacgtgtactgcatgttcacccagcgaagcttcctcagcgaggtatggaacacccacactttaagctacgacacatgtttctccgacggtagctcaggctctcccgtgttcaatgcctcggggaagctggtcgccctgcatacattcggactgttctaccagcgcggttttaatgtgcacgcactgattgaatttggctactcgatggattctattttgtgtgacataaaaaagacaaatgaatcgctgtataagtcactcaatgatgagaaactcgaaacctacgacgaggaaaagggtaaacaagagagctcgttgcaggaccatcagatcgaaccaatggagtgttag

SEQ ID NO: 54511 - DNA, 2115 bp, Artificial Sequence
  derived and/or modified sequence
atgaaacagactcatgccgataccccagtggaccactgccttagcggaatcagaaaatgcagctcaacgttcaagcttaaaagcgaggtaaataagcacgaaaccgccttagagatgcagaatcccaatctgaacaataaagaatgctgcttcactttcacattaaacgggaactcccgcaaacttgataggtcagtgttcactgcctatggaaaaccgtcagaatcaatctatagcgccctgtcagctaacgactacttttctgagcggataaagaaccagttcaacaagaatattatcgtctatgaggaaaagaccatcgacggacacattaatctgggcatgcccttgaaatgccttccttcagactcccactttaagatcacctttggccaacggaagtcatccaaagaagacggccacatccttcgccagtgtgaaaatcccaatatggaatgtattctattccatgtggtggctattggacgcactcgcaaaaaaattgtcaagattaatgaactgcacgagaagggttcgaaactttgcatttacgcactgaagggggagacgatcgaaggtgccctgtgtaaggatggaagatttaggtctgacatcggtgaatttgaatggaagttgaaggaggggcataagaaaatctacggcaagcagtcgatggtagacgaagtgtccggcaaagtattagagatggacattagcaagaagaaggctctccagcagaaggacattcacaagaagataaagcagaacgagagcgcaaccgatgaaattaatcaccagagtctaatccagtcaaaaaaaaaagtgcataagccaaagaaggatggggagacgaaggatgtggagcactctcgggagcaaattcttccgcctcaggaccttagtcactacattaaagataagaccagacagacaatacctcgaatccgcaactactacttttgttctctccccagaaaataccgacaaataaattcacaggtcaggcgtaggccacacttgggacggaggtatgccatcaatcttgacgtccagaaggaggcaattaatctgctgaagaactaccagacactgaacgaagcgatcatgcaccagtacccaaatttcaaagaggaggctcaatgggtccgaaaatactttcgagaggaacagaaacgaatgaacctgtctcccgctaaacaattcaatatctataagaaagatttcggaaaaatgaccgccaattctgtgtcagtagccacttgcgaacagttgacgtattatagcaaatcagtcggctttatgcaatgggacaataacggtaacaccggcaatgccacatgttttgtgttcaacggtggttatatttttacttgcagacacgtggttcaccttatggtcggcaaaaatacccaccccagtctttggcctgatattatctctaagtgcgctaaggtgactttcacatacactgagttctgtccaacacccgacaattggttttctattgagccttggctaaaggtgtctaacgagaacctggattacgcgatactgaaactgaaagaaaacggcaatgcattcccacccggactgtggaggcagatatccccccagccctcaacaggactgatatatctgatcgggcacccagaggggcagatcaaaaagattgacgggtgcaccgtgatccccctcaatgagcggttgaaaaagtatcctaatgattgtcaggatggtctggtggacctgtacgacaccacaagcaacgtctactgcatgtttacgcaacgaagcttcctgagtgaggtctggaacacacacacactcagctacgatacctgtttcagcgacggctcaagcggcagtccagtgttcaatgcatcagggaagctggttgccctgcatacattcggccttttttaccaacggggattcaatgtgcacgcactcatagaatttggatacagcatggacagcatcctatgcgacattaaaaaaacaaacgaatcactgtacaaaagcttgaacgatgagaaactcgaaacttacgacgaggaaaaggggaagcaagagtcctcacttcaggaccatcaaattgagccgatggagtgctag

SEQ ID NO: 54512 - DNA, 489 bp, Artificial Sequence
  derived and/or modified sequence
atgaagcaaacacacgccgacacacccgtggatcattgcctttccgggatccgcaaatgtagttccaccttcaagctgaaatctgaggtcaacaaacacgaaactgcgctcgaaatgcagaatcctaacctcaacaacaaggagtgctgctttacttttaccttgaacggcaactcacgcaaacttgatagatcggtgtttaccgcttacggaaagccctccgaatccatttactcggcattgtcggctaatgattacttttcagagagaatcaaaaatcagtttaacaagaatatcattgtgtacgaggagaaaactattgacggccatattaatctgggcatgccactgaaatgcctgccgtccgatagccactttaagatcacctttgggcagaggaaaagcagcaaagaagacgggcacatcctccgccagtgcgagaacccaaacatggaatgcatcctttttcatgtggtcgccatcgggtag

SEQ ID NO: 54513 - protein, 257 aa, Artificial Sequence
  derived and/or modified sequence
MSRPLITRSPASPLNNQGIPTPAQLTKSNAPVHIDVGGHMYTSSLATLTKYPESRIGRLFDGTEPIVLDSLKQHYFIDRDGQMFRYILNFLRTSKLLIPDDFKDYTLLYEEAKYFQLQPMLLEMERWKQDRETGRFSRPCECLVVRVAPDLGERITLSGDKSLIEEVFPEIGDVMCNSVNAGWNHDSTHVIRFPLNGYCHLNSVQVLERLQQRGFEIVGSCGGGVDSSQFSEYVLRRELRRTPRVPSVIRIKQEPLD

SEQ ID NO: 54514 - protein, 865 aa, Artificial Sequence
  derived and/or modified sequence
MARMPGSGDCNTSAGGSASAAAAAAENNGERGEGERGAGGRGRRHSRPHYCSAGEEEEEEEEEDEIQEVQITGDEEEEEDGGGGLEEDEEEEEEEEMGLDWDEPLEPEDSAGEELEPEPVHMINMDQSAALEPEAPPRLLAPRARGGPPGDGSELDPDVLQRPERARLSENTRLATRYAVRIFREYLSEKAQSPDFETMDKGALCRVLRSFYAEARSKSGQLYSKSSLISIRSSLNRYLNEPPYCRTLDLTKDPELRSANLTLAAVIRKLEEQGAGPVVQKQAITRADLRKLYTSSVFSTNTPFGLLNKVWFETCMYFCTRGRENQRELEEDSFGLAMDEDGRKFVYFKSLGPYHKSRSSSWSKKRAESSDEENLPRMYETGTEFCPYASFVKYLSKRNPLCKAFFQRPRDHCSEGDVTWYENKAIGKNLLGTRMQMLSKAAKLSKTYTNHCIGAVSIATLNSIAGIGTKLGSPAPQGCYAEALNGAARHHSHHPPTHPSHHHRPQPPSLGNTYILPKDSQVGPDVKSEAAPKRALYESVFGSGEICGPTSPKRLCIRPSEPVDAVVVVSVKHDPLPLLPEANGHRSTNSPTIVSPAIVSPTQDSRPNMSRPLITRSPASPLNNQGIPTPAQLTKSNAPVHIDVGGHMYTSSLATLTKYPESRIGRLFDGTEPIVLDSLKQHYFIDRDGQMFRYILNFLRTSKLLIPDDFKDYTLLYEEAKYFQLQPMLLEMERWKQDRETGRFSRPCECLVVRVAPDLGERITLSGDKSLIEEVFPEIGDVMCNSVNAGWNHDSTHVIRFPLNGYCHLNSVQVLERLQQRGFEIVGSCGGGVDSSQFSEYVLRRELRRTPRVPSVIRIKQEPLD

SEQ ID NO: 54515 - DNA, 2598 bp, Artificial Sequence
  derived and/or modified sequence
atggcacggatgcccggcagtggcgactgcaacacttctgcaggaggttcggcctctgctgcagcagctgccgcggaaaacaacggagagcggggagagggggagagaggcgccggcgggcgcggcaggaggcatagtcgaccacactattgcagcgcaggcgaggaagaagaagaagaagaggaagaggacgagatccaggaagtccagatcacaggagatgaggaagaggaggaggacggaggaggcggcttggaagaagatgaggaagaagaagaagaagaagagatgggcctggactgggatgagccattggagccagaggacagcgcaggggaagagctggaaccggagcctgtgcatatgatcaatatggaccaatccgcagcgctggagccagaagcaccgccacggctactggcgcctcgcgctcggggcgggccacccggagatgggagcgagctggaccctgacgtgcttcagcgacctgagcgcgcccgcctttctgagaatactaggttggctaccagatatgctgtgcgaattttcagagagtatctaagtgagaaggctcaaagtcctgattttgaaaccatggacaaaggtgccttgtgtcgcgtcctcaggtcattctacgcggaagcaagatctaaatcaggccagctatattctaagtcctccctgatctcaattaggagcagtctgaacagatacctgaacgagcctccttattgtcgcacgttggacctaactaaggacccggaattacgtagcgctaatctcacactggccgctgtaattcggaaactggaggagcagggggctggtccggtcgtgcagaaacaagctatcacaagagctgatctcagaaagctctacacctcatccgtatttagcaccaatacccccttcggactactcaataaggtttggttcgaaacatgtatgtatttctgtacaagaggccgggaaaatcagagggagttggaggaagactccttcggcctggcaatggatgaggatggaagaaagtttgtgtattttaagtctctgggtccgtatcataaaagccggagtagttcttggtccaagaagagagctgagtcatcggatgaagagaacttaccccggatgtacgaaactggcacagagttctgcccctatgctagctttgtcaagtatttgtccaagcggaacccactatgcaaagctttttttcagcgaccccgcgatcactgctctgaaggagatgtgacatggtacgaaaacaaggcgataggtaaaaacctgctgggcactcgcatgcagatgctgtccaaggcagcaaagttgtctaagacctataccaatcattgtatcggggccgtgagcatcgcaacactcaatagtatagccggtattggaaccaaacttggctcgcctgccccccagggctgctatgctgaggctttgaatggggcggcccgacatcacagccatcatcctcctacccatccatctcaccatcaccggccccagcccccctcgctcggaaatacctacattctcccaaaagactcccaggtggggccagatgtgaaatccgaggccgctcccaaacgggccctgtatgagtccgtttttgggtccggagagatctgtgggcccactagcccaaagagactgtgcatccgaccctcagagcctgtggatgcggtggtggtggtctctgtgaagcacgatcctctgccccttctgcctgaagctaacggccatcgcagcaccaacagccctactatcgtgtctcccgccattgtgtctcctacccaggacagccgccctaacatgagccggcctctaattaccaggtcccctgcttcacctctgaataaccagggcatacccacccccgcccagcttacgaaaagtaatgcgcccgtgcacatcgatgtgggcggacacatgtacacgagctctctcgcgaccttaaccaagtaccctgagtcacgtataggccgcctgtttgatggaactgaacctattgtgttggattcattgaagcagcactatttcatcgatcgtgatgggcagatgtttagatatatcttaaactttcttagaacatctaaactattgatacctgacgatttcaaagattataccttgctttatgaagaagctaaatacttccagctgcagccgatgcttctggaaatggagagatggaagcaggatcgcgagactggccggttttcgcgcccttgtgagtgtttagtcgtgcgtgtggccccagacctgggagagcgcataacacttagcggtgataagagcttaatcgaagaagtgtttccggagatcggtgatgtaatgtgtaacagtgtgaatgccgggtggaaccatgattccacccatgtgattcggtttccactgaacggctattgccacctgaatagtgtccaggtgttagagcggctgcagcagaggggatttgagattgtgggatcctgtggtggcggagtggatagctcacagtttagcgagtacgtccttaggcgcgaactgagacgcacccctagggtgcccagcgtgatacggatcaaacaagaacctctcgactag

SEQ ID NO: 54516 - DNA, 2598 bp, Artificial Sequence
  derived and/or modified sequence
atggccaggatgcctggcagcggggactgcaacaccagcgctgggggcagcgccagcgctgctgctgctgctgctgagaacaacggggagcggggggagggggagcggggggccggcggccggggcagaagacacagccggccccactactgcagcgctggggaggaggaggaggaggaggaggaggaggatgagatccaggaggtgcagatcactggagatgaggaggaggaggaggatggcggcggcggcctggaggaggatgaggaggaggaggaggaggaggagatgggcctggactgggatgagcccctggagcctgaggacagcgctggggaggagctggagcctgagcctgtgcacatgatcaacatggaccagagcgctgccctggagcctgaggccccaccccggctgctggccccccgggcccggggcggccccccaggagatggcagcgagctggaccctgatgtgctgcagaggcctgagcgggcccggctgtctgagaacacccggctggccaccaggtatgctgtgcgcatcttccgggagtacctgtctgagaaggcccagagcccagactttgagaccatggacaagggggccctgtgccgggtgctgcggagcttctatgcagaggcccggagcaagagcggccagctgtacagcaagagcagcctcatcagcatccgcagcagcctgaaccgctacctgaatgagcccccctactgcaggaccctggacctgaccaaggaccctgagctgcggagcgccaacctgaccctggccgctgtgatcaggaagctggaggagcagggcgccggccctgtggtgcagaagcaggccatcaccagggctgacctgaggaagctgtacaccagcagcgtcttcagcaccaacacccccttcggcctgctgaacaaggtgtggtttgagacctgcatgtacttctgcacccggggccgggagaaccagcgggagctggaggaggacagctttggcctggccatggatgaagatggcaggaagtttgtgtacttcaagagcctgggcccctaccacaagagccgcagcagctcctggagcaagaagagagctgagagcagtgatgaggagaacctgcccaggatgtatgaaacaggaacagagttctgcccctatgccagctttgtgaagtacctgagcaagaggaaccccctgtgcaaggccttcttccagaggccccgggaccactgcagtgaaggagatgtgacctggtatgagaacaaggccatcggcaagaacctgctgggcaccaggatgcagatgctgagcaaggccgccaagctgagcaagacctacaccaaccactgcattggagctgtgtccatcgccaccctgaacagcattgctggcatcggcaccaagctgggcagccctgccccccagggctgctacgccgaggccctgaatggagctgcccggcaccacagccaccacccccccacccaccccagccaccaccaccggccccagccccccagcctgggcaacacctacatcctgcccaaggacagccaggtgggcccagatgtgaagtctgaggccgcccccaagagggccctgtatgaatctgtgtttggaagtggagagatctgtggccccaccagccccaagaggctgtgcatccggcccagcgagcctgtggatgctgtggtggtggtgtctgtgaagcatgaccccctgcccctgctgcctgaggccaacggccacaggagcaccaacagccccaccatcgtgtccccagccatcgtgagccccacccaggacagccggcccaacatgagccggcccctcatcaccaggagccctgccagccccctgaacaaccagggcatccccaccccagcccagctgaccaagagcaatgcccctgtgcacattgatgtgggcggccacatgtacaccagcagcctggccaccctgaccaagtacccagagagccgcatcggccgcctgtttgatggaacagagcccatcgtgctggacagcctgaagcagcactacttcatcgacagagatggccagatgttccgctacatcctgaacttcctgcggaccagcaagctgctgatcccagatgacttcaaggactacaccctgctgtatgaggaggccaagtacttccagctgcagcccatgctgctggagatggagcgctggaagcaggaccgggagaccggccgcttcagccggccctgtgaatgtctggtggtgcgggtggccccagacctgggggagcgcatcaccctgagcggggacaagagcctcatcgaggaggtgtttcctgagattggagatgtgatgtgcaacagcgtgaatgccggctggaaccacgacagcacccacgtgatccgcttccccctgaatggctactgccacctgaacagcgtgcaggtgctggagcggctgcagcagaggggctttgaaattgtgggcagctgtggcggcggcgtggacagcagccagttctctgaatatgtgctgcggcgggagctgcggaggaccccccgggtgcccagcgtcatccgcatcaagcaggagcccctggactag

SEQ ID NO: 54517 - DNA, 2598 bp, Artificial Sequence
  derived and/or modified sequence
atggcccggatgcccggcagcggcgactgcaacaccagcgccggcggatctgcatctgctgcagccgcagccgctgagaataatggagaaagaggtgagggggagaggggtgctggcggtaggggaaggaggcattcacggccccactactgctccgccggagaggaggaagaagaagaagaggaggaagatgaaatccaggaagtgcaaattaccggggatgaggaggaagaagaggatgggggcggtggcctcgaggaggacgaagaggaagaggaggaggaagaaatgggactcgactgggatgaacccctggagccggaggactccgcgggagaggaactggaacccgaaccagtacacatgatcaatatggatcagagcgctgcactcgagccagaagccccaccacgcttgctggcccctagggcccggggcggacctcccggggatggatccgagctagatccggatgtgttacagcgtccggagagagcccgtctgagcgagaacacaaggctggctacccgctacgccgtcagaatcttcagagagtacctcagcgaaaaagcacagtccccagacttcgagacaatggacaagggcgccttgtgtagggtgctgcgatccttttacgccgaggcgaggtctaagagcggtcagctgtattcaaaatccagtctcatttccatacgctcctcgcttaaccgttacctgaatgaacccccatattgccggacgctggatctcactaaggatcccgaactgagatctgccaatttaacacttgctgcagtgattaggaagcttgaggagcaaggcgctggacctgttgtccagaagcaagccataacaagggcggatctgcggaagctgtatacttcttccgtcttcagtacaaacactccatttggcttactcaacaaggtatggttcgaaacctgcatgtatttttgtactagaggaagagaaaatcagcgagaactcgaagaggacagcttcggcctggccatggacgaagacggaagaaaatttgtctattttaaaagccttggtccctaccacaaatcaaggagttctagctggagcaaaaagagggctgagagctcagacgaagagaacctccctcggatgtacgaaaccggcaccgagttctgtccctacgcaagttttgtgaagtacctgtctaagcggaacccactgtgcaaggccttctttcagaggccccgggaccactgttccgaaggagatgtgacgtggtatgagaacaaggccattggaaaaaatctcctgggcacgcgaatgcagatgctatccaaggcagccaaacttagcaagacttacactaaccactgtattggtgctgtcagcatagcaactcttaactccatagcaggaatcggaaccaagcttggcagccctgcgccacagggctgctatgccgaagcattaaatggggcggcccgccaccactcacaccatccacctacccacccctcccaccatcaccgtcctcagcctccttccctgggtaatacatacattctgcctaaagattcacaggtaggacctgacgtcaagtcggaggcggccccaaaaagggcgctatatgaatcggtatttggcagcggggaaatttgcgggcccacctctccaaaacgactgtgcatacgcccatcggaaccggttgacgccgttgtagtggtctccgtgaaacacgatcctttgcccctattaccagaagccaatggacaccgctcaaccaactcacctacaatagtcagccctgctatcgtgagtcccacgcaggactcccgacccaatatgtctcgccccttgattaccagatcccctgcttcccccctcaacaaccagggcataccaaccccagcccagctgaccaagtctaacgctcctgtccacatagacgtaggaggccacatgtatactagctctctcgccaccctaaccaagtaccccgagtcaagaatcggtcgcttatttgacggcactgaacccatcgtgctcgactccttgaagcaacactacttcattgacagagacggtcagatgtttcgctacattctgaactttcttcggaccagcaagctgctgatacccgacgattttaaggattatacgctgctctatgaagaggccaagtatttccagctccagccaatgttgctcgaaatggagagatggaaacaggaccgagagactggacggttctcaagaccctgtgaatgcctggttgtgagggtggcaccagacctgggtgagaggattacacttagtggcgataaatcacttattgaggaggtgtttcctgaaatcggcgacgtcatgtgtaatagcgtaaacgccggctggaatcatgattcgacccacgttattcggttccctttaaacggctattgtcacctcaattcagtgcaggtgctggagcggttacaacagcgaggattcgagatcgtggggagttgcgggggcggtgtagattcttctcagttctccgagtacgtgctaagaagggagctgcgcagaaccccaagagtgccttctgttatcagaatcaaacaggaaccactggactag

SEQ ID NO: 54518 - DNA, 3428 bp, Artificial Sequence
  derived and/or modified sequence
atggcgagaatgcctggcagcggggactgtaacaccagcgcgggcggcagcgccagcgctgccgccgccgccgccgagaacaatggggagcggggcgagggcgagcgcggcgcggggggccgcggccgccgccacagccgtccgcactactgcagcgcgggcgaggaggaggaggaagaggaggaggaggacgagatccaggaggtgcagataacgggggacgaggaggaggaggaggacggaggtggggggctggaggaggacgaggaggaggaggaagaggaggagatggggctggactgggacgagcccctggagcccgaggactcggccggggaggagctggagcccgagccggtccatatgatcaatatggaccagagcgccgcgctggagcccgaggcgccgccgcgactgctggcgccccgggcccgcggtgggccgcccggggacggctccgagctggaccccgacgtgctgcagcgccccgagcgggcccggctgagcgagaacacccggctggccacccgctacgccgtgcgcatcttccgggagtacctgagcgagaaggcgcagagcccggacttcgagaccatggacaagggggcgctgtgccgcgtgctgcgctccttctatgccgaggcccgctccaaaagcggccagctctacagcaagtcgtcgctcatcagcatccgcagctccctcaaccgctacctcaatgagcccccgtactgccgcacgctcgacctcaccaaggaccccgagctgcgcagcgccaacctgacgctggccgcggtcatccgcaagctcgaggagcagggcgccgggccggtggtgcagaagcaagccatcacgcgcgccgacctgcgcaagctgtacacctccagcgtcttcagcaccaacacgcccttcgggctgctcaacaaggtctggttcgagacgtgcatgtacttctgtacccgcggccgcgagaaccagcgtgagttggaggaggactcttttgggctggccatggacgaggacggtcgcaagttcgtctacttcaagtccctcgggccctaccacaagtcgcgctcgtcgtcgtggagcaagaagcgcgccgagagcagcgacgaggagaacttgccccgcatgtatgagacgggcaccgagttctgcccctacgccagcttcgtcaagtacctgtcgaaacgcaaccctctctgcaaggcgttcttccagcggccccgggaccactgcagcgagggcgatgtgacctggtacgagaacaaagccatcggcaagaacttgctaggcactcggatgcagatgctctccaaggcggccaagctctccaagacctacaccaaccactgcatcggcgccgtctccatcgccacgctcaacagcatcgcgggcattggcaccaagctgggctcgcccgccccgcagggctgctacgccgaggctctgaacggggcggcacggcaccactcccaccacccccccacccatccctcccaccaccaccgcccccagccgccctcgctggggaacacttacatcctccccaaagacagccaggtcgggcccgacgtgaaatccgaggctgcgcccaagcgcgccctgtacgagtctgtgttcgggtcgggggaaatctgcggccccacttcccccaaaagactttgtatccgcccctcggagcctgtggatgcggtggtggtggtttccgtgaaacacgaccccctgcctcttcttccagaagccaatgggcacagaagcaccaattctcccacaatagtttcacctgctattgtttcccccacccaggacagtcggcccaatatgtcaagacctctgatcactagatcccctgcatctccactgaacaaccaaggcatccctactccagcacaactcacaaaatccaatgcgcctgtccacattgatgtgggcggccacatgtacaccagcagcctggccaccctcaccaaataccctgaatccagaatcggaagactttttgatggtacagagcccattgttttggacagtctcaaacagcactatttcattgacagagatggacagatgttcagatatatcttgaattttctacgaacatccaaactcctcattcctgatgatttcaaggactacactttgttatatgaagaggcaaaatattttcagcttcagcccatgttgttggagatggaaagatggaagcaggacagagaaactggtcgattttcaaggccctgtgagtgcctcgtcgtgcgtgtggccccagacctcggagaaaggatcacgctaagcggtgacaaatccttgatagaagaagtatttccagagatcggcgacgtgatgtgtaactctgtcaatgcaggctggaatcacgactcgacgcacgtcatcaggtttccactaaatggctactgtcacctcaactcagtccaggtcctcgagaggttgcagcaaagaggatttgaaatcgtgggctcctgtgggggaggagtagactcgtcccagttcagcgaatacgtccttcggcgggaactgaggcggacgccccgtgtaccctccgtcatccggataaagcaagagcctctggactaaatggacatatttcttatgcaaaaaggaaaacacacacaaccaataactcaaacaaaaaagggacatttatgtgcagttgggacagcaaaccaagtcctggacgtaaaatcgaataaaagacacatttatatccaatagagaccacacctgtattcatatgggaacaattggaatagtgatatcctcaaggtgtaaaaaatatataaatatatatatatatgtcaaaaggtaggaaatgcaaaaaagaaaaaaaaaaaaggtgacagccgcagttggtgctgtgatggccgtgaagtgtcctgggccttccgaggcctctgacaaataaacaagccatgagtggtgaggacacagtctccttacagtttccattgccaacaacagccatccatatttcttttttcctttgtctttctttttcctttttttttaaaaaaacaaaacaaacaaaacaccttgaatcaagtttgtttgtatatggaggttccacgtctttctttaggcagggaccaggcaggacttcagaaaaaccctcatgagcacattgcaaagatgttagacatgaaattttaaatgtagtttgtacagaagtcacacttttttgtccacctcacagatgtgaactttactttgttttaaaactgatcagttttgccaaggggccagaattattccttgttagaattgctccagttcaagtctgctgctttcctacaatttttcaaattttataatgtattaaatacaataaactctgtttaaaaaataaggtctgtgtgaaacacacatgtgggggtgaggctggattaaagtgaaattttttctttttg

SEQ ID NO: 54519 - DNA, 2598 bp, Artificial Sequence
  derived and/or modified sequence
atggcacgcatgccagggtcgggggactgcaatacctcagcgggtggatctgccagcgcagctgccgcagcggcagaaaacaatggcgagcgtggggagggtgaaagaggtgctggcggtcgcggtagacgacatagccgccctcactactgttccgccggtgaggaagaagaggaggaagaggaagaagatgaaattcaggaggtccagatcacaggggacgaagaagaggaagaggacgggggagggggattggaggaggatgaagaagaagaggaagaggaggagatgggactagactgggatgaacccttggagccagaggactccgccggagaggaactggaaccggagcccgtccacatgattaacatggaccagagcgccgcactggagccagaagctcccccacggctactcgccccacgtgcccgtggaggccctcctggggatgggagtgagttggaccctgacgtgctccagcgcccagaacgagcgagactctctgagaacacaaggctggcgaccagatatgcggtgcgaatatttagagagtatctgtctgaaaaagcccagtcacccgacttcgaaaccatggacaagggagcattgtgccgggtgctgcggtctttttatgctgaagccagatctaagagcgggcagctctacagtaagagttcattgatctctatccggtcctcactgaatcgatatctgaacgaacctccttactgcagaacacttgatctgaccaaggaccccgaactccggagtgccaacctcactttggccgctgtcattcgaaaactggaagagcagggtgccggacccgttgtgcagaaacaggctattacacgcgctgatctgcgcaagttgtacacatcgtcagtgttttccactaacacaccattcgggctactcaacaaggtctggttcgaaacctgtatgtatttttgcacccgcggaagagaaaatcagcgcgagctcgaagaggacagcttcggactcgcaatggacgaagacgggcgaaagttcgtgtatttcaaatcactaggaccctaccataagagtagaagctcctcctggtccaagaagagagccgaatcatccgatgaggagaacctgccccgtatgtacgagaccggtacggagttctgcccatatgcctcctttgtgaagtacctgtcaaaacgtaacccgctgtgcaaggcattctttcagcgaccacgggatcactgttctgagggggacgttacctggtacgagaacaaggcaatcggaaagaacctcttagggacccgcatgcagatgttgtcaaaggctgccaaactgagtaaaacctacactaaccactgtatcggtgcagtctccattgccaccctgaattcaatcgcagggataggcaccaagttgggatctcccgcaccgcaggggtgttatgcagaagcccttaatggtgccgcacgacaccacagtcatcaccccccaacccaccctagccatcaccaccggccacaaccaccctctcttggcaatacctatattttgccaaaggacagtcaagtaggtcctgatgttaaaagtgaagccgcaccgaagagggctctgtatgaatctgttttcggctccggggagatctgtgggcctacctctccaaagaggttgtgtatccgcccatcggaacccgtggacgctgtggtggtggtgagcgttaagcatgaccctttgccactgctgcccgaagctaacgggcaccgttccaccaacagcccaactatcgtgagtcccgctatagtgagcccaacccaggattccagacctaacatgtcccgccctctgatcacacggagcccagcatctcccttgaacaaccaaggtattcccaccccagcgcagctgaccaaaagcaacgctccagtacatatcgatgtgggcggtcatatgtatactagcagtctggccaccctcaccaaataccccgaatcaagaatcggacgcttgttcgatgggacagagccaatcgttctggacagcctcaaacaacattactttattgatcgggatgggcagatgttccgctacatcctgaactttctgagaacttccaaactcctgatccctgatgactttaaggattatactctgttatatgaagaggccaagtattttcaactgcagcccatgctgcttgagatggaaagatggaagcaggacagagaaacaggacgttttagccggccttgcgaatgcctggttgtacgggttgctccggaccttggggaaagaatcaccctctccggagataagtctctaatcgaggaggtattccccgagatcggagacgtgatgtgcaattcagtgaatgccggttggaaccacgactccacccacgtcattcgcttccctttaaacggatattgccacctcaattctgttcaagtactggagagattgcagcagaggggtttcgagatcgttggttcctgtggtggtggcgtcgattccagtcagttctccgagtatgttctgcgccgtgagctgagacgtacaccccgagtgccttctgtgatccggattaaacaagaaccactcgattag

SEQ ID NO: 54520 - DNA, 2598 bp, Artificial Sequence
  derived and/or modified sequence
atggccagaatgcccggcagcggcgactgcaacaccagcgccggcggcagcgccagcgccgccgccgccgccgccgagaacaacggcgagagaggcgagggcgagagaggcgccggcggcagaggcagaagacacagcagaccccactactgcagcgccggcgaggaggaggaggaggaggaggaggaggacgagatccaggaggtgcagatcaccggcgacgaggaggaggaggaggacggcggcggcggcctggaggaggacgaggaggaggaggaggaggaggagatgggcctggactgggacgagcccctggagcccgaggacagcgccggcgaggagctggagcccgagcccgtgcacatgatcaacatggaccagagcgccgccctggagcccgaggccccccccagactgctggcccccagagccagaggcggcccccccggcgacggcagcgagctggaccccgacgtgctgcagagacccgagagagccagactgagcgagaacaccagactggccaccagatacgccgtgagaatcttcagagagtacctgagcgagaaggcccagagccccgacttcgagaccatggacaagggcgccctgtgcagagtgctgagaagcttctacgccgaggccagaagcaagagcggccagctgtacagcaagagcagcctgatcagcatcagaagcagcctgaacagatacctgaacgagcccccctactgcagaaccctggacctgaccaaggaccccgagctgagaagcgccaacctgaccctggccgccgtgatcagaaagctggaggagcagggcgccggccccgtggtgcagaagcaggccatcaccagagccgacctgagaaagctgtacaccagcagcgtgttcagcaccaacacccccttcggcctgctgaacaaggtgtggttcgagacctgcatgtacttctgcaccagaggcagagagaaccagagagagctggaggaggacagcttcggcctggccatggacgaggacggcagaaagttcgtgtacttcaagagcctgggcccctaccacaagagcagaagcagcagctggagcaagaagagagccgagagcagcgacgaggagaacctgcccagaatgtacgagaccggcaccgagttctgcccctacgccagcttcgtgaagtacctgagcaagagaaaccccctgtgcaaggccttcttccagagacccagagaccactgcagcgagggcgacgtgacctggtacgagaacaaggccatcggcaagaacctgctgggcaccagaatgcagatgctgagcaaggccgccaagctgagcaagacctacaccaaccactgcatcggcgccgtgagcatcgccaccctgaacagcatcgccggcatcggcaccaagctgggcagccccgccccccagggctgctacgccgaggccctgaacggcgccgccagacaccacagccaccacccccccacccaccccagccaccaccacagaccccagccccccagcctgggcaacacctacatcctgcccaaggacagccaggtgggccccgacgtgaagagcgaggccgcccccaagagagccctgtacgagagcgtgttcggcagcggcgagatctgcggccccaccagccccaagagactgtgcatcagacccagcgagcccgtggacgccgtggtggtggtgagcgtgaagcacgaccccctgcccctgctgcccgaggccaacggccacagaagcaccaacagccccaccatcgtgagccccgccatcgtgagccccacccaggacagcagacccaacatgagcagacccctgatcaccagaagccccgccagccccctgaacaaccagggcatccccacccccgcccagctgaccaagagcaacgcccccgtgcacatcgacgtgggcggccacatgtacaccagcagcctggccaccctgaccaagtaccccgagagcagaatcggcagactgttcgacggcaccgagcccatcgtgctggacagcctgaagcagcactacttcatcgacagagacggccagatgttcagatacatcctgaacttcctgagaaccagcaagctgctgatccccgacgacttcaaggactacaccctgctgtacgaggaggccaagtacttccagctgcagcccatgctgctggagatggagagatggaagcaggacagagagaccggcagattcagcagaccctgcgagtgcctggtggtgagagtggcccccgacctgggcgagagaatcaccctgagcggcgacaagagcctgatcgaggaggtgttccccgagatcggcgacgtgatgtgcaacagcgtgaacgccggctggaaccacgacagcacccacgtgatcagattccccctgaacggctactgccacctgaacagcgtgcaggtgctggagagactgcagcagagaggcttcgagatcgtgggcagctgcggcggcggcgtggacagcagccagttcagcgagtacgtgctgagaagagagctgagaagaacccccagagtgcccagcgtgatcagaatcaagcaggagcccctggactag

SEQ ID NO: 54521 - protein, 1029 aa, Artificial Sequence
  derived and/or modified sequence
MLFRARGPVRGRGWGRPAEAPRRGRSPPWSPAWICCWALAGCQAAWAGDLPSSSSRPLPPCQEKDYHFEYTECDSSGSRWRVAIPNSAVDCSGLPDPVRGKECTFSCASGEYLEMKNQVCSKCGEGTYSLGSGIKFDEWDELPAGFSNIATFMDTVVGPSDSRPDGCNNSSWIPRGNYIESNRDDCTVSLIYAVHLKKSGYVFFEYQYVDNNIFFEFFIQNDQCQEMDTTTDKWVKLTDNGEWGSHSVMLKSGTNILYWRTTGILMGSKAVKPVLVKNITIEGVAYTSECFPCKPGTFSNKPGSFNCQVCPRNTYSEKGAKECIRCKDDSQFSEEGSSECTERPPCTTKDYFQIHTPCDEEGKTQIMYKWIEPKICREDLTDAIRLPPSGEKKDCPPCNPGFYNNGSSSCHPCPPGTFSDGTKECRPCPAGTEPALGFEYKWWNVLPGNMKTSCFNVGNSKCDGMNGWEVAGDHIQSGAGGSDNDYLILNLHIPGFKPPTSMTGATGSELGRITFVFETLCSADCVLYFMVDINRKSTNVVESWGGTKEKQAYTHIIFKNATFTFTWAFQRTNQGQDNRRFINDMVKIYSITATNAVDGVASSCRACALGSEQSGSSCVPCPPGHYIEKETNQCKECPPDTYLSIHQVYGKEACIPCGPGSKNNQDHSVCYSDCFFYHEKENQSLHYDFSNLSSVGSLMNGPSFTSKGTKYFHFFNISLCGHEGKKMALCTNNITDFTVKEIVAGSDDYTNLVGAFVCQSTIIPSESKGFRAALSSQSIILADTFIGVTVETTLKNINIKEDMFPVPTSQIPDVHFFYKSSTATTSCINGRSTAVKMRCNPTKSGAGVISVPSKCPAGTCDGCTFYFLWESAEACPLCTEHDFHEIEGACKRGFQETLYVWNEPKWCIKGISLPEKKLATCETVDFWLKVGAGVGAFTAVLLVALTCYFWKKNQKLEYKYSKLVMTTNSKECELPAADSCAIMEGEDNEEEVVYSNKQSLLGKLKSLATKEKEDHFESVQLKTSRSPNI
